(19) United States
(12) Patent Application Publication
(10) Pub. No.: US 2006/0216722 A1
(43) Pub. Date: Sep. 28, 2006

(54) Glomerular expression profiling

(76) Inventors: Christer Betsholtz, Vastra Frolunda (SE); Karl Tryggvason, Stockholm (SE); Minoru Takemoto, Akita-shi (JP); Liqun He, Stockholm (SE); Jaakko Patrakkas, Stockholm (SE)

Correspondence Address: MCDONNELL BOEHNEN HULBERT & BERGHOFF LLP, 300 S. WACKER DRIVE, 32ND FLOOR, CHICAGO, IL, 60606, US

(21) Appl. No.: 11/090,997

(22) Filed: Mar. 25, 2005

(51) Int. Cl. C12Q 1/68; C07H 21/04

(52) U.S. Cl. 435/6; 536/24.3

(57) ABSTRACT

The present invention provides compositions comprising various glomerular probe sets and methods for their use.

[0001] A compact disc submission containing a Sequence Listing is hereby expressly incorporated by reference. The submission includes two compact discs (“COPY 1” and “COPY 2”), which are identical in content. Each disc contains the file entitled “04-1059 SeqList.txt,” 9.8 MB in size, created Mar. 23, 2005.

[0002] A compact disc submission containing Table 14A and Table 14B is hereby expressly incorporated by reference. The submission includes two compact discs (“COPY 1” and “COPY 2”), which are identical in content. Each disc contains the file entitled “Table 14A.csv,” 604 KB in size, created Mar. 24, 2005, and the file entitled “Table 14B.csv,” 687 KB in size, created Mar. 24, 2005.

### BACKGROUND

[0003] The kidney glomerulus is a highly specialized filtration unit, capable of filtering large volumes of plasma into primary urine, which allows for excretion of low molecular weight waste products, while restricting passage of plasma proteins of the size of albumin and larger (1). The filter constitutes three layers of the glomerular capillary wall: a fenestrated endothelium, glomerular basement membrane (GBM), and a slit diaphragm located between interdigitating foot processes of epithelial podocytes. The ability of the glomerular filter to exclude plasma proteins from the filtrate is essential for life. Leakage of plasma proteins can result in nephrotoxic proteinuria leading to a pathologic chain reaction with end-stage renal disease (ESRD) as a final outcome. For ESRD patients, life-long dialysis or renal replacement constitute the only available treatment options. About two-thirds of ESRD cases are the result of a primary glomerular insult. Glomeruli are affected in systemic diseases, such as diabetes, hypertension, lupus and infections, as well as in drug-induced toxicity, but the molecular pathomechanisms of these disorders are not understood. The central role of the glomerulus in renal pathology makes it reasonable to assume that efficient prevention and treatment of some of the major progressive renal disorders require new therapies targeting specific pathogenic processes in the glomerulus. Although we currently lack knowledge about the molecular pathogenesis of the common glomerular disorders, recent insight into the genetic basis of certain rare hereditary glomerular diseases has identified specific components of the glomerular filter, as well as the podocytes as major targets of glomerular pathogenic pathways (2-11).

[0004] The GBM, which is synthesized by both endothelial cells and podocytes, contains specific proteins, such as type IV collagen, laminin, proteoglycans and nidogen (12). The composition of the GBM switches during glomerular development from fetal collagen IV (α1:α1:α2), laminin-1 (α1:β1:γ1), laminin-8 (α4:β1:γ1) and laminin-10 (α5:β1:γ1) to adult collagen IV (α3:α4:α5) and laminin-11 (α5:β2:γ1) (12, 13). Podocyte differentiation is crucial for this GBM switch. Mutations in adult type IV collagen lead to distortion of the GBM, hematuria and Alport syndrome (2, 7, 12), and defects in the laminin β2 chain of laminin-11 cause Pierson congenital nephrotic syndrome (8), which emphasizes the role of the GBM in the glomerular filter.

[0005] Podocytes are highly specialized epithelial cells, which enclose the glomerular capillaries by interdigitating foot processes bridged by a slit diaphragm (14). Although podocytes account for only about 15% of the total number of glomerular cells, they play a major role in glomerular biology and particularly in glomerular disease. Based on electron microscopy, it has been proposed that the slit diaphragm is a structured, zipper-like filter with pores smaller than albumin (15), thus constituting a size-selective molecular sieve. This structure was recently confirmed by electron tomography, and the transmembrane protein nephrin was demonstrated to be a structural component of the slit diaphragm zipper (16). The slit diaphragm has been shown to have a central role in the pathomechanisms of many severe glomerular diseases. Malfunction or absence of nephrin leads to lethal congenital nephrotic syndrome of the Finnish type (3) characterized by massive proteinuria and loss of the slit diaphragm filter structure (16). Additional proteins, such as podocin (4), CD2 associated protein (CD2AP) (17), ZO-1 (18), FAT-1 (19), Neph1 (20-22) and P-cadherin (23), which have been localized to the slit diaphragm region are potential components of a slit diaphragm protein complex. The podocin gene NPHS2 is mutated in human steroid-resistant nephrotic syndrome (4), as well as in late-onset familial focal segmental glomerulosclerosis (FSGS) (24). CD2AP mutations have also been associated with sporadic cases of FSGS (25). In animal models, the loss of nephrin (26), Neph1 (27), FAT-1 (28), or CD2AP (17, 25) disrupts the slit diaphragm, thereby causing proteinuria. CD2AP binds nephrin, podocin and actin, hence potentially forming a structural bridge between the slit diaphragm and the podocyte cytoskeleton (29). Interestingly, mutations in the ACTN4 gene, which encodes alpha-actinin 4 (a component of the actin cytoskeleton), leads to familial FSGS (30). In mice, both loss- and gain-of-function mutations of alpha-actinin 4 lead to glomerular disease and proteinuria (31, 32).

[0006] Podocytes also play a pivotal role in glomerular development by secreting vascular endothelial growth factor (VEGF) (33), which attracts endothelial cells into the developing glomerular tuft. VEGF may also have a late role in establishing the fenestrations in the glomerular capillary endothelium. The role of VEGF in the glomerulus is highly dosage sensitive. Systemic inhibition of VEGF causes proteinuria (34, 35), and genetic reduction in podocyte VEGF expression leads to glomerular abnormalities, including loss of capillary fenestrations. VEGF overexpression in podocytes, on the other hand, leads to collapsing glomerulopathy similar to HIV-associated nephropathy (36). In concert with VEGF, podocytes also secrete the growth factors angiopoietin I and TGF-β1, which may play important roles in glomerular microvascular assembly (37, 38). Podocyte associated transcription factors, such as LMX1B and WT1, which are important for podocyte differentiation, have also been associated with the glomerular disorders Nail-Patella, Denys-Drash and Frasier syndromes (6, 9, 10).

[0007] The recent recognition of specific GBM- and podocyte-associated proteins as central players in rare glomerular diseases emphasizes the need for more comprehensive studies on glomerulus biology, as the results may provide a new understanding of the pathomechanisms of the common and complex glomerular diseases that currently constitute the main challenge of clinical nephrology. Such studies should also involve analyses of the glomerular mesangial and endothelial cells, the role of which in glomerular disease is largely unknown. A number of studies have recently described the mapping of the transcriptome of different parts of the kidney, including subportions of the nephron (39-44), but none of these studies was specifically focused on the glomerulus. In two studies, isolated glomeruli were included in the analysis, but the transcription data obtained were incomplete, as shown by the lack of information about many of the known podocyte-specific transcripts (42, 44). Most likely, the difficulties associated with molecular profiling of glomeruli reflect the fact that glomeruli constitute less than 10% of the kidney tissue, and moreover, that the podocyte is the least abundant cell type in the glomerulus, contributing to only about 1% of the entire kidney tissue. Therefore, low abundance podocyte transcripts, like the nephrin mRNA, are difficult to detect unless glomeruli or podocytes are enriched before the analysis.

### SUMMARY OF THE INVENTION

[0008] In one aspect, the present invention provides compositions comprising a plurality of isolated probes that in total selectively binds to at least 2 of the glomerular markers disclosed herein in Table 6 or Table 7, complements thereof, or their expression products, wherein at least 10% of the probes in total are selective for glomerular markers, and methods and kits for the use of such compositions.

[0009] In a further aspect, the present invention provides compositions comprising a plurality of isolated probes that in total selectively bind to at least 51 of the glomerular markers disclosed herein in Table 9, complements thereof, or their expression products, wherein at least 10% of the probes in total are selective for glomerular markers, and methods and kits for the use of such compositions.

[0010] In a further aspect, the present invention provides compositions comprising a plurality of isolated probes that in total selectively bind to at least 12 of the podocyte markers disclosed herein in Table 3, complements thereof, or their expression products, wherein at least 1.5% of the probes in total are selective for podocyte markers, and methods and kits for the use of such compositions.

[0011] In a further aspect, the present invention provides compositions comprising a plurality of isolated probes that in total selectively bind to at least 7 of the non-podocyte glomerular markers disclosed herein in Table 4, complements thereof, or their expression products, wherein at least 8.5% of the probes in total are selective for non-podocyte glomerular markers, and methods and kits for the use of such compositions.

[0012] The present invention also provides an isolated nucleic acid sequence comprising or consisting of a nucleotide sequence according to SEQ ID NO:2043, expression vectors comprising the nucleotide sequence, and host cells transfected with the expression vector.

[0013] The present invention further provides novel dendrin nucleic acids and polypeptides comprising or consisting of the amino acid sequence of SEQ ED NOS:2041-2042.

### BRIEF DESCRIPTION OF THE FIGURES

[0014] FIG. 1 Evaluation of normalization and subtraction procedure.

[0015] A: The four glomerular cDNA libraries, the number of sequenced clones from each library, and the corresponding numbers of different annotated genes and non-annotated ESTs are listed in the left panel. To the right; schematic illustrations of the theoretical distribution of cDNA relative to the original transcript abundance in the standard (St) normalized, and super-normalized libraries.

[0016] B: The relative abundance of different housekeeping genes in the adult standard (blue bars), adult normalized (red bars), and adult super-normalized (green bars) libraries. Eafa1, elongation factor 1 alpha 1; B2m, β2 microglobulin; Gapd, Glyceraldehyde 3-phosphate dehydrogenase; Ftl1, Ferritin light chain 1; Oaz1, Ornithine decarboxylase antizyme; Rps8, 40S ribosomal protein S8.

[0017] FIG. 2 GlomChip design and performance

[0018] A: GlomChip was printed with 16704 GlomBase EST clones, 1344 other mouse cDNA clones and 10 different Arabidopsis Thaliana (A. Thaliana) PCR-products. Mouse housekeeping gene cDNAs and/or A. Thaliana cDNAs were put in every two corners of 34×34 spots square in order to control for serial contamination during printing, and to facilitate spot segmentation during analysis.

[0019] B: TA typical two-target hybridization result. Background hybridization was deduced from the A. Thaliana spots. Note that the weak horizontal band of hybridizing clones on each 34×34 spot quadrant represent the clones derived from normalized libraries, i.e. clones that on average represent mRNAs of lower abundance than the clones from the standard libraries seen at the top and bottom of each quadrant.

[0020] C and D: Identification of genes with glomerulus-restrictively expression pattern. GlomChip was hybridized against labeled targets from different tissues; isolated glomeruli, rest of kidney, brain capillary fragments, GFP positive glomerular cells, and GFP negative glomerular cells. Step-wise comparisons between pairs of tissues provided lists of significantly upregulated genes in each tissue category, or not significantly different (n.s.) (Gene category (GC) 1-8). GlomBase cDNAs and IMAGE clones are categorized separately (C and D, respectively). The threshold for differential expression was set to 2-fold difference at statistical significance (p<0.05).

[0021] FIG. 3 Isolation of podocytes from Podocin-Cre x Z/EG mice.

[0022] A: Postnatal day 1 kidneys from Podocin-Cre x Z/EG mice examined by fluorescence microscopy. Note the crescent of GFP-positive podocytes in each glomerulus. B: Dynabead-isolated glomeruli from Podocin-Cre x Z/EG mice. C&D: Single cell suspensions were prepared from isolated glomeruli and evaluated under the microscope with or without fluorescent. E: Glomerular cells sorted by GFP fluorescence (quadrangle).

[0023] FIG. 4 Glomerular expression determined by non-radioactive in situ hybridization.

[0024] Results from E18.5 kidneys are shown. A: Podocyte-expressed genes. Nphs2 (podocin), Podx1 (podocalyxin), Sem2 (semaphorin sem2), Pi15 (protease inhibitor 15). B: Mesangial, juxtaglomerular and endothelial cell-expresed genes. Sfrp2 (secreted frizzled-related protein 2), Igfbp5 (insulin-like growth factor binding protein 5), Akr1b7 (Aldo-keto reductase family 1, member B7). Lmo7 (lim domain only protein 7).

[0025] FIG. 5 Temporal expression of glomerular markers during nephron development.

[0026] Expression of known and novel markers for glomerular cells through the different stages of nephron and glomerular development. Note that only Sfrs2 is expressed at the earliest stage of nephron development, whereas all other markers appear in the podocyte and mesangial/juxtaglomerular apparatus cells at their first appearance during S-shaped (podocytes) and capillary loop (mesangial cells) stages. For abbreviations, see legend to FIG. 4.

[0027] FIG. 6 Expression of dendrin mRNA and protein in the glomerulus and localization of the dendrin protein to podocyte foot processes.

[0028] A: Dark-field image of radioactive in situ hybridization of dendrin to E18.5 mouse kidney. Inset shows silver grains distributed over the podocyte crescent in a capillary loop stage glomerulus. B: Immunohistochemistry localizes the dendrin protein to glomeruli. Inset shows strong staining of the podocytes. C: Dendrin immuno-electron microscopy of podocyte foot processes. Note the localization of gold labeling to the inner leaflet of the foot process plasma membrane in regions where these appose to form slit diaphragms (arrows). D: Western blot analysis demonstrates an 80 kDa dendrin protein species in Dynabead-isolated glomeruli (lane2) but not in the rest of kidney (lane 1).

[0029] FIG. 7 Comparison of results using GlomChip, Stanford cDNA chip and SAGE nephron expression approaches.

[0030] GlomChip contains 13368 cDNA clones corresponding to 6053 different genes. The Stanford cDNA chip used by Higgins et al (44) contains 41,859 probes. The SAGE study (42) analyzed more than 90,000 different tags. Using GlomChip, 356 different ENSEMBL mouse genes were identified to be significantly upregulated in the mouse glomerulus compared with rest of kidney tissue. By the Stanford cDNA chip analysis, the 139 genes predominantly expressed in human glomerulus corresponds to 118 different ENSEMBL mouse homolog genes. From the SAGE analysis, 229 Tags were identified to be enriched in human glomerulus, corresponding to 143 ENSEMBL mouse homolog genes. The overlap between the three studies is illustrated. Genes/proteins previously published to be expressed in the glomerulus (Table 8) are listed in the respective area, together with their expression ratios (glomerulus/rest of kidney) and statistical P value.

### TABLE LEGENDS

[0031] Table 1: Distribution of Sequenced Clones Among Different Mouse Glomerulus Libraries.

[0032] Distribution of sequenced clones among different mouse glomerulus libraries. After removing vector sequence, sequences shorter than 100 nucleotides were excluded for further analysis. St, standard; n1, normalized; n2, super normalized.

[0033] Table 2: Comparison of GlomBase Content to that of 11 Kidney EST Libraries.

[0034] For comparison we selected a set of known podocyte markers. Numbers represent the total number of ESTs in each library. For Glombase, the numbers show the total representation in the four libraries, as well as representation in the standard libraries only (in parenthesis). For example, a total of 10 nephrin ESTs were found in GlomBase, of which 8 derived from the standard libraries. The following kidney libraries were compared with GlomBase: Library 1: Stratagene mouse kidney library, library 2: GuayWoodford mouse kidney day 0 library, library 3: GuayWoodford mouse kidney day 7 library, library 4: C57BL/6J kidney library, library 5: RIKEN 0 day neonate kidney library, library 6: RIKEN adult male kidney library, library 7: RIKEN kidney library, library 8: RIKEN El 6 kidney library, library 9: RIKEN E17 kidney library, library 10: Sugano mouse kidney library, library 11: NCI CGAP Kid14 library

[0035] Table 3: List of category 6 genes in FIG. 2 C-D.

[0036] Table 4: List of category 7 genes in FIG. 2 C-D.

[0037] Table 5: List of category 8 genes in FIG. 2 C-D.

[0038] Table 6: List of novel mouse glomerular markers.

[0039] Table 7: List of novel human glomerular markers.

[0040] Table 8. Result of literature search for glomerulus gene and protein expression demonstrated with cellular resolution by in situ hybridization or immunohistochemistry. The Table provides the following information (in columns from left to right): 1) gene name or acronym. 2) ENSEMBL ID number. 3) Literature reference. 4) PubMed ID for reference. 5) Presence in Glombase (Y/N). 6) Number of ESTs in GlomBase. 7) Species from which information was derived. 8) Selected in GlomChip analysis (Y/N), 9) Selected in SAGE study by Chabardes-Garonne et al., 2003. 10) Selected in array study by Higgins et al., 2004.

[0041] Table 9. List of category 1 genes in FIG. 2 C,D.

[0042] Table 10. List of category 2 genes in FIG. 2 C,D.

[0043] Table 11. List of mouse category 3 genes in FIG. 2 C,D.

[0044] Table 11A. List of corresponding human category 3 genes.

[0045] Table 12. List of category 4 genes in FIG. 2 C,D.

[0046] Table 13. List of category 5 genes in FIG. 2 C,D.

[0047] Table 14A-B. List of mouse glomerular markers in the mouse GlomBase™ (14A) and list of human glomerular markers (14B) in the human GlomBase™. This Table is provided on CD only.

[0048] Table 15. List of non-novel mouse Category 3 glomerular markers.

[0049] Table 16. List of non-novel human Category 3 glomerular markers.

[0050] Table 17. List of 942 mouse glomerular expressed EST sequences that did not match ENSEMBL annotated genes, but matched the mouse genome.

### DETAILED DESCRIPTION OF THE INVENTION

[0051] All publications, GenBank and ENSEMBL Accession references, patents and patent applications cited herein are hereby expressly incorporated by reference for all purposes.

[0052] Within this application, unless otherwise stated, the techniques utilized may be found in any of several well-known references such as: Molecular Cloning: A Laboratory Manual (Sambrook, et al., 1989, Cold Spring Harbor Laboratory Press), Gene Expression Technology (Methods in Enzymology, Vol. 185, edited by D. Goeddel, 1991. Academic Press, San Diego, Calif.), “Guide to Protein Purification” in Methods in Enzymology (M. P. Deutshcer, ed., (1990) Academic Press, Inc.); PCR Protocols: A Guide to Methods and Applications (Innis, et al. 1990. Academic Press, San Diego, Calif.), Culture of Animal Cells: A Manual of Basic Technique, 2^{nd} Ed. (R. I. Freshney. 1987. Liss, Inc. New York, N.Y.), Gene Transfer and Expression Protocols, pp. 109-128, ed. E. J. Murray, The Humana Press Inc., Clifton, N.J.), and the Ambion 1998 Catalog (Ambion, Austin, Tex.).

[0053] In a first aspect, the present invention provides compositions comprising a plurality of isolated probes that in total selectively binds to at least 2 of the glomerular markers disclosed herein in Table 6 or Table 7, complements thereof, or their expression products, wherein at least 10% of the probes in total are selective for glomerular markers. Table 6 lists those mouse glomerular genes that have been identified herein as glomerular markers and which were not previously known to be expressed in the glomerulus. Table 7 lists the human genes corresponding to the mouse genes listed in Table 6 (“homologues”), and comprise novel human glomerular markers. Tables 6 and 7 include database accession information for each of the listed glomerular markers, while the relevant nucleotide and amino acid sequences are provided in the sequence listing (and the corresponding SEQ ID NOS. are provided in Tables 6 and 7). The human homologue for a specific mouse gene listed in Table 6 can be determined by comparing the “Gene name” as listed in each of Tables 6 and 7. The human homologues (the human gene corresponding directly to the mouse gene) were identified through genome-wide scans for homologs and then using certain criteria discrimination between orthologs and so called paralogs. Paralogs are homologous genes in the same genome that arose through gene duplication. The human orthologs were defined in the ENSEMBL database, and their definition has been used herein to assign the human homologues.

[0054] As demonstrated below, expression products from polynucleotides comprising the nucleic acid sequence disclosed herein in Table 6 (mouse 280 novel glomerular markers) or Table 7 (human 264 novel glomerular markers) have been identified as novel glomerular markers (i.e.: not previously known to be expressed in the glomerulus). The number of novel glomerular markers in Table 6 is 280 (see number in left-hand column), while over 400 nucleic acid and amino acid sequences corresponding to the 280 novel glomerular markers are disclosed in Table 6 (see columns with SEQ ID NOS.) Where a given glomerular marker is correlated with multiple nucleic acid SEQ ID NOS. in Table 6 or 7, this reflects the presence of alternatively spliced nucleic acids (and their resulting encoded amino acid sequences) from the same gene.

[0055] The compositions according to each aspect and embodiment of the invention described below can be used to profile a glomerular tissue sample to identify glomerular expression profiles of interest. Such “glomerular expression profiling” can be used, for example, to establish expression profiles and specific biomarkers for various patient populations with renal disease-related indications, including but not limited to nephropathy, proteinuria, nephrotoxicity, end stage renal disease, diabetes, hypertension, infections, nephrotic syndromes, and glomerulosclerosis. Such glomerular expression profiles can be used, for example, to establish pathogenic pathways for different renal diseases, which will improve on renal histopathology as a means to measure renal disease conditions. Such methods are also useful, for example, to define glomerular profiles and biomarkers in various types of renal disease patient populations that correlate with a positive response to a particular therapeutic strategy and/or particular drug candidate; such profiles and biomarkers can then be used to screen patients to identify those patients that are suitable candidates for treatment with the drug. The methods of the invention can also be used, for example, to identify profiles and biomarkers associated with renal toxicity, wherein pre-clinical drug candidates can then be screened for such renal toxicity-associated profiles and biomarkers to weed out at an early stage of development those drug candidates that induce renal toxicity.

[0056] As used herein according to each aspect and embodiment of the invention, the term “glomerular marker . . . or their expression products” (also referred to simply as “glomerular marker”) means a nucleic acid or protein product expressed in the glomerulus. In various embodiments, the glomerular marker comprises DNA (including but not limited to cDNA), RNA (including but not limited to mRNA), or polypeptides (including but not limited to full length proteins or fragments thereof). In a preferred embodiment, the glomerular marker comprises RNA. The definition of “glomerular marker” used herein does not require that the glomerular marker be expressed only in the glomerulus.

[0057] As used herein according to each aspect and embodiment of the invention, the term “probe” refers to any compound or compounds that can be used to selectively bind to a glomerular marker of interest. In various non-limiting examples, the probe can comprise DNA (including but not limited to polynucleotide probes), RNA (including but not limited to polynucleotide probes), and polypeptides (including but not limited to antibodies). In a preferred embodiment, the probes comprise DNA. As used herein a “probe” does not include compounds used as negative controls that do not selectively bind to a marker of interest (including but not limited to randomized or scrambled sequence compounds, and competitor nucleic acids and proteins used to minimize non-specific binding), but does include control probes that selectively bind to non-glomerular markers. The compositions of the various aspects of the invention, and embodiments thereof, may contain multiple probes for a single glomerular marker; for example, a composition according to each aspect of the invention may comprise a single polynucleotide probe for a 100 nucleotide region of each of two different glomerular markers, or it may comprise a polynucleotide probe for each of three different 100 nucleotide region of each of each of ten different glomerular markers. Those of skill in the art will understand that many such permutations are possible based on the teachings herein.

[0058] As used herein according to each aspect and embodiment of the invention, the term “selectively binds to” means that the probe preferentially binds to the glomerular marker of interest, and minimally or not at all to other markers, under standard conditions. For example, where the probes comprise polynucleotides, specific hybridization conditions used will depend on the length of the polynucleotide probes employed, their GC content, as well as various other factors as is well known to those of skill in the art. (See, for example, Tijssen (1993) Laboratory Techniques in Biochemistry and Molecular Biology—Hybridization with Nucleic Acid Probes part I, chapt 2, “Overview of principles of hybridization and the strategy of nucleic acid probe assays,” Elsevier, N.Y. (“Tijssen”)). In one embodiment, stringent hybridization and wash conditions are selected to be about 5° C. lower than the thermal melting point (Tm) for the specific sequence at a defined ionic strength and pH. The Tm is the temperature (under defined ionic strength and pH) at which 50% of the target sequence hybridizes to a perfectly matched probe. High stringency conditions are selected to be equal to the Tm for a particular probe. An example of stringent conditions are those that permit selective hybridization of the isolated polynucleotides to the genomic or other target nucleic acid to form hybridization complexes in 0.2×SSC at 65° C. for a desired period of time, and wash conditions of 0.2×SSC at 65° C. for 15 minutes. It is understood that these conditions may be duplicated using a variety of buffers and temperatures. SSC (see, e.g., Sambrook, Fritsch, and Maniatis, in: Molecular Cloning, A Laboratory Manual, Cold Spring Harbor Laboratory Press, 1989) is well known to those of skill in the art, as are other suitable hybridization buffers.

[0059] As will be apparent to those of skill in the art, the compositions of the various aspects and embodiments of the invention can further comprise other components that may be of use in assays for glomerular expression profiles, including but not limited to buffer solutions, hybridization solutions, and reagents for storing the compositions.

[0060] In this first aspect, at least 10% of the probes of the composition are selective for glomerular markers, such as those disclosed herein in Tables 3, 4, 5, 6, 7, 9, and 11-17, as well as other glomerular probes not disclosed herein.

[0061] The compositions of the invention may contain probes that are not glomerular specific (for example, for use as control sequences to verify the glomerular-specific nature of an assay in which the compositions are used), so long as such probes do not make up more than 90% of the probes of the composition. In various preferred embodiments, at least 11%, 12%, 13%, 14%, 15%, 16%, 17%, 18%, 19%, 20%, 21%, 22%, 23%, 24%, 25%, 26%, 27%, 28%, 29%, 30%, 31%, 32%, 33%, 34%, 35%, 36%, 37%, 38%, 39%, 40%, 41%, 42%, 43%, 44%, 45%, 46%, 47%, 48%, 49%, 50%, 55%, 60%, 65%, 70%, 75%, 80%, 85%, 90%, 95%, 96%, 97%, 98%, 99%, or 100% of the probes of the composition are selective for glomerular markers, such as those disclosed herein in Tables 3, 4, 5, 6, 7, 9, and 11-17, as well as other glomerular probes not disclosed herein.

[0062] In one preferred embodiment or each of the aspects and embodiments of the present invention, the plurality of probes comprises polynucleotide probes. The term “polynucleotide” as used herein with respect to each aspect and embodiment of the invention refers to DNA or RNA, preferably DNA, and more preferably cDNA or oligonucleotide probes derived from expressed portions of the glomerular marker gene, in either single- or double-stranded form, of any length. In a preferred embodiment, polynucleotide probes of the invention are at least 10 nucleotides in length, more preferably at least 15 nucleotides in length, and even more preferably at least 25 nucleotides in length. It includes the recited sequences as well as their complementary sequences, which will be clearly understood by those of skill in the art. Such polynucleotide probes preferably comprise oligonucleotides for hybridization analyses; alternatively primer pairs of probes are preferred when polymerase chain reaction detection techniques are to be employed. Those of skill in the art are well aware of how to design appropriate primer pairs for a given target polynucleotide.

[0063] The term “polynucleotide” encompasses nucleic acids containing known analogues of natural nucleotides which have similar or improved binding properties, for the purposes desired, as the disclosed polynucleotides. The term also encompasses nucleic-acid-like structures with synthetic backbones. DNA backbone analogues provided by the invention include phosphodiester, phosphorothioate, phosphorodithioate, methylphosphonate, phosphoramidate, alkyl phosphotriester, sulfamate, 3′-thioacetal, methylene(methylimino), 3′-N-carbamate, morpholino carbamate, and peptide nucleic acids (PNAs), methylphosphonate linkages or alternating methylphosphonate and phosphodiester linkages (Strauss-Soukup (1997) Biochemistry 36:8692-8698), and benzylphosphonate linkages, as discussed in U.S. Pat. No. 6,664,057.

[0064] The polynucleotide probes according to the different aspects and embodiments of the invention are “isolated”, which means that the polynucleotides are free of sequences which naturally flank the polynucleotide in the genomic DNA of the organism from which the nucleic acid is derived, except as specifically described herein. It is preferred that the isolated polynucleotide probes are substantially free of other cellular material, gel materials, culture medium, and contaminating polypeptides or nucleic acids (such as from nucleic acid libraries or expression products therefrom), except as described herein, when produced by recombinant techniques. The polynucleotides of the invention may be isolated from a variety of sources, such as by PCR amplification from genomic DNA, mRNA, or cDNA libraries derived from mRNA, using standard techniques; or they may be synthesized in vitro, by methods well known to those of skill in the art, as discussed in U.S. Pat. No. 6,664,057 and references disclosed therein. Synthetic polynucleotides can be prepared by a variety of solution or solid phase methods. Detailed descriptions of the procedures for solid phase synthesis of polynucleotide by phosphite-triester, phosphotriester, and H-phosphonate chemistries are widely available. (See, for example, U.S. Pat. No. 6,664,057 and references disclosed therein). Methods to purify polynucleotides include native acrylamide gel electrophoresis, and anion-exchange HPLC, as described in Pearson (1983) J. Chrom. 255:137-149. The sequence of the synthetic polynucleotides can be verified using standard methods.

[0065] In another preferred embodiment or each of the aspects and embodiments of the present invention, the plurality of probes comprises polypeptide probes. This embodiment is particularly preferred where the probes are selective for polypeptide expression products of the glomerular markers. In one example, such polypeptides comprise antibodies, such as polyclonal and monoclonal, antibodies. The term antibody as used herein is intended to include antibody fragments thereof which are selectively reactive with the glomerular marker polypeptides, or fragments thereof. Antibodies can be fragmented using conventional techniques, and the fragments screened for utility in the same manner as described above for whole antibodies. For example, F(ab′)₂ fragments can be generated by treating antibody with pepsin. The resulting F(ab′)₂ fragment can be treated to reduce disulfide bridges to produce Fab′ fragments. Antibodies can be made by well-known methods, such as described in Harlow and Lane, Antibodies; A Laboratory Manual, Cold Spring Harbor Laboratory, Cold Spring Harbor, N.Y., (1988). For example, preimmune serum is collected prior to the first immunization. A polypeptide of interest, or antigenic fragment thereof, together with an appropriate adjuvant, is injected into an animal in an amount and at intervals sufficient to elicit an immune response. Animals are bled at regular intervals, preferably weekly, to determine antibody titer. The animals may or may not receive booster injections following the initial immunization. At about 7 days after each booster immunization, or about weekly after a single immunization, the animals are bled, the serum collected, and aliquots are stored at about −20° C. Polyclonal antibodies can then be purified directly by standard techniques. Monoclonal antibodies can be produced by obtaining spleen cells from the animal. (See Kohler and Milstein, Nature 256, 495-497 (1975)). In one example, monoclonal antibodies (mAb) of interest are prepared by immunizing inbred mice with a polypeptide of interest, or an antigenic fragment thereof. The mice are immunized by the IP or SC route in an amount and at intervals sufficient to elicit an immune response. The mice receive an initial immunization on day 0 and are rested for about 3 to about 30 weeks. Immunized mice are given one or more booster immunizations of by the intravenous (IV) route. Lymphocytes, from antibody positive mice are obtained by removing spleens from immunized mice by standard procedures known in the art. Hybridoma cells are produced by mixing the splenic lymphocytes with an appropriate fusion partner under conditions which will allow the formation of stable hybridomas. The antibody producing cells and fusion partner cells are fused in polyethylene glycol at concentrations from about 30% to about 50%. Fused hybridoma cells are selected by growth in hypoxanthine, thymidine and aminopterin supplemented Dulbecco's Modified Eagles Medium (DMEM) by procedures known in the art. Supernatant fluids are collected from growth positive wells and are screened for antibody production by an immunoassay such as solid phase immunoradioassay. Hybridoma cells from antibody positive wells are cloned by a technique such as the soft agar technique of MacPherson, Soft Agar Techniques, in Tissue Culture Methods and Applications, Kruse and Paterson, Eds., Academic Press, 1973.

[0066] In various preferred embodiments of this first aspect of the invention, the composition comprises 3, 4, 5, 6, 7, 8, 9, 10, 11, 12, 13, 14, 15, 16, 17, 18, 19, 20, 21, 22, 23, 24, 25, 26, 27, 28, 29, 30, 31, 32, 33, 34, 35, 36, 37, 38, 39, 40, 41, 42, 43, 44, 45, 46, 47, 48, 49, 50, 51, 52, 53, 54, 55, 56, 57, 58, 59, 60, 61, 62, 63, 64, 65, 66, 67, 68, 69, 70, 71, 72, 73, 74, 75, 76, 77, 78, 79, 80, 81, 82, 83, 84, 85, 86, 87, 88, 89, 90, 91, 92, 93, 94, 95, 96, 97, 98, 99, 100, 101, 102, 103, 104, 105, 106, 107, 108, 109, 110, 111, 112, 113, 114, 115, 116, 117, 118, 119, 120, 121, 122, 123, 124, 125, 126, 127, 128, 129, 130, 131, 132, 133, 134, 135, 136, 137, 138, 139, 140, 141, 142, 143, 144, 145, 146, 147, 148, 149, 150, 151, 152, 153, 154, 155, 156, 157, 158, 159, 160, 161, 162, 163, 164, 165, 166, 167, 168, 169, 170, 171, 172, 173, 174, 175, 176, 177, 178, 179, 180, 181, 182, 183, 184, 185, 186, 187, 188, 189, 190, 191, 192, 193, 194, 195, 196, 197, 198, 199, 200, 201, 202, 203, 204, 205, 206, 207, 208, 209, 210, 211, 212, 213, 214, 215, 216, 217, 218, 219, 220, 221, 222, 223, 224, 225, 226, 227, 228, 229, 230, 231, 232, 233, 234, 235, 236, 237, 238, 239, 240, 241, 242, 243, 244, 245, 246, 247, 248, 249, 250, 251, 252, 253, 254, 255, 256, 257, 258, 259, 260, 261, 262, 263, 264, 265, 266, 267, 268, 269, 270, 271, 272, 273, 274, 275, 276, 277, 278, 279, or 280 probes that selectively bind to between 3 and 281 of the glomerular markers, disclosed herein in Table 6 (mouse), complements thereof, or their expression products.

[0067] In various further preferred embodiments, the of this first aspect of the invention, the composition comprises 3, 4, 5, 6, 7, 8, 9, 10, 11, 12, 13, 14, 15, 16, 17, 18, 19, 20, 21, 22, 23, 24, 25, 26, 27, 28, 29, 30, 31, 32, 33, 34, 35, 36, 37, 38, 39, 40, 41, 42, 43, 44, 45, 46, 47, 48, 49, 50, 51, 52, 53, 54, 55, 56, 57, 58, 59, 60, 61, 62, 63, 64, 65, 66, 67, 68, 69, 70, 71, 72, 73, 74, 75, 76, 77, 78, 79, 80, 81, 82, 83, 84, 85, 86, 87, 88, 89, 90, 91, 92, 93, 94, 95, 96, 97, 98, 99, 100, 101, 102, 103, 104, 105, 106, 107, 108, 109, 110, 111, 112, 113, 114, 115, 116, 117, 118, 119, 120, 121, 122, 123, 124, 125, 126, 127, 128, 129, 130, 131, 132, 133, 134, 135, 136, 137, 138, 139, 140, 141, 142, 143, 144, 145, 146, 147, 148, 149, 150, 151, 152, 153, 154, 155, 156, 157, 158, 159, 160, 161, 162, 163, 164, 165, 166, 167, 168, 169, 170, 171, 172, 173, 174, 175, 176, 177, 178, 179, 180, 181, 182, 183, 184, 185, 186, 187, 188, 189, 190, 191, 192, 193, 194, 195, 196, 197, 198, 199, 200, 201, 202, 203, 204, 205, 206, 207, 208, 209, 210, 211, 212, 213, 214, 215, 216, 217, 218, 219, 220, 221, 222, 223, 224, 225, 226, 227, 228, 229, 230, 231, 232, 233, 234, 235, 236, 237, 238, 239, 240, 241, 242, 243, 244, 245, 246, 247, 248, 249, 250, 251, 252, 253, 254, 255, 256, 257, 258, 259, 260, 261, 262, 263, or 264 probes that selectively bind to between 3 and 265 of the glomerular markers disclosed herein in Table 7 (human), complements thereof, or their expression products.

[0068] In further preferred embodiments of the first aspect of the invention, the composition comprises probes that selectively bind to 3, 4, 5, 6, 7, 8, 9, 10, 11, 12, 13, 14, 15, 16, 17, 18, 19, 20, 21, 22, 23, 24, 25, 26, 27, 28, 29, 30, 31, 32, 33, 34, 35, 36, 37, 38, 39, 40, 41, 42, 43, 44, 45, 46, 47, 48, 49, 50, 51, 52, 53, 54, 55, 56, 57, 58, 59, 60, 61, 62, 63, 64, 65, 66, 67, 68, 69, 70, 71, 72, 73, 74, 75, 76, 77, 78, 79, 80, 81, 82, 83, 84, 85, 86, 87, 88, 89, 90, 91, 92, 93, 94, 95, 96, 97, 98, 99, 100, 101, 102, 103, 104, 105, 106, 107, 108, 109, 110, 111, 112, 113, 114, 115, 116, 117, 118, 119, 120, 121, 122, 123, 124, 125, 126, 127, 128, 129, 130, 131, 132, 133, 134, 135, 136, 137, 138, 139, 140, 141, 142, 143, 144, 145, 146, 147, 148, 149, 150, 151, 152, 153, 154, 155, 156, 157, 158, 159, 160, 161, 162, 163, 164, 165, 166, 167, 168, 169, 170, 171, 172, 173, 174, 175, 176, 177, 178, 179, 180, 181, 182, 183, 184, 185, 186, 187, 188, 189, 190, 191, 192, 193, 194, 195, 196, 197, 198, 199, 200, 201, 202, 203, 204, 205, 206, 207, 208, 209, 210, 211, 212, 213, 214, 215, 216, 217, 218, 219, 220, 221, 222, 223, 224, 225, 226, 227, 228, 229, 230, 231, 232, 233, 234, 235, 236, 237, 238, 239, 240, 241, 242, 243, 244, 245, 246, 247, 248, 249, 250, 251, 252, 253, 254, 255, 256, 257, 258, 259, 260, 261, 262, 263, 264, 265, 266, 267, 268, 269, 270, 271, 272, 273, 274, 275, 276, 277, 278, 279, 280, 281, 282, 283, 284, 285, 286, 287, 288, 289, 290, 291, 292, 293, 294, 295, 296, 297, 298, 299, 300, 301, 302, 303, 304, 305, 306, 307, 308, 309, 310, 311, 312, 313, 314, 315, 316, 317, 318, 319, 320, 321, 322, 323, 324, 325, 326, 327, 328, 329, 330, 331, 332, 333, 334, 335, 336, 337, 338, 339, 340, 341, 342, 343, 344, 345, 346, 347, 348, 349, 350, 351, 352, 353, 354, 355, 356, 357, 358, 359, 360, 361, 362, 363, 364, 365, 366, 367, 368, 369, 370, 371, 372, 373, 374, 375, 376, 377, 378, 379, 380, 381, 382, 383, 384, 385, 386, 387, 388, 389, 390, 391, 392, 393, 394, 395, 396, 397, 398, 399, 400, 401, 402, 403, 404, 405, 406, 407, 408, 409, 410, 411, 412, 413, 414, 415, 416, 417, 418, 419, 420, 421, 422, 423, 424, 425, 426, 427, 428, 429, 430, 431, 432, 433, 434, 435, 436, 437, 438, 439, 440, 441, 442, 443, 444, 445, 446, 447, 448, 449, 450, 451, 452, 453, 454, 455, 456, 457, 458, 459, 460, 461, 462, 463, 464, 465, 466, 467, 468, 469, 470, 471, 472, 473, 474, 475, 476, 477, 478, 479, 480, 481, 482, 483, 484, 485, 486, 487, 488, 489, 490, 491, 492, 493, 494, 495, 496, 497, 498, 499, 500, 501, 502, 503, 504, 505, 506, 507, 508, 509, 510, 511, 512, 513, 514, 515, 516, 517, 518, 519, 520, 521, 522, 523, 524, 525, 526, 527, 528, 529, 530, 531, 532, 533, 534, 535, 536, 537, 538, 539, 540, 541, 542, 543, or 544 of the glomerular markers, disclosed herein in Tables 6 (mouse) and Table 7 (human), complements thereof, or their expression products.

[0069] In various further preferred embodiments of this first aspect and of the invention and its other embodiments, the plurality of probes in total selectively binds to at least 2, 3, 4, 5, 6, 7, 8, 9, 10, 11, 12, 13, 14, 15, 16, 17, 18, 19, 20, 21, 22, 23, 24, 25, 26, 27, 28, 29, 30, 31, 32, 33, 34, 35, 36, 37, 38, 39, 40, 41, 42, 43, 44, 45, 46, 47, 48, 49, 50, 51, 52, 53, 54, 55, 56, 57, 58, 59, 60, 61, 62, 63, 64, 65, 66, 67, 68, 69, 70, 71, 72, 73, 74, 75, 76, 77, 78, 79, 80, 81, 82, 83, 84, 85, 86, 87, 88, 89, 90, 91, 92, 93, 94, 95, 96, 97, 98, 99, 100, 101, 102, 103, 104, 105, 106, 107, 108, 109, 110, 111, 112, 113, 114, 115, 116, 117, 118, 119, 120, 121, 122, 123, 124, 125, 126, 127, 128, 129, 130, 131, 132, 133, 134, 135, 136, 137, 138, 139, 140, 141, 142, 143, 144, 145, 146, 147, 148, 149, 150, 151, 152, 153, 154, 155, 156, 157, 158, 159, 160, 161, 162, 163, 164, 165, 166, 167, 168, 169, 170, 171, 172, 173, 174, 175, 176, 177, 178, 179, 180, 181, 182, 183, 184, 185, 186, 187, 188, 189, 190, 191, 192, 193, 194, 195, 196, 197, 198, 199, 200, 201, 202, 203, 204, 205, 206, 207, 208, 209, 210, 211, 212, 213, 214, 215, 216, 217, 218, 219, 220, 221, 222, 223, 224, 225, 226, 227, 228, 229, 230, 231, 232, 233, 234, 235, 236, 237, 238, 239, 240, 241, 242, 243, 244, 245, 246, 247, 248, 249, 250, 251, 252, 253, 254, 255, 256, 257, 258, 259, 260, 261, 262, 263, 264, 265, 266, 267, 268, 269, 270, 271, 272, 273, 274, 275, 276, 277, 278, 279, 280, 281, 282, 283, 284, 285, 286, 287, 288, 289, 290, 291, 292, 293, 294, 295, 296, 297, 298, 299, 300, 301, 302, 303, 304, 305, 306, 307, 308, 309, 310, 311, 312, 313, 314, 315, 316, 317, 318, 319, 320, 321, 322, 323, 324, 325, 326, 327, 328, 329, 330, 331, 332, 333, 334, 335, 336, 337, 338, 339, 340, 341, 342, 343, 344, 345, 346, 347, 348, 349, 350, 351, 352, 353, 354, 355, or 356 of the glomerular markers disclosed herein in Table 9, complements thereof, human homologues thereof, or their expression products. Table 9 lists those glomerular markers shown with more than a two-fold increase in glomerular expression compared to non-glomerular renal tissue (“Category 1 genes”).

[0070] In various further preferred embodiments of this first aspect of the invention and its other embodiments, the plurality of probes in total selectively binds to at least 2, 3, 4, 5, 6, 7, 8, 9, 10, 11, 12, 13, 14, 15, 16, 17, 18, 19, 20, 21, 22, 23, 24, 25, 26, 27, 28, 29, 30, 31, 32, 33, 34, 35, 36, 37, 38, 39, 40, 41, 42, 43, 44, 45, 46, 47, 48, 49, 50, 51, 52, 53, 54, 55, 56, 57, 58, 59, 60, 61, 62, 63, 64, 65, 66, 67, 68, 69, 70, 71, 72, 73, 74, 75, 76, 77, 78, 79, 80, 81, 82, 83, 84, 85, 86, 87, 88, 89, 90, 91, 92, 93, 94, 95, 96, 97, 98, 99, 100, 101, 102, 103, 104, 105, 106, 107, 108, 109, 110, 111, 112, 113, 114, 115, 116, 117, 118, 119, 120, 121, 122, 123, 124, 125, 126, 127, 128, 129, 130, 131, 132, 133, 134, 135, 136, 137, 138, 139, 140, 141, or 142 of the glomerular markers disclosed herein in Table 11, complements thereof, human homologues thereof (See Table 11A), or their expression products. Table 11 lists those glomerular markers shown with more than a two-fold increase in expression in glomeruli compared to non-glomerular tissue after removing those showed at least a two-fold increase in expression levels in brain capillary compared to non-podocyte glomerular tissue (“Category 3 genes”).

[0071] In various further preferred embodiments of this first aspect of the invention, the plurality of probes in total selectively binds to at least 2, 3, 4, 5, 6, 7, 8, 9, 10, 11, 12, 13, 14, 15, 16, 17, 18, 19, 20, 21, 22, 23, 24, 25, 26, 27, 28, 29, 30, 31, 32, 33, 34, 35, 36, 37, 38, 39, 40, 41, 42, 43, 44, 45, 46, 47, 48, 49, 50, 51, 52, 53, 54, 55, 56, 57, 58, or 59 of the glomerular markers disclosed herein in Table 3, complements thereof, human homologues thereof, or their expression products. Table 3 lists those Category 3 glomerular markers with more than a two-fold increase in expression in podocytes compared to non-podocyte glomerular tissue (“Category 6 genes”).

[0072] In various further preferred embodiments of this first aspect of the invention, the plurality of probes in total selectively binds to at least 2, 3, 4, 5, 6, 7, 8, 9, 10, 11, 12, 13, 14, 15, 16, 17, or 18 of the glomerular markers disclosed herein in Table 4, complements thereof, human homologues thereof, or their expression products. Table 4 lists those Category 3 glomerular markers shown with more than a two-fold increase in expression in glomerular mesangial and endothelial cells compared to podocytes (“Category 7 genes”).

[0073] In various further preferred embodiments of this first aspect of the invention, the plurality of probes in total selectively binds to at least 2, 3, 4, 5, 6, 7, 8, 9, 10, 11, 12, 13, 14, 15, 16, 17, 18, 19, 20, 21, 22, 23, 24, 25, 26, 27, 28, 29, 30, 31, 32, 33, 34, 35, 36, 37, 38, 39, 40, 41,42, 43, 44, 45, 46, 47, 48, 49, 50, 51, 52, 53, 54, 55, 56, 57, 58, 59, 60, 61, 62, 63, 64, 65, 66, 67, 68, 69, 70, 71, 72, 73, 74, 75, 76, 77, 78, 79, 80, 81, 82, 83, 84, 85, 86, 87, 88, 89, 90, 91, 92, 93, 94, 95, 96, 97, 98, 99, or 100 of the glomerular markers disclosed herein in Table 5, complements thereof, human homologues thereof, or their expression products. Table 5 lists those Category 3 glomerular markers that did not show differential expression between podocytes and non-podocyte glomerular tissue (“Category 8 genes”).

[0074] In various further preferred embodiments of this first aspect of the invention, the plurality of probes in total selectively binds to at least 2, 3, 4, 5, 6, 7, 8, 9, 10, 11, 12, 13, 14, 15, 16, 17, 18, 19, 20, 21, 22, 23, 24, 25, 26, 27, 28, 29, 30, 31, 32, 33, 34, 35, 36, 37, 38, 39, 40, 41, 42, 43, 44, 45, 46, 47, 48, 49, 50, 51, 52, 53, 54, 55, 56, 57, 58, 59, 60, 61, 62, 63, 64, 65, 66, 67, 68, 69, 70, 71, 72, 73, 74, 75, 76, 77, 78, 79, 80, 81, 82, 83, 84, 85,.86, 87, 88, 89, 90, 91, 92, 93, 94, 95, 96, 97, 98, 99, 100, 101, 102, 103, 104, 105, 106, 107, 108, 109, 110, 111, 112, 113, 114, 115, 116, 117, 118, 119, 120, 121, 122, 123, 124, 125, 126, 127, 128, 129, 130, 131, 132, 133, 134, 135, 136, 137, 138, 139, 140, 141, 142, 143, 144, 145, 146, 147, 148, 149, 150, 151, 152, 153, 154, 155, 156, 157, 158, 159, 160, 161, 162, 163, 164, 165, 166, 167, 168, 169, 170, 171, 172, 173, 174, 175, 176, 177, 178, 179, or 180 of the glomerular markers disclosed herein in Table 13, complements thereof, human homologues thereof, or their expression products. Table 13 lists those glomerular markers from Table 9 with less than a two-fold increase in expression in glomeruli relative to brain capillary(“Category 5 genes”).

[0075] In various further preferred embodiments of this first aspect of the invention, the plurality of probes in total selectively binds to at least 2, 3, 4, 5, 6, 7, 8, 9, 10, 11, 12, 13, 14, 15, 16, 17, 18, 19, 20, 21, 22, 23, 24, 25, 26, 27, 28, 29, 30, 31, 32, 33, or 34 of the glomerular markers disclosed herein in Table 12, complements thereof, human homologues thereof, or their expression products. Table 12 lists those glomerular markers from Table 9 shown with less than a two-fold increase in expression in glomeruli relative to brain capillary (“Category 4 genes”).

[0076] In a second aspect, the present invention provides a composition comprising a plurality of isolated probes that in total selectively bind to at least 51 of the glomerular markers disclosed herein in Table 9 (Category 1 genes), complements thereof, or their expression products, wherein at least 10% of the probes in total are selective for glomerular markers.

[0077] In this second aspect at least 10% of the probes of the composition are selective for glomerular markers, such as those disclosed herein in Tables 3, 4, 5, 6, 7, 9, and 11-17, as well as other glomerular probes not disclosed herein.

[0078] The compositions of the invention may contain probes that are not glomerular specific (for example, for use as control sequences to verify the glomerular-specific nature of an assay in which the compositions are used), so long as such probes do not make up more than 90% of the probes of the composition. In various preferred embodiments, at least 11%, 12%, 13%, 14%, 15%, 16%, 17%, 18%, 19%, 20%, 21%, 22%, 23%, 24%, 25%, 26%, 27%, 28%, 29%, 30%, 31%, 32%, 33%, 34%, 35%, 36%, 37%, 38%, 39%, 40%, 41%, 42%, 43%, 44%, 45%, 46%, 47%, 48%, 49%, 50%, 55%, 60%, 65%, 70%, 75%, 80%, 85%, 90%, 95%, 96%, 97%, 98%, 99%, or 100% of the probes of the composition are selective for glomerular markers, such as those disclosed herein in Tables 3, 4, 5, 6, 7, 9, and 11-17, as well as other glomerular probes not disclosed herein.

[0079] In various preferred embodiments of this second aspect of the invention, the plurality of probes in total selectively bind to at least 52, 53, 54, 55, 56, 57, 58, 59, 60, 61, 62, 63, 64, 65, 66, 67, 68, 69, 70, 71, 72, 73, 74, 75, 76, 77, 78, 79, 80, 81, 82, 83, 84, 85, 86, 87, 88, 89, 90, 91, 92, 93, 94, 95, 96, 97, 98, 99, 100, 101, 102, 103, 104, 105, 106, 107, 108, 109, 110, 111, 112, 113, 114, 115, 116, 117, 118, 119, 120, 121, 122, 123, 124, 125, 126, 127, 128, 129, 130, 131, 132, 133, 134, 135, 136, 137, 138, 139, 140, 141, 142, 143, 144, 145, 146, 147, 148, 149, 150, 151, 152, 153, 154, 155, 156, 157, 158, 159, 160, 161, 162, 163, 164, 165, 166, 167, 168, 169, 170, 171, 172, 173, 174, 175, 176, 177, 178, 179, 180, 181, 182, 183, 184, 185, 186, 187, 188, 189, 190, 191, 192, 193, 194, 195, 196, 197, 198, 199, 200, 201, 202, 203, 204, 205, 206, 207, 208, 209, 210, 211, 212, 213, 214, 215, 216, 217, 218, 219, 220, 221, 222, 223, 224, 225, 226, 227, 228, 229, 230, 231, 232, 233, 234, 235, 236, 237, 238, 239, 240, 241, 242, 243, 244, 245, 246, 247, 248, 249, 250, 251, 252, 253, 254, 255, 256, 257, 258, 259, 260, 261, 262, 263, 264, 265, 266, 267, 268, 269, 270, 271, 272, 273, 274, 275, 276, 277, 278, 279, 280, 281, 282, 283, 284, 285, 286, 287, 288, 289, 290, 291, 292, 293, 294, 295, 296, 297, 298, 299, 300, 301, 302, 303, 304, 305, 306, 307, 308, 309, 310, 311, 312, 313, 314, 315, 316, 317, 318, 319, 320, 321, 322, 323, 324, 325, 326, 327, 328, 329, 330, 331, 332, 333, 334, 335, 336, 337, 338, 339, 340, 341, 342, 343, 344, 345, 346, 347, 348, 349, 350, 351, 352, 353, 354, 355, 356, 357, or 358 of the glomerular markers disclosed herein in Table 9, complements thereof, human homologues thereof, or their expression products. Table 9 lists those Category 1 glomerular markers as discussed above.

[0080] In one preferred embodiment of this second aspect of the invention, the plurality of probes in total selectively binds to at least 1, 2, 3, 4, 5, 6, 7, 8, 9, 10, 11, 12, 13, 14, 15, 16, 17, 18, 19, 20, 21, 22, 23, 24, 25, 26, 27, 28, 29, 30, 31, 32, 33, 34, 35, 36, 37, 38, 39, 40, 41, 42, 43, 44, 45, 46, 47, 48, 49, 50, 51, 52, 53, 54, 55, 56, 57, 58, 59, 60, 61, 62, 63, 64, 65, 66, 67, 68, 69, 70, 71, 72, 73, 74, 75, 76, 77, 78, 79, 80, 81, 82, 83, 84, 85, 86, 87, 88, 89, 90, 91, 92, 93, 94, 95, 96, 97, 98, 99, 100, 101, 102, 103, 104, 105, 106, 107, 108, 109, 110, 111, 112, 113, 114, 115, 116, 117, 118, 119, 120, 121, 122, 123, 124, 125, 126, 127, 128, 129, 130, 131, 132, 133, 134, 135, 136, 137, 138, 139, 140, 141, 142, 143, 144, 145, 146, 147, 148, 149, 150, 151, 152, 153, 154, 155, 156, 157, 158, 159, 160, 161, 162, 163, 164, 165, 166, 167, 168, 169, 170, 171, 172, 173, 174, 175, 176, 177, 178, 179, 180, 181, 182, 183, 184, 185, 186, 187, 188, 189, 190, 191, 192, 193, 194, 195, 196, 197, 198, 199, 200, 201, 202, 203, 204, 205, 206, 207, 208, 209, 210, 211, 212, 213, 214, 215, 216, 217, 218, 219, 220, 221, 222, 223, 224, 225, 226, 227, 228, 229, 230, 231, 232, 233, 234, 235, 236, 237, 238, 239, 240, 241, 242, 243, 244, 245, 246, 247, 248, 249, 250, 251, 252, 253, 254, 255, 256, 257, 258, 259, 260, 261, 262, 263, 264, 265, 266, 267, 268, 269, 270, 271, 272, 273, 274, 275, 276, 277, 278, 279, 280, 281, 282, 283, 284, 285, 286, 287, 288, 289, 290, 291, 292, 293, 294, 295, 296, 297, 298, 299, 300, 301, 302, 303, 304, 305, 306, 307, 308, 309, 310, 311, 312, 313, 314, 315, 316, 317, 318, 319, 320, 321, 322, 323, 324, 325, 326, 327, 328, 329, 330, 331, 332, 333, 334, 335, 336, 337, 338, 339, 340, 341, 342, 343, 344, 345, 346, 347, 348, 349, 350, 351, 352, 353, 354, 355, 356, 357, 358, 359, 360, 361, 362, 363, 364, 365, 366, 367, 368, 369, 370, 371, 372, 373, 374, 375, 376, 377, 378, 379, 380, 381, 382, 383, 384, 385, 386, 387, 388, 389, 390, 391, 392, 393, 394, 395, 396, 397, 398, 399, 400, 401, 402, 403, 404, 405, 406, 407, 408, 409, 410, 411, 412, 413, 414, 415, 416, 417, 418, 419, 420, 421, 422, 423, 424, 425, 426, 427, 428, 429, 430, 431, 432, 433, 434, 435, 436, 437, 438, 439, 440, 441, 442, 443, 444, 445, 446, 447, 448, 449, 450, 451, 452, 453, 454, 455, 456, 457, 458, 459, 460, 461, 462, 463, 464, 465, 466, 467, 468, 469, 470, 471, 472, 473, 474, 475, 476, 477, 478, 479, 480, 481, 482, 483, 484, 485, 486, 487, 488, 489, 490, 491, 492, 493, 494, 495, 496, 497, 498, 499, 500, 501, 502, 503, 504, 505, 506, 507, 508, 509, 510, 511, 512, 513, 514, 515, 516, 517, 518, 519, 520, 521, 522, 523, 524, 525, 526, 527, 528, 529, 530, 531, 532, 533, 534, 535, 536, 537, 538, 539, 540, 541, 542, 543, or 544 of the glomerular markers, disclosed herein in Tables 6 (mouse) and Table 7 (human), complements thereof, or their expression products.

[0081] In various further preferred embodiments of this second aspect of the invention, the plurality of probes in total selectively binds to at least 2, 3, 4, 5, 6, 7, 8, 9, 10, 11, 12, 13, 14, 15, 16, 17, 18, 19, 20, 21, 22, 23, 24, 25, 26, 27, 28, 29, 30, 31, 32, 33, 34, 35, 36, 37, 38, 39, 40, 41, 42, 43, 44, 45, 46, 47, 48, 49, 50, 51, 52, 53, 54, 55, 56, 57, 58, 59, 60, 61, 62, 63, 64, 65, 66, 67, 68, 69, 70, 71, 72, 73, 74, 75, 76, 77, 78, 79, 80, 81, 82, 83, 84, 85, 86, 87, 88, 89, 90, 91, 92, 93, 94, 95, 96, 97, 98, 99, 100, 101, 102, 103, 104, 105, 106, 107, 108, 109, 110, 111, 112, 113, 114, 115, 116, 117, 118, 119, 120, 121, 122, 123, 124, 125, 126, 127, 128, 129, 130, 131, 132, 133, 134, 135, 136, 137, 138, 139, 140, 141, or 142, of the glomerular markers disclosed herein in Table 11, complements thereof, human homologues thereof (see Table 11A), or their expression products.

[0082] In various further preferred embodiments of this second aspect of the invention, the plurality of probes in total selectively binds to at least 2, 3, 4, 5, 6, 7, 8, 9, 10, 11, 12, 13, 14, 15, 16, 17, 18, 19, 20, 21, 22, 23, 24, 25, 26, 27, 28, 29, 30, 31, 32, 33, 34, 35, 36, 37, 38, 39, 40, 41, 42, 43, 44, 45, 46, 47, or 48 of the glomerular markers disclosed herein in Table 3, complements thereof, human homologues thereof, or their expression products.

[0083] In various further preferred embodiments of this second aspect of the invention, the plurality of probes in total selectively binds to at least 2, 3, 4, 5, 6, 7, 8, 9, 10, 11, 12, 13, 14, 15, 16, 17, or 18 of the glomerular markers disclosed herein in Table 4, complements thereof, human homologues thereof, or their expression products.

[0084] In various further preferred embodiments of this second aspect of the invention, the plurality of probes in total selectively binds to at least 2, 3, 4, 5, 6, 7, 8, 9, 10, 11, 12, 13, 14, 15, 16, 17, 18, 19, 20, 21, 22, 23, 24, 25, 26, 27, 28, 29, 30, 31, 32, 33, 34, 35, 36, 37, 38, 39, 40, 41, 42, 43, 44, 45, 46, 47, 48, 49, 50, 51, 52, 53, 54, 55, 56, 57, 58, 59, 60, 61, 62, 63, 64, 65, 66, 67, 68, 69, 70, 71, 72, 73, 74, 75, 76, 77, 78, 79, 80, 81, 82, 83, 84, 85, 86, 87, 88, 89, 90, 91, 92, 93, 94, 95, 96, 97, 98, 99, 100, 101, 102, 103, 104, 105, 106, 107, 108, 109, 110, 111, 112, 113, 114, 115, 116, 117, 118, 119, 120, 121, 122, 123, 124, 125, 126, 127, 128, 129, 130, 131, 132, 133, 134, 135, 136, 137, 138, 139, 140, 141, 142, 143, 144, 145, 146, 147, 148, 149, 150, 151, 152, 153, 154, 155, 156, 157, 158, 159, 160, 161, 162, 163, 164, 165, 166, 167, 168, 169, 170, 171, 172, 173, 174, 175, 176, 177, 178, 179, or 180 of the glomerular markers disclosed herein in Table 13, complements thereof, human homologues thereof, or their expression products.

[0085] In various further preferred embodiments of this second aspect of the invention, the plurality of probes in total selectively binds to at least 2, 3, 4, 5, 6, 7, 8, 9, 10, 11, 12, 13, 14, 15, 16, 17, 18, 19, 20, 21, 22, 23, 24, 25, 26, 27, 28, 29, 30, 31, 32, 33, or 34 of the glomerular markers disclosed herein in Table 12, complements thereof, human homologues thereof, or their expression products.

[0086] In various further preferred embodiments of this second aspect of the invention, the plurality of probes in total selectively binds to at least 2, 3, 4, 5, 6, 7, 8, 9, 10, 11, 12, 13, 14, 15, 16, 17, 18, 19, 20, 21, 22, 23, 24, 25, 26, 27, 28, 29, 30, 31, 32, 33, 34, 35, 36, 37, 38, 39, 40, 41, 42, 43, 44, 45, 46, 47, 48, 49, 50, 51, 52, 53, 54, 55, 56, 57, 58, 59, 60, 61, 62, 63, 64, 65, 66, 67, 68, 69, 70, 71, 72, 73, 74, 75, or 76 of the glomerular markers disclosed herein in Table 5, complements thereof, human homologues thereof, or their expression products.

[0087] In a third aspect, the present invention provides a composition comprising a plurality of isolated probes that in total selectively bind to at least 12 of the podocyte markers disclosed herein in Table 3, complements thereof, human homologues thereof, or their expression products, wherein at least 1.5% of the probes in total are selective for podocyte markers. In various preferred embodiments of this third aspect of the invention, the plurality of probes it total selectively binds to at least 13, 14, 15, 16, 17, 18, 19, 20, 21, 22, 23, 24, 25, 26, 27, 28, 29, 30, 31, 32, 33, 34, 35, 36, 37, 38, 39, 40, 41, 42, 43, 44, 45, 46, 47, 48, 49, 50, 51, 52, 53, 54, 55, 56, 57, 58, or 59 of the glomerular markers disclosed herein in Table 3, complements thereof, human homologues thereof, or their expression products.

[0088] As used herein, the term “podocyte marker” means glomerular markers that are up-regulated two-fold or more in glomerular podocytes relative to non-podocyte glomerular tissue. The compositions of this third aspect of the invention are particularly useful for profiling of podocyte-specific gene expression.

[0089] In this third aspect, at least 1.5% of the probes of the composition are selective for podocyte markers, such as those disclosed herein in Table 3, as well as other podocyte probes not disclosed herein.

[0090] The compositions of the invention may contain probes that are not podocyte-specific (for example, for use as control sequences to verify the podocyte-specific nature of an assay in which the compositions are used), so long as such probes do not make up more than 98.5% of the probes of the composition. In various preferred embodiments, at least 2%, 2.5%, 3%, 3.5%, 4%, 4.5%, 5%, 5.5%, 6%, 6.5%, 7%, 7.5%, 8%, 8.5%, 9%, 9.5%, 10%, 11%, 12%, 13%, 14%, 15%, 16%, 17%, 18%, 19%, 20%, 21%, 22%, 23%, 24%, 25%, 26%, 27%, 28%, 29%, 30%, 31%, 32%, 33%, 34%, 35%, 36%, 37%, 38%, 39%, 40%, 41%, 42%, 43%, 44%, 45%, 46%, 47%, 48%, 49%, 50%, 55%, 60%, 65%, 70%, 75%, 80%, 85%, 90%, 95%, 96%, 97%, 98%, 99%, or 100% of the probes of the composition are selective for podocyte markers, such as those disclosed herein in Table 3, as well as other podocyte probes not disclosed herein.

[0091] As will be apparent to those of skill in the art, the compositions of this third aspect of the invention can also comprise fuirther probes as disclosed in the various preferred embodiments of the first and second aspect of the invention described above.

[0092] In an especially preferred embodiment of this third aspect, at least one or more of the isolated probes in the composition is a novel glomerular marker selected from those disclosed in Table 6 or Table 7.

[0093] In a fourth aspect, the present invention provides a composition comprising a plurality of isolated probes that in total selectively bind to at least 2 of the podocyte markers disclosed herein in both Table 3 and in Table 6, complements thereof, human homologues thereof, or their expression products, wherein at least 1.5% of the probes in total are selective for podocyte markers. Examples of such podocyte markers that are disclosed in both Table 3 and Table 6 include those numbered as follows in Table 3: 5, 7-11, 13, 15-18, 20-21, 23-32, 34-42, and 44-48. These podocyte markers were not known as glomerular markers prior to the present study, and thus were not known as glomerular podocyte markers.

[0094] In this fourth aspect, at least 1.5% of the probes of the composition are selective for podocyte markers, such as those disclosed herein in Table 3, as well as other podocyte probes not disclosed herein.

[0095] The compositions of the invention may contain probes that are not podocyte-specific (for example, for use as control sequences to verify the podocyte-specific nature of an assay in which the compositions are used), so long as such probes do not make up more than 98.5% of the probes of the composition. In various preferred embodiments, at least 2%, 2.5%, 3%, 3.5%, 4%, 4.5%, 5%, 5.5%, 6%, 6.5%, 7%, 7.5%, 8%, 8.5%, 9%, 9.5%, 10%, 11%, 12%, 13%, 14%, 15%, 16%, 17%, 18%, 19%, 20%, 21%, 22%, 23%, 24%, 25%, 26%, 27%, 28%, 29%, 30%, 31%, 32%, 33%, 34%, 35%, 36%, 37%, 38%, 39%, 40%, 41%, 42%, 43%, 44%, 45%, 46%, 47%, 48%, 49%, 50%, 55%, 60%, 65%, 70%, 75%, 80%, 85%, 90%, 95%, 96%, 97%, 98%, 99%, or 100% of the probes of the composition are selective for podocyte markers, such as those disclosed herein in Table 3, as well as other podocyte probes not disclosed herein.

[0096] In various preferred embodiments of this fourth aspect of the invention, the plurality of probes it total selectively binds to at least 3, 4, 5, 6, 7, 8, 9, 10, 11, 12, 13, 14, 15, 16, 17, 18, 19, 20, 21, 22, 23, 24, 25, 26, 27, 28, 29, 30, 31, 32, 33, 34, 35, and 36 of the glomerular markers disclosed herein in both Table 3 and Table 6, complements thereof, human homologues thereof (such as in Table 7), or their expression products.

[0097] As will be apparent to those of skill in the art, the compositions of this fourth aspect of the invention can also comprise further probes as disclosed in the various preferred embodiments of the first and second aspect of the invention described above.

[0098] In a fifth aspect, the present invention provides a composition comprising a plurality of isolated probes that in total selectively bind to at least 7 of the non-podocyte glomerular markers disclosed herein in Table 4, complements thereof, human homologues thereof, or their expression products, wherein at least 8.5% of the probes in total are selective for non-podocyte glomerular markers. In various preferred embodiments of this third aspect of the invention, the plurality of probes it total selectively binds to at least 8, 9, 10, 11, 12, 13, 14, 15, 16, 17, or 18 of the glomerular markers disclosed herein in Table 4, complements thereof, human homologues thereof, or their expression products.

[0099] As used herein, the term “non-podocyte glomerular markers” means glomerular markers that are up-regulated two-fold or more in glomerular mesangial and/or endothelial cells relative to podocytes. The compositions of this third aspect of the invention are particularly useful for profiling of up-regulated glomerular mesangial and/or endothelial cell markers.

[0100] In this fifth aspect, at least 8.5% of the probes of the composition are selective for non-podocyte glomerular markers, such as those disclosed herein in Table 4, as well as other non-podocyte glomerular markers not disclosed herein.

[0101] The compositions of the invention may contain probes that are not non-podocyte glomerular-specific (for example, for use as control sequences to verify the non-podocyte glomerular-specific nature of an assay in which the compositions are used), so long as such probes do not make up more than 91.5% of the probes of the composition. In various preferred embodiments, at least 9%, 9.5%, 10%, 11%, 12%, 13%, 14%, 15%, 16%, 17%, 18%, 19%, 20%, 21%, 22%, 23%, 24%, 25%, 26%, 27%, 28%, 29%, 30%, 31%, 32%, 33%, 34%, 35%, 36%, 37%, 38%, 39%, 40%, 41%, 42%, 43%, 44%, 45%, 46%, 47%, 48%, 49%, 50%, 55%, 60%, 65%, 70%, 75%, 80%, 85%, 90%, 95%, 96%, 97%, 98%, 99%, or 100% of the probes of the composition are selective for non-podocyte glomerular markers, such as those disclosed herein in Table 4, as well as other non-podocyte glomerular probes not disclosed herein.

[0102] As will be apparent to those of skill in the art, the compositions of this fifth aspect of the invention can also comprise further probes as disclosed in the various preferred embodiments of the first and second aspect of the invention described above.

[0103] In an especially preferred embodiment of this third aspect, at least one or more of the isolated probes in the composition is a novel glomerular marker selected from those disclosed in Table 6 or Table 7.

[0104] In a sixth aspect, the present invention provides a composition comprising a plurality of isolated probes that in total selectively bind to at least 2 of the non-podocyte glomerular markers disclosed herein in both Table 4 and Table 6, complements thereof, human homologues thereof, or their expression products, wherein at least 8.5% of the probes in total are selective for non-podocyte glomerular markers. Examples of such non-podocyte glomerular markers that are disclosed in both Table 4 and Table 6 include those numbered as follows in Table 4: 6, 9-10, and 12-16. These non-podocyte glomerular markers were not known as glomerular markers prior to the present study, and thus were not known as non-podocyte glomerular markers. In various preferred embodiments of this sixth aspect of the invention, the plurality of probes in total selectively binds to at least 3, 4, 5, 6, 7, or 8 of the glomerular markers disclosed herein in both Table 4 and Table 6, complements thereof, human homologues thereof (such as in Table 7), or their expression products

[0105] In this sixth aspect at least 8.5% of the probes of the composition are selective for non-podocyte glomerular markers, such as those disclosed herein in Table 4, as well as other non-podocyte glomerular markers not disclosed herein.

[0106] The compositions of the invention may contain probes that are not non-podocyte glomerular-specific (for example, for use as control sequences to verify the non-podocyte glomerular-specific nature of an assay in which the compositions are used), so long as such probes do not make up more than 91.5% of the probes of the composition. In various preferred embodiments, at least 9%, 9.5%, 10%, 11%, 12%, 13%, 14%, 15%, 16%, 17%, 18%, 19%, 20%, 21%, 22%, 23%, 24%, 25%, 26%, 27%, 28%, 29%, 30%, 31%, 32%, 33%, 34%, 35%, 36%, 37%, 38%, 39%, 40%, 41%, 42%, 43%, 44%, 45%, 46%, 47%, 48%, 49%, 50%, 55%, 60%, 65%, 70%, 75%, 80%, 85%, 90%, 95%, 96%, 97%, 98%, 99%, or 100% of the probes of the composition are selective for non-podocyte glomerular markers, such as those disclosed herein in Table 4, as well as other non-podocyte glomerular probes not disclosed herein

[0107] As will be apparent to those of skill in the art, the compositions of this sixth aspect of the invention can also comprise further probes as disclosed in the various preferred embodiments of the first and second aspect of the invention described above.

[0108] In a seventh aspect, the present invention provides a composition comprising a plurality of isolated probes that in total selectively bind to at least 2 of the glomerular markers disclosed herein in both Table 11 and Table 6, complements thereof, human homologues thereof, or their expression products, wherein at least 5% of the probes in total are selective for the up-regulated glomerular markers. Examples of such up-regulated glomerular markers that are disclosed in both Table 11 and Table 6 include those numbered as follows in Table S4: 6-8, 10, 12-14, 17, 19, 21-22, 24, 27, 29-32, 35, 38-41, 43-62, 64-65, 67-69, 71-74, 76-78, 80-82, 84-87, 89-91, 93-94, 96-100, 102-103, 105-109, 111-112, 114-126, 129-142. These up-regulated glomerular markers were not known as glomerular markers prior to the present study, and thus further not known as up-regulated glomerular markers. In various preferred embodiments of this sixth aspect of the invention, the plurality of probes in total selectively binds to at least 3, 4, 5, 6, 7, 8, 9, 10, 11, 12, 13, 14, 15, 16, 17, 18, 19, 20, 21, 22, 23, 24, 25, 26, 27, 28, 29, 30, 31, 32, 33, 34, 35, 36, 37, 38, 39, 40, 41, 42, 43, 44, 45, 46, 47, 48, 49, 50, 51, 52, 53, 54, 55, 56, 57, 58, 59, 60, 61, 62, 63, 64, 65, 66, 67, 68, 69, 70, 71, 72, 73, 74, 75, 76, 77, 78, 79, 80, 81, 82, 83, 84, 85, 86, 87, 88, 89, 90, 91, 92, 93, 94, 95, 96, 97, 98, 99, 100, 101, 102, 103, 104, 105, 106, or 107 of the up-regulated glomerular markers disclosed herein in both Table 11 and Table 6, complements thereof, human homologues thereof, or their expression products.

[0109] In this seventh aspects at least 5% of the probes of the composition are selective for up-regulated glomerular markers, such as those disclosed herein in both Tables 11 and 6, as well as other non-podocyte glomerular markers not disclosed herein.

[0110] The compositions of the invention may contain probes that are not specific for up-regulated glomerular markers (for example, for use as controls), so long as such probes do not make up more than 95% of the probes of the composition. In various preferred embodiments, at least 5.5%, 6%, 6.5%, 7%, 7.5%, 8%, 8.5%, 9%, 9.5%, 10%, 11%, 12%, 13%, 14%, 15%, 16%, 17%, 18%, 19%, 20%, 21%, 22%, 23%, 24%, 25%, 26%, 27%, 28%, 29%, 30%, 31%, 32%, 33%, 34%, 35%, 36%, 37%, 38%, 39%, 40%, 41%, 42%, 43%, 44%, 45%, 46%, 47%, 48%, 49%, 50%, 55%, 60%, 65%, 70%, 75%, 80%, 85%, 90%, 95%, 96%, 97%, 98%, 99%, or 100% of the probes of the composition are selective for up-regulated glomerular markers, such as those disclosed herein in both Tables 11 and 6, as well as other up-regulated glomerular markers not disclosed herein.

[0111] As will be apparent to those of skill in the art, the compositions of this seventh aspect of the invention can also comprise further probes as disclosed in the various preferred embodiments of the first and second aspect of the invention described above.

[0112] In a further aspect, the present invention provides a composition comprising a plurality of isolated probes that in total selectively bind to at least 2, 3, 4, 5, 6, 7, 8, 9, 10, 11, 12, 13, 14, 15, 16, 17, 18, 19, 20, 21, 22, 23, 24, 25, 26, 27, 28, 29, 30, 31, 32, 33, 34, 35, 36, 37, 38, 39, 40, 41, 42, 43, 44, 45, 46, 47, 48, 49, 50, 51, 52, 53, 54, 55, 56, 57, 58, 59, 60, 61, 62, 63, 64, 65, 66, 67, 68, 69, 70, 71, 72, 73, 74, 75, 76, 77, 78, 79, 80, 81, 82, 83, 84, 85, 86, 87, 88, 89, 90, 91, 92, 93, 94, 95, 96, 97, 98, 99, 100, 101, 102, 103, 104, 105, 106, 107, 108, 109, 110, 111, 112, 113, 114, 115, 116, 117, 118, 119, 120, 121, 122, 123, 124, 125, 126, 127, 128, 129, 130, 131, 132, 133, 134, 135, 136, 137, 138, 139, 140, 141, 142, or 143 of the glomerular markers disclosed herein in Table 11, complements thereof, human homologues thereof, or their expression products, wherein at least 5% of the probes in total are selective for the up-regulated glomerular markers. These up-regulated glomerular markers are expected to be extremely sensitive to changes in glomerular function caused by disease, therapeutic intervention, or other causes, and thus probes selective for them will be of great value in glomerular profiling.

[0113] In this aspect at least 5% of the probes of the composition are selective for up-regulated glomerular markers, such as those disclosed herein in Table 11, as well as other non-podocyte glomerular markers not disclosed herein.

[0114] The compositions of the invention may contain probes that are not specific for up-regulated glomerular markers (for example, for use as controls), so long as such probes do not make up more than 95% of the probes of the composition. In various preferred embodiments, at least 5.5%, 6%, 6.5%, 7%, 7.5%, 8%, 8.5%, 9%, 9.5%, 10%, 11%, 12%, 13%, 14%, 15%, 16%, 17%, 18%, 19%, 20%, 21%, 22%, 23%, 24%, 25%, 26%, 27%, 28%, 29%, 30%, 31%, 32%, 33%, 34%, 35%, 36%, 37%, 38%, 39%, 40%, 41%, 42%, 43%, 44%, 45%, 46%, 47%, 48%, 49%, 50%, 55%, 60%, 65%, 70%, 75%, 80%, 85%, 90%, 95%, 96%, 97%, 98%, 99%, or 100% of the probes of the composition are selective for up-regulated glomerular markers, such as those disclosed herein in Table 11, as well as other up-regulated glomerular markers not disclosed herein.

[0115] As will be apparent to those of skill in the art, the compositions of this aspect of the invention can also comprise further probes as disclosed in the various preferred embodiments of the first and second aspect of the invention described above.

[0116] In a further embodiment of each of the above aspects and embodiments of the compositions of the invention, the compositions further comprise isolated probes selective for at least 2 of the glomerular markers listed in Tables 15 or 16. These genes were previously known to be expressed in the glomerulus, and thus their addition to the compositions of the invention provides for additional ability to characterize glomerular expression profiles as described herein. In various further preferred embodiments, the compositions further comprise isolated probes selective for at least 3, 4, 5, 6, 7, 8, 9, 10, 11, 12, 13, 14, 15, 16, 17, 18, 19, 20, 21, 22, 23, 24, 25, 26, 27, 28, 29, 30, 31, 32, 33, 34, 35, 36, 37, 38, 39, 40, 41, 42, 43, 44, 45, 46, 47, 48, 49, 50, 51, 52, 53, 54, 55, 56, 57, 58, 59, 60, 61, 62, 63, 64, 65, 66, 67, 68, 69, 70, 71, 72, 73, 74, 75, 76, 77, 78, 79, 80, 81, 82, 83, 84, 85, 86, 87, 88, 89, 90, 91, 92, 93, 94, 95, 96, 97, 98, 99, 100, 101, 102, 103, 104, 105, 106, 107, 108, 109, 110, 111, 112, 113, 114, 115, 116, 117, 118, 119, 120, 121, 122, 123, 124, 125, 126, 127, 128, 129, 130, 131, 132, or 133 of the glomerular markers listed in Tables 15 or 16.

[0117] In a further embodiment of each of the above aspects and embodiments of the compositions of the invention, the compositions further comprise isolated probes selective for at least 10 of the mouse glomerular markers listed in Table 14, the human glomerular markers listed in Table 14, or a combination thereof. In various preferred embodiments, the compositions further comprise probes selective for at least 50, 100, 150, 200, 250, 300, 350, 400, 450, 500, 550, 600, 650, 700, 750, 80, 850, 900, 950, 1000, 1100, 1200, 1300, 1400, 1500, 1600, 1700, 1800, 1900, 2000, 2100, 2200, 2300, 2400, 2500, 2600, 2700, 2800, 2900, 3000, 3100, 3200, 3300, 3400, 3500, 3600, 3700, 3800, 3900, 4000, 4100, 4200, 4300, 4400, 4500, 4600, 4700, 4800, 4900, 5000, 5100, 5200, 5300, 5400, 5500, 5600, 5700, 5800, 5900, 6000, 6100, 6200, 6300, 6400, 6500 6600, 6700, 6800, 6900, or 7000 of the mouse glomerular markers listed in Table 14, the human glomerular markers listed in Table 14, or a combination thereof.

[0118] In further preferred embodiments of each of the above aspects and embodiments of compositions according to the invention, the composition comprises probes that selectively bind to 3, 4, 5, 6, 7, 8, 9, 10, 11, 12, 13, 14, 15, 16, 17, 18, 19, 20, 21, 22, 23, 24, 25, 26, 27, 28, 29, 30, 31, 32, 33, 34, 35, 36, 37, 38, 39, 40, 41, 42, 43, 44, 45, 46, 47, 48, 49, 50, 51, 52, 53, 54, 55, 56, 57, 58, 59, 60, 61, 62, 63, 64, 65, 66, 67, 68, 69, 70, 71, 72, 73, 74, 75, 76, 77, 78, 79, 80, 81, 82, 83, 84, 85, 86, 87, 88, 89, 90, 91, 92, 93, 94, 95, 96, 97, 98, 99, 100, 101, 102, 103, 104, 105, 106, 107, 108, 109, 110, 111, 112, 113, 114, 115, 116, 117, 118, 119, 120, 121, 122, 123, 124, 125, 126, 127, 128, 129, 130, 131, 132, 133, 134, 135, 136, 137, 138, 139, 140, 141, 142, 143, 144, 145, 146, 147, 148, 149, 150, 151, 152, 153, 154, 155, 156, 157, 158, 159, 160, 161, 162, 163, 164, 165, 166, 167, 168, 169, 170, 171, 172, 173, 174, 175, 176, 177, 178, 179, 180, 181, 182, 183, 184, 185, 186, 187, 188, 189, 190, 191, 192, 193, 194, 195, 196, 197, 198, 199, 200, 201, 202, 203, 204, 205, 206, 207, 208, 209, 210, 211, 212, 213, 214, 215, 216, 217, 218, 219, 220, 221, 222, 223, 224, 225, 226, 227, 228, 229, 230, 231, 232, 233, 234, 235, 236, 237, 238, 239, 240, 241, 242, 243, 244, 245, 246, 247, 248, 249, 250, 251, 252, 253, 254, 255, 256, 257, 258, 259, 260, 261, 262, 263, 264, 265, 266, 267, 268, 269, 270, 271, 272, 273, 274, 275, 276, 277, 278, 279, 280, 281, 282, 283, 284, 285, 286, 287, 288, 289, 290, 291, 292, 293, 294, 295, 296, 297, 298, 299, 300, 301, 302, 303, 304, 305, 306, 307, 308, 309, 310, 311, 312, 313, 314, 315, 316, 317, 318, 319, 320, 321, 322, 323, 324, 325, 326, 327, 328, 329, 330, 331, 332, 333, 334, 335, 336, 337, 338, 339, 340, 341, 342, 343, 344, 345, 346, 347, 348, 349, 350, 351, 352, 353, 354, 355, 356, 357, 358, 359, 360, 361, 362, 363, 364, 365, 366, 367, 368, 369, 370, 371, 372, 373, 374, 375, 376, 377, 378, 379, 380, 381, 382, 383, 384, 385, 386, 387, 388, 389, 390, 391, 392, 393, 394, 395, 396, 397, 398, 399, 400, 401, 402, 403, 404, 405, 406, 407, 408, 409, 410, 411, 412, 413, 414, 415, 416, 417, 418, 419, 420, 421, 422, 423, 424, 425, 426, 427, 428, 429, 430, 431, 432, 433, 434, 435, 436, 437, 438, 439, 440, 441, 442, 443, 444, 445, 446, 447, 448, 449, 450, 451, 452, 453, 454, 455, 456, 457, 458, 459, 460, 461, 462, 463, 464, 465, 466, 467, 468, 469, 470, 471, 472, 473, 474, 475, 476, 477, 478, 479, 480, 481, 482, 483, 484, 485, 486, 487, 488, 489, 490, 491, 492, 493, 494, 495, 496, 497, 498, 499, 500, 501, 502, 503, 504, 505, 506, 507, 508, 509, 510, 511, 512, 513, 514, 515, 516, 517, 518, 519, 520, 521, 522, 523, 524, 525, 526, 527, 528, 529, 530, 531, 532, 533, 534, 535, 536, 537, 538, 539, 540, 541, 542, 543, 544, 545, 546, 547, 548, 549, 550, 551, 552, 553, 554, 555, 556, 557, 558, 559, 560, 561, 562, 563, 564, 565, 566, 567, 568, 569, 570, 571, 572, 573, 574, 575, 576, 577, 578, 579, 580, 581, 582, 583, 584, 585, 586, 587, 588, 589, 590, 591, 592, 593, 594, 595, 596, 597, 598, 599, 600, 601, 602, 603, 604, 605, 606, 607, 608, 609, 610, 611, 612, 613, 614, 615, 616, 617, 618, 619, 620, 621, 622, 623, 624, 625, 626, 627, 628, 629, 630, 631, 632, 633, 634, 635, 636, 637, 638, 639, 640, 641, 642, 643, 644, 645, 646, 647, 648, 649, 650, 651, 652, 653, 654, 655, 656, 657, 658, 659, 660, 661, 662, 663, 664, 665, 666, 667, 668, 669, 670, 671, 672, 673, 674, 675, 676, 677, 678, 679, 680, 681, 682, 683, 684, 685, 686, 687, 688, 689, 690, 691, 692, 693, 694, 695, 696, 697, 698, 699, 700, 701, 702, 703, 704, 705, 706, 707, 708, 709, 710, 711, 712, 713, 714, 715, 716, 717, 718, 719, 720, 721, 722, 723, 724, 725, 726, 727, 728, 729, 730, 731, 732, 733, 734, 735, 736, 737, 738, 739, 740, 741, 742, 743, 744, 745, 746, 747, 748, 749, 750, 751, 752, 753, 754, 755, 756, 757, 758, 759, 760, 761, 762, 763, 764, 765, 766, 767, 768, 769, 770, 771, 772, 773, 774, 775, 776, 777, 778, 779, 780, 781, 782, 783, 784, 785, 786, 787, 788, 789, 790, 791, 792, 793, 794, 795, 796, 797, 798, 799, 800, 801, 502, 803, 804, 805, 806, 807, 808, 809, 810, 811, 812, 813, 814, 815, 816, 817, 818, 819, 820, 821, 822, 823, 824, 825, 826, 827, 828, 829, 830, 831, 832, 833, 834, 835, 836, 837, 838, 839, 840, 841, 842, 843, 844, 845, 846, 847, 848, 849, 850, 851, 852, 853, 854, 855, 856, 857, 858, 859, 860, 861, 862, 863, 864, 865, 866, 867, 868, 869, 870, 871, 872, 573, 874, 875, 876, 877, 878, 879, 880, 881, 882, 883, 884, 885, 886, 887, 888, 889, 890, 891, 892, 893, 894, 895, 896, 897, 898, 899, 900, 901, 902, 903, 904, 905, 906, 907, 908, 909, 910, 911, 912, 913, 914, 915, 916, 917, 918, 919, 920, 921, 922, 923, 924, 925, 926, 927, 929, 929, 930, 931, 932, 933, 934, 935, 936, 937, 938, 939, 940, 941, or 942 of the glomerular markers, disclosed herein in Table 17, complements thereof, or their expression products. Table 17 discloses expressed sequence tags (ESTs) that have been identified herein as expressed in the glomerulus; thus, these markers are useful for glomerular profiling according to the methods of the invention.

[0119] The compositions of the various aspects and embodiments of the invention can be in lyophilized form, or may comprise a solution containing the probes, including but not limited to buffer solutions, hybridization solutions, and solutions for keeping the compositions in storage. Such a solution can be made as such, or the composition can be prepared at the time of use, by combining the probes. The probes can be labeled with a detectable label. In a preferred embodiment, the detectable labels on probes for different glomerular markers are distinguishable, to facilitate differential detection. Such probe labeling can be carried out using standard methods in the art. Useful detectable labels include but are not limited to radioactive labels such as ³²p, ³H, and ¹⁴C; fluorescent dyes such as fluorescein isothiocyanate (FITC), rhodamine, lanthanide phosphors, Texas red, and ALEXIS™ (Abbott Labs), CY™ dyes (Amersham); electron-dense reagents such as gold; enzymes such as horseradish peroxidase, beta-galactosidase, luciferase, and alkaline phosphatase; calorimetric labels such as colloidal gold; magnetic labels such as those sold under the mark DYNABEADS™; biotin; dioxigenin; or haptens and proteins for which antisera or monoclonal antibodies are available. The label can be directly incorporated into the probe, or it can be attached to a molecule that hybridizes or binds to the probe. The labels may be coupled to the probes by any means known to those of skill in the art. In various embodiments where the probes comprise polynucleotides, the polynucleotides are labeled using nick translation, PCR, or random primer extension (see, e.g., Sambrook et al. supra). Methods for detecting the label include, but are not limited to spectroscopic, photochemical, biochemical, immunochemical, physical or chemical techniques.

[0120] Alternatively, the compositions can be placed on a solid support, such as in a microarray, bead, or microplate format. The term “microarray” as used herein refers to a plurality of probe sets immobilized on a solid surface to which sample nucleic acids or proteins are contacted for binding assays (such as glomerular mRNA, derived cDNA, or protein isolated from a patient with a renal disorder).

[0121] Thus, in an eighth aspect, the present invention provides an arrayed composition comprising a support structure on which are arrayed compositions of the invention, as disclosed above. In this aspect, the plurality of probes are generally present at defined locations on the support structure. Such arrays can comprise one or more of the compositions of the invention. Such arrays can thus comprise, for example, polynucleotide arrays or polypeptide (such as antibody) arrays. A given support structure can have single or multiple probes for a given glomerular marker, as discussed above, and can also have various control markers, as discussed above.

[0122] In this aspect, the probes are immobilized on a microarray solid surface using standard methods in the art and as disclosed below. A wide variety of materials can be used for the solid surface. Examples of such solid surface materials include, but are not limited to, nitrocellulose, nylon, glass, quartz, diazotized membranes (paper or nylon), silicones, polyformaldehyde, cellulose, cellulose acetate, paper, ceramics, metals, metalloids, semiconductive materials, coated beads, magnetic particles; plastics such as polyethylene, polypropylene, and polystyrene; and gel-forming materials, such as proteins (e.g., gelatins), lipopolysaccharides, silicates, agarose and polyacrylamides.

[0123] A variety of different materials may be used to prepare the microarray solid surface to obtain various properties. For example, proteins (e.g., bovine serum albumin) or mixtures of macromolecules (e.g., Denhardt's solution) can be used to minimize non-specific binding, simplify covalent conjugation, and/or enhance signal detection, particularly when using polynucleotide arrays. If covalent bonding between a compound and the surface is desired, the surface will usually be functionalized or capable of being functionalized. Functional groups which may be present on the surface and used for linking include, but are not limited to, carboxylic acids, aldehydes, amino groups, cyano groups, ethylenic groups, hydroxyl groups, and mercapto groups. Methods for linking a wide variety of compounds to various support structures are well known to those of skill in the art.

[0124] In a preferred embodiment of this eighth aspect, the locations on an array containing probes of the present invention range in size between 1 μm and 1 cm in diameter, more preferably between 1 μm and 5 mm in diameter, and even more preferably between 5 μm and 1 mm in diameter. The probes may be arranged on the support structures at different densities, depending on factors such as the nature of the label, the support structure, and the size of the probe. One of skill will recognize that each location on the microarray may comprise a mixture of probes of different size and sequences for a given glomerular marker. The size and complexity of the probes fixed onto the locations can be adjusted to provide optimum binding and signal production for a given detection procedure, and to provide the required resolution.

[0125] The invention also provides methods of making a glomerular array, comprising arraying one or more of the compositions of the present invention on a solid support, as disclosed above.

[0126] In a ninth aspect, the present invention provides methods to profile a glomerular expression pattern from a subject, comprising

[0127] a) providing one of more compositions of the invention;

[0128] b) contacting the one or more compositions with glomerular polynucleotides and/or polypeptides under conditions to promote selective binding of the probes to their glomerular marker target; and

[0129] c) detecting presence of the glomerular marker targets by binding of the probes to their glomerular marker target., wherein the glomerular marker targets detected comprise a glomerular expression pattern.

[0130] Samples containing glomerular polynucleotides and/or polypeptides (hereinafter “glomerular sample”) are preferably derived from a subject of interest, such as a subject suffering from a renal disease-related indication, including but not limited to nephropathy, proteinuria, nephrotoxicity, end stage renal disease, diabetes, hypertension, infections, nephrotic syndromes, and glomerulosclerosis. Samples containing such glomerular samples can be obtained by means known to those of skill in the art and as described herein, and can be subjected to various steps to make them more suitable for the assays disclosed herein, such as partial of substantial purification of the polynucleotides or polypeptides, using standard methods in the art.

[0131] In a preferred embodiment, the methods further comprises removing unbound glomerular polynucleotides and/or polypeptides prior to detection, using standard techniques such as washing with buffer solutions or various chromatographic techniques.

[0132] If the methods of the invention are conducted in solution, then either the probes in the compositions or the glomerular sample are preferably labeled to facilitate detection of their glomerular marker target upon binding. In a preferred embodiment, the compositions are present on a support structure, and the glomerular polynucleotides and/or polypeptides are labeled to facilitate detection. Any method for signal detection can be used with the methods of the invention, including but not limited to polymerase chain reaction, spectroscopic, photochemical, biochemical, immunochemical, physical or chemical techniques. In a preferred embodiment, the compositions are arrayed on a solid support and the glomerular polynucleotides or polypeptides are labeled (using labels as described above), so that their binding to the array can be detected using various types of signal detection techniques.

[0133] The methods of the invention can be used to profile a glomerular sample of interest to determine expression pattern of glomerular markers of interest. Such “glomerular expression profiling” can be used, for example, to establish expression profiles and specific biomarkers for various patient populations with renal disease-related indications, including but not limited to nephropathy, proteinuria, nephrotoxicity, end stage renal disease, diabetes, hypertension, infections, nephrotic syndromes, and glomerulosclerosis. Such glomerular expression profiles can be used, for example, to establish pathogenic pathways for different renal diseases, which will improve on renal histopathology as a means to measure renal disease conditions. Such methods are also useful, for example, to define glomerular profiles and biomarkers in various types of renal disease patient populations that correlate with a positive response to a particular therapeutic strategy and/or particular drug candidate; such profiles and biomarkers can then be used to screen patients to identify those patients that are suitable candidates for treatment with the drug. The methods of the invention can also be used, for example, to identify profiles and biomarkers associated with renal toxicity, wherein pre-clinical drug candidates can then be screened for such renal toxicity-associated profiles and biomarkers to weed out at an early stage of development those drug candidates that induce renal toxicity.

[0134] In a preferred embodiment of this ninth aspect of the invention, the method comprises monitoring up-regulated glomerular genes, wherein the composition is one according to the second, third, fourth, fifth, sixth, or seventh aspect of the invention. These compositions comprise genes known to be up-regulated in the glomerulus relative to elsewhere in the kidney, and thus are expected to be much more sensitive to changes in glomerular function. As a result, such compositions are ideal for use in the methods of the invention described herein.

[0135] In further preferred embodiments of this ninth aspect of the invention, the composition(s) is/are selected from the group consisting of:

[0136] a) probes selective for between 2 and 359 glomerular specific markers listed in Table 9;

[0137] b) probes selective for between 2 and 142 glomerular specific markers listed in Table 11;

[0138] c) probes selective for between 2 and 48 podocyte up-regulated markers listed in Table 3;

[0139] d) probes selective for between 2 and 18 non-podocyte up-regulated glomerular markers listed in Table 4; and

[0140] e) probes selective for between 2 and 78 glomerular up-regulated glomerular markers listed in Table 5;

[0141] or combinations thereof. As will be apparent to those of skill in the art, any number of the recited probes or combinations can be used in this embodiment, as disclosed in the various aspects and embodiments above. Probes listed in (a)-(e) comprise genes known to be up-regulated in the glomerulus relative to elsewhere in the kidney, and thus are expected to be much more sensitive to changes in glomerular function. As a result, such probes are ideal for use in the methods of the invention described herein

[0142] In a tenth aspect, the present invention also provides an isolated polynucleotide comprising or consisting of a nucleotide sequence according to SEQ ID NO:2043 (also listed as MTG_{—}602467023 in Table 3) expression vectors comprising the polynucleotide, and host cells transfected with the expression vector. This sequence is referred to herein as “GeneX”, and was identified as a glomerular specific marker herein. Thus, probes for Gene X, such as the nucleic acid itself or probes derived therefrom, have utility in assays for glomerular profiling as disclosed herein. The present invention further comprises an isolated polynucleotide comprising or consisting of a nucleotide sequence as disclosed in Table 17 (SEQ ID NOS: 2044-2986), expression vectors comprising the polynucleotide, and host cells transfected with the expression vector. Table 17 discloses expressed sequence tags (ESTs) that have been identified herein as expressed in the glomerulus; thus, these markers are useful for glomerular profiling according to the methods of the invention.

[0143] In an eleventh aspect, the present invention further provides novel dendrin nucleic acids and polypeptides comprising or consisting of the nucleic acid sequence of SEQ ID NO:2041 or the amino acid sequence of SEQ ID NO:2042 (also recited herein as MTG 602468169; ENSMUSG0000059213 in Table 3). This sequence differs from the previously reported mouse dendrin sequence (ENSEMBL mouse release 26.33b.1, 2004-09-03). As disclosed herein, probes for dendrin have utility in assays for glomerular profiling. This aspect of the invention further comprises expression vectors comprising the polynucleotide, host cells transfected with the expression vector, and antibodies selective for one or more epitopes within the amino acid sequence according to SEQ ID NO:2042. The making of polynucleotides and antibodies are described above. Polypeptides according to this aspect of the invention can be purified by standard techniques, as described below.

[0144] The expression vectors of the tenth and eleventh aspects of the invention comprise the isolated polynucleotide operatively linked to a promoter. A promoter and the isolated polynucleotide are “operatively linked” when the promoter is capable of driving expression of the polynucleotide expression product.

[0145] As used herein, the term “vector” refers to a nucleic acid molecule capable of transporting the polypeptide to which it has been linked. One type of vector is a “plasmid”, which refers to a circular double stranded DNA into which additional DNA segments may be cloned. Another type of vector is a viral vector, wherein additional DNA segments may be cloned into the viral genome. Certain vectors are capable of autonomous replication in a host cell into which they are introduced (e.g., bacterial vectors having a bacterial origin of replication and episomal mammalian vectors). Other vectors (e.g., non-episomal mammalian vectors), are integrated into the genome of a host cell upon introduction into the host cell, and thereby are replicated along with the host genome. Moreover, certain vectors are capable of directing the expression of genes to which they are operatively linked. Such vectors are referred to herein as “recombinant expression vectors” or simply “expression vectors”. In general, expression vectors of utility in recombinant DNA techniques are often in the form of plasmids. In the present specification, “plasmid” and “vector” may be used interchangeably as the plasmid is the most commonly used form of vector. However, the invention is intended to include such other forms of expression vectors, such as viral vectors (e.g., replication defective retroviruses, adenoviruses and adeno-associated viruses), which serve equivalent functions. The vector may also contain additional sequences, such as a polylinker for subcloning of additional nucleic acid sequences and a polyadenylation signal to effect proper polyadenylation of the transcript. The nature of the polyadenylation signal is not believed to be crucial to the successful practice of the invention, and any such sequence may be employed, including but not limited to the SV40 and bovine growth hormone poly-A sites. Also contemplated as an element of the vector is a termination sequence, which can serve to enhance message levels and minimize read through from the construct into other sequences. Finally, expression vectors typically have selectable markers, often in the form of antibiotic resistance genes that permit selection of cells that carry these vectors.

[0146] In a further embodiment of the tenth and eleventh aspects, the present invention provides recombinant host cells in which the expression vectors disclosed herein have been introduced. As used herein, the term “host cell” is intended to refer to a cell into which a nucleic acid of the invention, such as a recombinant expression vector of the invention, has been introduced. Such cells may be prokaryotic, which can be used, for example, to rapidly produce a large amount of the expression vectors of the invention, or may be eukaryotic, for functional studies. The terms “host cell” and “recombinant host cell” are used interchangeably herein. It should be understood that such terms refer not only to the particular subject cell but to the progeny or potential progeny of such a cell. Because certain modifications may occur in succeeding generations due to either mutation or environmental influences, such progeny may not, in fact, be identical to the parent cell, but are still included within the scope of the term as used herein. The host cells can be transiently or stably transfected with one or more of the expression vectors of the invention. Such transfection of expression vectors into prokaryotic and eukaryotic cells can be accomplished via any technique known in the art, including but not limited to standard bacterial transformations, calcium phosphate co-precipitation, electroporation, or liposome mediated-, DEAE dextran mediated-, polycationic mediated-, or viral mediated transfection. Alternatively, the host cells can be infected with a recombinant viral vector of the invention. (See, for example, Molecular Cloning: A Laboratory Manual (Sambrook, et al., 1989, Cold Spring Harbor Laboratory Press; Culture of Animal Cells: A Manual of Basic Technique, 2^{nd} Ed. (R. I. Freshney. 1987. Liss, Inc. New York, N.Y.).

[0147] In a twelfth aspect, the present invention provides methods for identifying glomerular marker polynucleotides, comprising

[0148] a) perfusing a target kidney in an organism with a solution containing magnetic beads, wherein the magnetic bead diameter is approximately equivalent to the capillary diameter of glomerular capillaries;

[0149] b) removing glomerular-containing kidney tissue from the organism;

[0150] c) digesting the glomerular-containing kidney tissue to separate glomeruli from associated kidney tissue;

[0151] d) magnetically isolating glomeruli from the digested glomerular-containing kidney tissue;

[0152] e) isolating mRNA from the isolated glomeruli

[0153] f) normalizing the mRNA to at least partially suppress high copy number mRNA transcripts;

[0154] g) identifying mRNA that are expressed in the glomerulus, wherein such mRNA are glomerular marker polynucleotides.

[0155] Methods for isolation of target cells using magnetic beads have been previously described (WO 03/093458, incorporated by reference herein in its entirety). Examples of magnetic beads that can be used according to this ninth aspect of the invention include, but are not limited to, spherical DYNABEADS™ (Dynal). Such beads are made of materials (such as iron) providing magnetic properties when placed within a magnetic field. The diameter of bead chosen necessarily varies depending on the application. The diameter chosen corresponds to the diameter of the glomerular capillary that will be selectively embolized with magnetic beads, facilitating isolation with a magnet. 4.5 μm diameter beads are the appropriate size to specifically embolize murine glomerular capillaries and to minimize cell damage.

[0156] Digesting the glomerular-containing kidney tissue can be carried out using standard methods in the art. For example, the digesting can be performed using collagenase. The method can further comprise filtering the digested selected tissue or region prior to the magnetic isolation step. mRNA isolation can be accomplished by standard techniques in the art, including but not limited to the methods described below.

[0157] Normalization of high copy number mRNA transcripts is utilized to provide a better representation of the different glomerular-specific polynucleotides, and can be carried out using methods known in the art, including but not limited to the method disclosed in Diatchenko et al., Proc. Natl. Acad. Sci. USA 93:6025-6030 (1996).

[0158] Identifying mRNA that are expressed in the glomerulus can be accomplished by any means known in the art, including but not limited to in situ hybridization, immunohistochemistry (for protein expression products) or the methods disclosed below.

[0159] In one preferred embodiment, the methods of this twelfth aspect of the invention further comprise identifying podocyte-specific glomerular polynucleotides, wherein such identifying comprises identifying those glomerular marker polynucleotides that are expressed in glomerular podocytes. Any method for detecting expression of the glomerular marker polynucleotides in podocytes can be used, including in situ hybridization, immunohistochemistry, or the methods disclosed below.

[0160] In a further preferred embodiment, the methods of this twelfth aspect of the invention further comprise identifying non-podocyte-specific glomerular polynucleotides, wherein such identifying comprises identifying those glomerular marker polynucleotides that are expressed in glomerular endothelial and/or mesangial cells. Any method for detecting expression of the glomerular marker polynucleotides in glomerular endothelial and/or mesangial cells can be used, including in situ hybridization, immunohistochemistry, or the methods disclosed below.

[0161] In a thirteenth aspect, the present invention provides glomerular specific nucleic acid libraries, comprising predominately glomerular-specific genes as disclosed herein. Embodiments of this aspect of the invention include, but are not limited to, glomerular-specific nucleic acid libraries comprising the glomerular specific genes of one or more of: Tables 3, 4, 5, 6, 7, 9, 10, 11, 12, 13, and 14. Methods for making nucleic acid libraries, including expression libraries, is standard in the art; exemplary methods for making and using such libraries are as described below.

### EXAMPLES

[0162] Glomerular disease is a major health care problem, but knowledge about the developmental and molecular biology of the renal filtration unit and its diseases is still limited, although new insight into disease mechanisms has emerged from studies on rare hereditary disorders. In the present study, we report on the assembly and use of a transcription-profiling platform dedicated to the study of mouse renal glomeruli. By using a novel method for glomerulus isolation (45), we constructed a series of high complexity EST libraries from glomeruli at different stages of development. From these libraries, a total of 15,627 EST clones were sequenced, and by annotation against ENSEMBL found to map to 6,053 different genes, estimated to cover 85% of the glomerular transcriptome. Microarray analysis of isolated glomeruli, non-glomerular kidney tissue, isolated extra-renal microvessel fragments, and FACS-sorted podocytes identified most known glomerular and podocyte-specific transcripts. To identify novel podocyte-specific transcripts, the EST clones were arrayed and hybridized against labeled targets from isolated glomeruli, non-glomerular kidney tissue, FACS-sorted podocytes and brain capillary fragments. This revealed the existence of over 300 novel glomerular cell-enriched transcripts, the expression of many of which was further localized to podocytes, mesangial cells, and juxtaglomerular cells by in situ hybridization. For one of the podocyte-restricted transcripts, dendrin, previously regarded to be brain-specific, we expressed the protein, generated antibodies, and used them to localize dendrin to the podocyte foot processes. Our results provide quantitative expression data for known podocyte genes, some of which are mutated in hereditary nephrotic syndromes, and they also identify novel transcripts and proteins specific to podocytes and mesangial cells, thereby pinpointing candidate genes and proteins involved in the pathogenesis or susceptibility to glomerular diseases.

Materials and Methods

Mice

[0163] RNA for cDNA library construction and microarray hybridization was isolated from C57BL/6 and 129/sv strains of mice or hybrids between the two strains. Podocyte isolation experiments were done using podocin-Cre, Z/EG double transgenic mice, which also contained ICR background. Genotyping of littermates was done as described (82). Mice were housed at the Department of Experimental Biomedicine at Göteborg University and the animal facility of the Department of Medical Biochemistry and Biophysics at Karolinska Institutet in accordance with Swedish animal research regulations. Animal experiments were approved by a local committee for ethics in animal research.

RNA Preparation and cDNA Library Construction.

[0164] Glomeruli were isolated from newborn and adult mice using Dynabead perfusion (45). Using RNeasy mini kits (Qiagen Inc., Valencia, Calif.), 400 μg of glomerular total RNA was isolated from about two million glomeruli obtained from 100 “adult” mice of ages ranging between 3 weeks and 6 months. An additional 350 μg of glomerular total RNA was isolated from approximately 200,000 glomeruli obtained from 400 newborn mice of ages 1 to 5 days. The RNA was used to produce standard oligo dT-primed cDNA libraries (custom synthesis by Incyte Inc., Palo Alto, Calif.) (83) one each from adult and newborn glomerular RNAs, respectively. In addition, two normalized libraries were generated from the adult standard library, using Incyte proprietary technology, in which high abundance transcripts were suppressed to different degrees.

Sequencing and Annotation of cDNA Clones.

[0165] 10,944 cDNA clones picked at random from the three adult glomerulus libraries and 5,000 clones from the newborn glomerulus library were sequenced from the 5′ ends in single reads of 500-800 bp length (custom sequencing by Incyte and Genome Vision (Genome Vision Inc., Waltham, Mass.). After vector clipping, sequences shorter than 100 nucleotides were discarded. Remaining sequences were annotated by blast searches against the ENSEMBL mouse gene predictions (http://www.ensembl.org/). Hits with E-values <1e-30 and alignment identity >85% were considered significant and the annotations linked to the best hit were assigned to the clones. Blast searches were also performed against NCBI EST databases and the mouse Unigene cluster database (http://www.ncbi.nlm.nih.gov/UniGene/).

Construction of a Mouse Glomerulus cDNA Chip, GlomChip.

[0166] Amplification of the clones was done by PCR using the primers: M13F 5′ TGC AAG GCG ATT AAG TTG 3′ and M13R 5′ AAT TTC ACA CAG GAA ACA GC 3′. The reactions were set up in 384 well PCR-plates (Cycleplate-384 DW, Robbins Scientific, West Midlands, UK) using a Hamilton Microlab 4200 robot (Robbins Scientific). All amplifications were performed in GeneAmp PCR system 9700 (Applied Biosystem, Foster City, Calif.) using the following PCR conditions: 95° C. for 15 min, followed by 40 cycles of 94° C. for 30 s, 52.5° C. for 45 s and 72° C. for 3 min with a final holding step at 72° C. for 7 min. The PCR reactions (20 μl) contained 1× Hot Star PCR Buffer (Qiagen), 0.5 mM MgCl₂, 0.25 mM dNTPs (Invitrogen, San Diego, Calif.), 0.9 μM of each primer, 1 unit Hot Star Taq polymerase (Qiagen), 1× Master Amp Betaine Enhancer (Eppicentre, Madison, Wis.) and 1 μl of DNA template. PCR products were purified using Multiscreen 384-well filter plates (Millipore, Billerica, Mass.), transferred to polystyrene low-profile conical bottom GENETIX plates (Genetix Limited, Hampshire, UK), vacuum-dried, resuspended in 50% DMSO (Sigma-Aldrich, St. Louis, Mo.) and printed using a Microgrid II robot (Genomic Solution Ltd., Cambridgeshire, UK) on gamma-amino-propyl-silane-coated UltraGAPS slides (Corning Inc., London, UK). The slides were printed with an array of 16,704 mouse glomerulus cDNAs, including the 15,944 sequenced clones and 760 clones for which the sequencing reaction had failed, 1344 randomly selected sequence-verified mouse EST clones (obtained from Invitrogen, San Diego, Calif.) and control DNAs including 10 different Arabidopsis Thaliana PCR-products (Stratagene, Amsterdam, Netherlands). The printing was done with a pitch of 0.130 mm between the spots and the whole array was printed in triplicates on the slides.

Tissue and Podocyte Isolation

[0167] Mouse glomeruli and brain capillary fragments were prepared as described (45, 54, 84). Podocytes were separated from isolated glomeruli from 8-day-old Podocin-Cre, Z/EG double transgenic mice as follows: Isolated glomeruli were incubated with trypsin solution containing 0.2% trypsin-EDTA (Sigma-Aldrich), 100 ug/ml Heparin and 100 U/ml DNase I in PBS for 25 min at 37° C., with mixing by pipetting every 5 min. The trypsin was inactivated with soybeans trypsin inhibitor (Sigma-Aldrich) and the cell suspension sieved through a 30 um pore size filter (BD bioscience, Franklin Lakes, N.J.). Cells were collected by centrifugation at 200×g for 5 min at 4° C. and resuspended in 1 ml PBS supplemented with 0.1% BSA. To separate GFP-expressing (GFP+) and GFP-negative (GFP−) cells, glomerular cell were sorted using a FACSVantage SE (BD, San Jose, Calif., USA) operating at a sheath pressure of 22 psi. Autofluorescent cells were excluded by analyzing the emission of orange light (585 nm).

Target Preparation and GlomChip Hybridization.

[0168] mRNA was amplified using T7 RNA amplification as described (85). Five μg of amplified RNA was primed with 5 μg of random hexamers (Promega UK Ltd., Southampton, UK) and labeled in a reverse transcription reaction with Cy3-dUTP (Amersham Pharmacia Biotech AB, Uppsala, Sweden). To allow for standardization of results, all hybridizations were done in competition with Cy5-dUTP labeled common reference samples. The common reference was made as a mixture of amplified RNA from 13 different sources including mouse brain, heart, thymus, lung, liver, spleen, aorta, kidney, skeletal muscle, testis, adult mouse glomeruli, post-natal-day 5 glomeruli and streptozotocin-induced diabetic mouse glomeruli. RNA samples were amplified separately, pooled and aliquoted in small tubes and kept at −80° C. until use. The differently labeled targets were combined, mixed with 10 μg of yeast tRNA and 10 μg of poly A+ RNA, vacuum-dried and resuspended in 128 μl of DIGeasy hybridization buffer (Roche Diagnostics GmbH, Mannheim, Germany) containing 1% BSA. The hybridization mix was incubated at 100° C. for 2 min followed by 37° C. for 30 min and then added to the chip. Before hybridization, the glasses were rehydrated over a bath of hot double-distilled water and baked at 80° C. for 4 hours followed by prehybridization with DIGeasy hybridization buffer containing 1% BSA for 1 hour at 42° C. The slides were then inserted into a GeneTAC Hybridization Station (Genomic Solution) and hybridized according to the following protocol: Adding the hybridization mix at 50° C., followed by hybridization with labeled target at 44° C. for 3 h, 42° C. for 3 h and 40° C. for 12 h with agitation. After the hybridization, all washing steps were performed at 24° C. in the same robot in the following order: 2×SSC, 0.1% SDS for 5 times, 1×SSC for 5 times and finally held in 0.1×SSC. The slides were air-dried and scanned using a GenePix 4000B scanner (Axon instruments Inc., Union City, Calif.). Image segmentation and spot quantification was performed with ImaGene software (Biodiscovery, Marina Del Rey, Calif.).

Microarray Data Processing.

[0169] Local background median was subtracted from each spot. The log2-transformed ratios (Cy3 intensity/Cy5 intensity) were plotted versus the mean of the log2 intensities. The ratios were normalized using the limma package (86). For comparison between two samples, t-test was used to exam the differential expression at the 5% individual significance level. Multiple test correction was done using the false discovery rate method (87).

In situ Hybridization,

[0170] Non-radioactive and radioactive in situ hybridization were done as previously described (26, 88).

Production of Antibodies and Western Blotting

[0171] The two GlomBase dendrin clones were both predicted in the 3′ UTR region. We followed the prediction of the rat dendrin cDNA sequence (89) to generate a pair of PCR primers (5′-TCC AAG CTG TTG GTG ATT GA-3′ and 5′-CAG TGG CAG AGT TGG AAT TG-3′) that were used to amplify a full length mouse dendrin cDNA sequence from a kidney cDNA library template (Clonetech). The amplified fragment was cloned into a TOPO TA cloning vector (Invitrogen) and sequence verified in multiple clones.

[0172] For dendrin antigen and antibody production, we chose to express amino acid residues 55-384 from pET-28a(+) expression vector (Novagen) transfected into BL21 (DE3) cells. Production of a 6 His-tag fusion protein was induced by IPTG. Protein purification involved the following steps: 1) cell lysis with lysozyme and sonication, 2) pelleting of inclusion bodies (10,000×g for 30 min), 3) solubilization in 8 M urea, and 4) purification on sequential S-sepharose ion exchange and sephadex S-200 gel filtration columns. The purified recombinant protein was used to raise polyclonal antibodies in two NZW rabbits using standard protocols (SVA, Uppsala, Sweden).

[0173] For western blotting, tissue samples (kidney, brain, liver, heart, spleen, lung, and skeletal muscle) were collected from adult mice. From kidney, glomeruli were isolated using Dynabeads (45). Tissue samples were homogenized on ice with a manual grinder in homogenization buffer (100 mM NaCl, 10 mM Tris, ph 7.5, 1 mM EDTA, 1 mM PMSF with proteinase inhibitors), and solubilized in RIPA buffer (1% Triton X-100, 1% sodium deoxycholate, 0.1% SDS, 158 mM NaCl, 10 mM Tris, ph 7.5, 1 mM EGTA, 1 mM PMSF with proteinase inhibitors). Also, COS-7-cells transiently expressing full-length dendrin or intracellular part of nephrin (used as a control) were prepared for Western analysis. Ten micrograms of total protein were separated on 10% polyacrylamide gel, and transferred into polyvinyl difluoride membrane. After 1 h incubation at room temperature (RT) in blocking solution (5% dry milk powder, 3% casein enzymatic hydrolysate, 1% BSA, 0.1% tween-PBS), the membrane was blotted either with the anti-dendrin antiserum (diluted 1:2000 in blocking solution) or pre-immune serum for overnight (+4° C.). Then, the membrane was washed in 0.1% tween-PBS for 30min (RT) followed by incubation in HRP-conjugated goat anti-rabbit-IgG (Dako). Peroxidase activity was detected with Western Chemiluminence reagent (PerkinElmer Life Sciences).

Immunohistochemistry and Immunoelectron Microscopy Analyses

[0174] For immunohistochemical analysis, kidney tissue samples from 3-week old mice were placed in cryoprotectant medium (Tissue Tek, Sakura), and frozen in liquid nitrogen. Cryosections (10 μm) were fixed in acetone for 20 min (−20° C.), and blocked in 5% normal goat serum for 30 min (RT). Then, the sections were incubated either in anti-dendrin antiserum (1:1000 in 0.5% normal goat serum) or preimmune serum for 1 h (RT) followed by 30 min incubation (RT) in FITC-labeled anti-rabbit IgG (Jackson ImmunoResearch Laboratories). Each incubation was followed by three 5-minute washes in PBS. In addition, COS-7 cells transfected transiently with full-length dendrin were prepared for immunofluorescence studies. Microscopic observations were performed with a standard Leica DM RX light microscope.

[0175] Immuno-electron microscopy using rabbit polyclonal antiserum against dendrin antiserum was done carried out essentially as described (90).

Construction and Large-Scale Sequencing of High-Complexity Mouse Glomerulus cDNA Libraries.

[0176] Using a magnetic bead perfusion method (45), highly purified kidney glomeruli were isolated from approximately 100 adult and 400 newborn mice in order to generate sufficient quantities of total RNA (approximately 400 μg from each group of glomeruli) for the synthesis of high-complexity cDNA libraries. Two standard oligo dT-primed cDNA libraries were generated from the newborn and adult glomerular RNA, respectively. In order to facilitate the identification of rare transcripts, two normalized libraries were also generated from the standard adult library. In the normalized libraries, high-abundance RNA transcripts were suppressed to different degrees (FIG. 1A). Test sequencing of 96 random clones from each library and analysis of the result in comparison with the Incyte Inc. mouse EST database indicated that the glomerular libraries were of high complexity. The analysis also provided an estimate of the number of sequences required to approach saturation in a large-scale sequencing effort. Based on these estimates, we attempted a total of 15,627 sequence reads from the four libraries, which provided 14,171 sequences of 500-800 bp length (91% readability). After vector trimming, a total of 13,368 cDNA sequences remained that were longer than 100 bp remained (data for the individual libraries shown in Table 1). Blast searches against the ENSEMBL mouse gene predictions (ENSEMBL mouse release 26.33b.1, 2004-09-03) resulted in 12,309 high quality hits (e-value <e⁻³⁰, alignment identity >85%) representing 6,053 different genes. The 13,368 cDNA sequences and their gene annotations were collected in a database, GlomBase (available as supplementary information online (http://www.mbb.ki.se/matrix/cbhome.htm) (See Table 14). 942 sequences did not match ENSEMBL annotated genes, but matched the mouse genome and may therefore represent putative novel gene transcripts, or contaminations by genomic DNA (See Table 17).

[0177] The gene and EST representation in the individual libraries is shown in FIG. 1A. To evaluate the quality of the cDNA library normalization procedure, we studied the distribution of a number of housekeeping genes among the different libraries. As shown in FIG. 1B, the relative abundances of housekeeping gene transcripts were decreased in the normalized libraries compared to the standard library. This shows that the normalization procedure suppressed the representation of high abundance and/or ubiquitously expressed transcripts.

The Glomerular Transcript Database (GlomBase) has a Unique Composition

[0178] Comparison with the ENSEMBL mouse gene predictions revealed that out of the total number of 28,055 hitherto annotated genes, 6,053 (21.6%) occur are present in GlomBase. Out of the 25,383 coding genes and 2,672 pseudogenes predicted in the mouse genome, 6,012 coding genes (23.7%) and 41 pseudogenes were found in GlomBase. Combined with the recent estimate of the coding capacity of the human genome, predicting only some 20,000-25,000 protein-coding genes (46), our data suggest that GlomBase, representing only three cell types, may contain cDNA sequences corresponding to 20-25% of the mammalian genome. In order to confirm that the content of GlomBase is enriched for glomerulus-expressed genes, and to estimate its coverage of the glomerular transcriptome, the 13,368 EST sequences of GlomBase were matched to mouse Unigene clusters (NCBI Mus musculus UniGene Build #144, 2005-01-20) and compared with the 109,633 EST sequences of 12 different cDNA libraries from mouse kidneys of different developmental stages and mouse strains (Table 2). We focused the comparison on transcripts known to be specific to, or enriched in podocytes, a unique epithelial cell type present only in the kidney glomerulus. Nephrin (Nphs1) (3), podocin (Nphs2) (4), podocalyxin (Podx1) (47), β-actinin-4 (Actn4) (30), synaptopodin (Synpo) (48), cyclin-dependent kinase inhibitor 1C (Cdkn1c) (49), protein-tyrosine phosphatase receptor o (Ptpn15, Ptpro) (50), Wilm's tumor protein Wt-1 (51), Transcription factor 21 (Tcf21, Pod1) (52) and forkhead box c2 (Foxc2) (53))transcripts encode structural proteins as well as cell-cycle regulators, receptors and transcription factors, and are hence expected to represent both high- and low-abundance podocyte mRNAs. The relative representation of all these genes was significantly higher (5 to 85-fold) in GlomBase compared to the kidney libraries (Table 2). Notably, the genes that are expressed exclusively in podocytes within the kidney showed an average higher relative representation in GlomBase (Nphs1, 45-fold; Nphs2, 15-fold; Podx1, 85-fold; Synpo, 4 hits in GlomBase, absent from kidney libraries; Ptpro, 49-fold; Wt-1, 12-fold) than the genes that are expressed also in other cell types of the kidney, albeit at lower levels than in the glomerulus (Actn4, 5-fold; Cdkn1c, 16-fold; Tcf21, 5-fold; Foxc2, 8-fold) (Table 2). Since glomeruli make up less than 10% of the kidney tissue, we expected to find more than 10-fold higher representation of the podocyte-specific cDNAs in GlomBase than in the whole kidney libraries. Indeed, the observed representation was higher than 10-fold, on average, ranging from 12 to 85 fold for the podocyte-specific transcripts.

[0179] The high representation of podocyte-specific transcripts confirms the high complexity and coverage of the glomerular transcriptome in GlomBase. The number of cDNA clones selected for sequencing was chosen to approach 90% saturation based on initial calculations. Extrapolation of the relationship between the number of EST sequences and the number of different ENSEMBL annotations in our standard cDNA libraries suggested a total complexity of about 7,100 genes, and hence, that approximately 85% (6,053/7,100) saturation was reached (data not shown). Based on the assumption that the glomerular cDNA libraries in total (>5 million clones) cover the glomerular transcriptome by 100%, we estimate that approximately 85% of the glomerular transcriptome is represented in GlomBase. In order to validate this estimate, we collected exhaustive information from the published literature on gene and protein expression patterns in the glomerulus, demonstrated with cellular resolution by either in situ hybridization or immunohistochemistry. Out of 170 such genes or proteins, we found 140 (82.4%) in GlomBase (Table 8). Based on these results, we conclude that GlomBase covers the glomerular transcriptome by more than 80%.

Construction of a Mouse Glomerulus cDNA Chip (GlomChip)

[0180] We amplified and printed the cDNA clones of GlomBase onto glass slides for transcriptional profiling experiments. We placed on the same chip a commercial unigene collection of 1,306 mouse cDNA clones from the IMAGE consortium (http://image.llnl.gov/), selected without tissue preference, as well as a small number of controls (see Methods). The overall design of GlomChip is illustrated in FIG. 2A. The printing of the entire clone set in triplicate on each slide, and the careful distribution of control spots, allowed for normalization and statistical evaluation of the result obtained from single chip hybridizations. A typical two-target hybridization is shown in FIG. 2B. The horizontal stripe of weak hybridization across each quadrant of 34×34 spots represents the position of the clones from normalized libraries, confirming that on average, these transcripts are of lower abundance than those represented by the standard libraries.

Transcriptional Profiling Using GlomChip Identifies Candidate Potential Novel Glomerulus- and Podocyte-Specific Genes

[0181] We used GlomChip for a series of experiments aiming at the identification of genes with glomerulus-enriched or glomerulus-specific expression (FIG. 2C,D). In a first experiment, we compared glomeruli isolated from 5-day-old mice kidney to the non-glomerulus fraction of kidney tissue that remained after magnetic separation of the glomeruli (FIG. 2C,D). A total of 937 GlomBase cDNA clones representing 356 different ENSEMBL genes and 64 ESTs were significantly upregulated more than 2-fold (category 1 genes in FIG. 2C; gene list available in Table 9) whereas 681 cones representing 354 different ENSEMBL genes and 34 ESTs were upregulated in non-glomerulus kidney tissue (category 2 genes in FIG. 2C; gene list available in Table 10). The list of category 1 genes contained most known podocyte markers, e.g. Nphs1, Nphs2, Ptpro, Wt-1, Cdkn1c, Podx1, Synpo, and many known markers for vascular endothelial cells, e.g. Pcam, Kdr, and Edg1. The concentration of vascular transcripts in the glomerulus was expected since vascular wall cells (endothelial cells and mesangial cells) together constitute about 85% of the glomerular cells, but only a small minority of the cells in the remaining kidney tissue. To further categorize the genes upregulated in the glomerulus, we compared the glomerulus transcript profile with that of capillary fragments isolated from mouse brain. These brain vessel fragments are composed to 90% of endothelial cells and pericytes (54). By this comparison, we subdivided the category 1 genes further into category 3 genes upregulated in glomeruli (430 cDNA clones representing 142 ENSEMBL genes and 35 ESTs; Table 11), category 4 genes upregulated in brain capillary fragments (67 cDNA clones, representing 34 genes and 1 EST; Table 12) and category 5 genes which were not significantly differentially expressed more than 2-fold between glomeruli and brain capillaries (440 cDNA clones, representing 180 ENSEMBLE genes and 28 ESTs; Table 13). As expected, most known podocyte markers collected into category 3, whereas known endothelial markers were found in category 4 and 5. For example, category 4 included many broad endothelial makers, such as Icam2, Cd34, Pecam, Flt1, Kdr and Edg1. While some of these are known to be expressed in glomerular endothelial cells, their expression is apparently higher in brain capillaries.

[0182] The category 3 genes represent candidate specific markers for any of the three cell types of the glomerulus. To assign these genes further to the individual glomerular cell types, we FACS-sorted GFP-positive podocytes from mice in which GFP expression was activated from the Z/EG transgene by Cre-recombinase expressed under the control of the podocin (Nphs2) promoter (55) (FIG. 3A). Glomeruli were isolated by Dynabead perfusion from 8-day-old podocin-Cre;Z/EG mice (FIG. 3B), and enzymatically digested into single cell suspensions (FIG. 3C). Before sorting, the frequency of GFP-positive cells was 2-5% (FIG. 2D, 3D). After sorting (FIG. 2E, 3E), the GFP-negative fraction contained <0.07% GFP-positive cells. Due to limited cell numbers in the sorted GFP-positive fraction these cells were all used for RNA preparation, and the percentage of GFP-positive cells was therefore not determined. RNA was extracted from 15,000 GFP-positive cells obtained from 3 mice, and from the same number of GFP-negative cells, and used for GlomChip analysis. This resulted in the further subdivision of the category 3 genes into those upregulated in GFP-positive cells (category 6 genes, podocyte-expressed, 138 cDNA clones, 48 different ENSEMBL genes and 11 ESTs; Table 3), and those upregulated in GFP-negative cells (category 7 genes, non-podocyte glomerular genes, 60 cDNA clones, 18 different ENSEMBL genes; Table 4), and those not significantly differentially expressed more than 2-fold between GFP+ and GFP− negative cells (category 8 genes, 233 cDNA clones, 76 different ENSEMBL genes and 24 ESTs) (Table 5).

[0183] Whereas the GlomChip IMAGE clones present on the GlomChip represent 1164 different genes (19.2% of the number of different GlomBase genes), only 33 IMAGE genes fell into category 1 (9.3% compared to GlomBase), whereas while 119 IMAGE genes fell into category 2 (33.6% compared to GlomBase) (FIG. 2D). This difference was expected since a “random” set of genes would be more likely to represent transcripts expressed in abundant tissue, such as whole kidney, than in scarce cell types, such as glomerular cells. Accordingly, the IMAGE set contributed only a single gene each to the most glomerulus-specific gene categories 6 and 7.

[0184] Category 6 genes represent candidate podocyte-specific transcripts. Indeed, most known podocyte-specific transcripts (e.g. Nphs1, Nphs2, Ptpro, Wt1, Synpo, Podx1) fell among the top 20 genes in category 6, and several other genes known to be highly expressed in podocytes (Cdnk1c, Foxc2, Microtubule-associated protein tau) were also present in category 6 (Table 3). Category 7 genes instead include several known mesangial cell and juxtaglomerular markers, such as renin1 (Ren1), insulin-like growth factor-binding protein 5 (Igfbp5), integrin alpha 8 (Itga8), Protease nexin I (Serpine2, PN-1), and mesoderm-specific transcript (Mest) (Table 4), and therefore represent a list of potential mesangial cell markers. Category 7 genes may also include markers that are specific to glomerular endothelial cells in comparison with other types of endothelium.

Identification of New Novel Glomerulus-Specific Genes

[0185] In order to establish the cellular expression of some of the novel candidates for podocyte- and non-podocyte-specific glomerular transcripts (selected from the category 6 and 7 lists) we employed in situ hybridization. FIG. 4A shows by non-radioactive in situ hybridization the expression of 5 novel podocyte markers, Semaphorin sem2 (Sem2), Rhophilin 1 (Rhpn1), Cbp/p300-interacting transactivator 2 (Cited 2), Protease inhibitor 15 (Pi15), and Gene X, in comparison with 3 known podocyte markers, Nphs2, Podx1 and Cdkn1c. FIG. 4B shows the expression of 3 novel mesangial markers, secreted frizzled-related protein 2 (Sfrp2 ), Aldo-keto reductase family 1 member B7 (Akr1b7), and Lim domain only protein 7 (Lmo7) in comparison with known mesangial and juxta-glomerular apparatus (JGA) transcripts Igfbp5 and Ren1. FIG. 4B also shows the expression of endomucin (Emcn), a vascular endothelial marker, in glomerular endothelial cells. In instances where non-radioactive in situ hybridization failed, we employed radioactive in situ hybridization. By this method, we localized 3 additional transcripts to podocytes; Schwannomin interacting protein 1 (Schip1), Clone52 and dendrin, and one additional transcript to mesangial/endothelial cells; EH-domain containing protein 3 (Ehd3) (FIG. 4C).

[0186] One should note that although the novel podocyte and mesangial/endothelial markers are restricted in their cellular expression in the kidney, extra-glomerular expression sites for some of these genes have been reported. In some cases, we confirmed the extra-renal expression sites by in situ hybridization, Northern blotting and EST database mining. However, by their extra-renal expression, the novel glomerular cell markers do not distinguish from known ones (e.g. Nphs1, Nphs2 and Podx1) all of which show restricted sites of extra-renal expression. Below follow brief commentaries on some of the available information regarding the above-mentioned novel glomerular cell markers:

[0187] Rhophilin 1 was originally identified as a small GTPase Rho binding protein using a yeast two-hybrid system (56). Expression in germ cells in the mouse testis and localization in the principal piece of the spermatozoa has been documented (57), but its function is unclear.

[0188] Semaphorin sem 2 cDNA sequences have previously been identified only in an human adult spleen library, but nothing has been reported further on its expression pattern or function. Semaphorins are members of a large, highly conserved, family of molecular signals that were identified initially through their role in axon guidance (58), and later, in angiogenesis (59, 60).

[0189] Protease inhibitor 15 has previously been identified as a trypsin inhibitor secreted by human glioblastoma cells (61).

[0190] Cbp/p300-interacting transactivator 2 (Cited2; or Melanocyte-specific gene 1-related gene1) transcripts have previously been identified in human endothelial cell and neonatal brain (62). It has been proposed that Cited2 acts as a negative regulator of hypoxia-inducible factor (HIF)-1-alpha through competitive binding to CBP/p300. Cited2 knockout mice die at late gestation (63).

[0191] Dendrin has previously been identified as a brain-specific gene (64) of unknown function.

[0192] “Clone 52” is newly annotated gene (ENSMUSG00000050010) predicted to encode a transmembrane protein. Its expression pattern has not previously been described.

[0193] Schwannomin interacting protein I was originally identified as a partner of schwannomin, a candidate gene for type II neurofibromatosis, using yeast two-hybrid methodology (65). Schip 1 may regulate the activity of schwannomin, however, its exact physiological function is unclear.

[0194] “Gene X” is a GlomBase EST (SEQ ID NO: 2043; MTG_{—}602467023) without current annotation or prior information about its protein coding capacity or expression.

[0195] Eh domain-containing protein 3 was originally identified as a homologue of human EHD1 (testilin/HPAST) in a human fetal brain cDNA library (66). It has been proposed that EHD3 together with EHD1 may be involved in regulating the movement of recycling endocytotic vesicles along with microtubule-dependent tubular tracks (67).

[0196] Secreted frizzled-related protein 2 (Sfrp2) or secreted apoptosis related protein 1 (SARP1) was identified by differential display as a gene that is expressed in quiescent but not in exponentially growing 10T1/2 cells (68) and has been reported that acts as soluble modulators of Wnt signaling (69). The expression of sFRP2 in aggregating mesenchyme and glomerulus has been reported (70).

[0197] Aldo-keto reductase family 1 member B7 or mouse vas deferens protein was initially described as a major secretary protein of the vas deferens (71). A role in steroidogenic activity has been proposed.

[0198] LIM domain only protein 7 (LMO7) was identified in a human pancreatic cDNA library and encodes a single LIM domain (72). A possible role in assembling adhesion junction in epithelial cells has been reported (73), however functional roles in vivo remain unclear.

Temporal Expression Patterns of Glomerular Cell Markers During Nephron Development

[0199] We next compared the expression of the novel glomerular markers at different stages of glomerular development. None of the podocyte markers was expressed during the comma-shaped stage of nephron development, i.e. before morphological distinctions can be made between prospective podocytes and tubular epithelium (FIG. 5). Morphologically distinguishable podocytes appear during the S-shaped stage of nephron development. At this stage, the known podocyte markers Nphs2, Podx1 and Cdkn1c began to appear in developing podocytes, together with the novel markers Sem2, P15 and gene X. During the capillary loop and mature stages, all podocyte markers were expressed (FIG. 4C and 5). PI15 was the only marker showing a peak of expression during S-shaped and capillary loop stages followed by downregulated expression (FIG. 5), suggesting that this protease inhibitor might have a particularly important role during development of the glomerulus.

[0200] The previously known as well as the novel mesangial markers were expressed first during the capillary loop and mature stages, with the exception of Sfrp2, which was first expressed in the epithelium of the developing nephron during comma and S-shaped stages, and then switched to the mesangium during the capillary loop and mature stages (FIG. 5). In addition to the mesangial cells, expression of all these markers were also noticed in smooth muscle cells of the feeding and draining arterioles in the juxtaglomerular region.

Dendrin Localizes to the Podocyte Foot Process Region

[0201] The podocytes are atypical epithelial cells in the sense that they form foot processes linked by slit diaphragms rather than typical epithelial junctions. The critical role of the foot process and the slit diaphragms for filtration has been well established, and hence it is important to establish if the novel podocyte marker genes encode proteins that play a role in the establishment, function and maintenance of these structures. As a first step towards this goal, we have started to systematically generate antibodies to these proteins and map the protein expression sites and subcellular distriubution. Here, we report the example of dendrin, predicted as a cytoplasmic protein without apparent homology to other proteins or protein domains. A mouse dendrin cDNA clone was derived by PCR and expressed in order to generate recombinant his-tagged dendrin protein. This protein was used to generate polyclonal rabbit antisera. The specificity of the antiserum was confirmed by transfecting COS-7 cells with full length dendrin cDNA and control cDNA (data not shown). Western blotting (FIG. 6D) and immunohistochemistry (FIG. 6B) on E18.5 mouse kidneys localized the dendrin protein exclusively to glomeruli within the kidney, and high power views revealed a staining pattern consistent with the distribution of podocytes (FIG. 6B inset). The overall distribution of the dendrin protein was in accordance with the distribution of its mRNA (FIG. 6A and inset). By immuno-electron microscopy, the dendrin protein was further sub-localized to the inner leaflet of the foot process membrane (FIG. 6C) and was concentrated to regions where the foot processes appose and are bridged by slit diaphragms (FIG. 6C, arrows).

Discussion

[0202] In spite of a diversity of etiologies of kidney diseases, the glomerulus is often the primary target of the pathological process. Proteinuria, uniform or focal expansion of the mesangial matrix, thickening of the GBM and effacement of podocyte foot processes are frequently observed pathologic hallmarks of glomerular disease. The inability of the terminally differentiated podocytes to proliferate and repopulate a damaged glomerulus is believed to contribute to glomerular scarring (74), possibly by triggering changes in the proliferation and/or matrix deposition by endothelial and mesangial cells. The intimate interplay and interdependence between the three glomerular cell types during glomerular development is, therefore, also reflected in pathogenic processes, causing difficulties in defining primary molecular and cellular pathogenic events and cause-effect relationships. Since the renal diseases of glomerular origin constitute a huge burden to society and because the prevalence of glomerular disease is increasing, there is an urgent need for a deeper understanding of glomerular development and biology, and insights into the different mechanisms of glomerular disease. We need to identify new therapeutic drug targets, as well as markers that improve disease classification and help in monitoring disease progression and response to therapy. Understanding the molecular basis of glomerular function and injury is a prerequisite for such advances. Molecular profiling of the glomerulus is likely to contribute to both identification of novel diagnostic markers and candidate drug targets.

[0203] The present glomerular profiling study has revealed extensive new information about genes and proteins that, in the kidney, are preferentially or specifically expressed in cells of the glomerular filtration apparatus. First, a unique glomerulus isolation technique was used to collect high quality RNA from mouse glomeruli to allow construction of specific glomerular cDNA libraries. Importantly, these libraries were shown to represent both high and low abundancy transcripts from all developmental stages of the glomerulus. Second, a large-scale cDNA sequencing effort generated GlomBase, a database of about 6,053 glomerulus-expressed genes with over 80% coverage of the glomerular transcriptome. GlomBase is accessible online (http://www.mbb.ki.se/matrix/cbhome.htm). This database will be continuously updated as additional glomerular transcripts are identified, such as with global microarrays or in other studies. This database should be useful to investigators interested in the renal filtration system.

[0204] Third, spotted microarrays (GlomChip) containing the GlomBase cDNA collection were generated and used to perform a series of hybridizations leading to the identification of over 300 novel glomerular transcripts, most of the corresponding protein products, as yet, having an unknown function. Fourth, in situ hybridization and immunostaining procedures localized many of the novel transcripts to one of the three glomerular cell types, i.e. podocytes, mesangial and endothelial cells. Fifth, detailed analysis of one novel podocyte marker protein, dendrin, was shown by immunelectron microscopy to be associated with the podocyte foot processes. We are convinced that the results of this study will provide new tools and opportunities for kidney research, such as for addressing various questions of glomerular development and biology, and providing new unique means for studying the development and pathomechanisms of glomerular disease.

[0205] While transcription profiling studies have previously been performed on healthy and diseased kidneys, (39-41, 43, 75-79), including isolated glomeruli (80, 81), only two previous studies have, to our knowledge, reported efforts to map the glomerular transcriptome in comparison to other parts of the nephron (42, 44). When comparing the present results with those of the two earlier reports, it is apparent that the sets of glomerulus-enriched genes predicted independently by the three studies that show a relatively limited overlap (FIG. 7). This cannot be explained only by different gene representation on the arrays, or bias in the SAGE method, as approximately 60% of the gene transcripts predicted to be upregulated in the glomerulus by both of the other studies (65/119 and 88/143 respectively) are present in GlomBase, however, many of these genes were not found by us to be statistically significantly overexpressed >2-fold in the glomerulus (we even found about 20% of them to be downregulated in glomeruli relative to the rest of kidney). Some of the discrepancy therefore likely reflects differences in cut-off thresholds between the studies. For example, many of the genes listed by the other studies fall just below our cut-off for fold difference or statistical significance (for example Vegfa, which is known to be expressed by podocytes, see FIG. 7). It is also possible that some of the discrepancy relates to species differences in the studies (human vs mouse). Other possible confounding variables include differences in tissue handling, which may induce selective degradation of RNA species, and in target preparation. Notably, the SAGE study (42) failed to detect the podocyte transcript nephrin, whereas the microarray study by Higgins et al. (44) failed to identify several known podocyte markers, including Nphs2, which is abundantly expressed in podocytes. Positioning 170 literature-validated markers for glomerular cells (full list and references available as Supplementary Information, Table S1) in the diagram of FIG. 7 shows that our study accurately predicts more of the glomerular markers than the two other studies combined. Importantly, none of the new podocyte markers validated in this study by in situ hybridization were found in the previous reports.

[0206] Undoubtedly, the identification of numerous novel highly glomerulus-associated or -specific genes will eventually increase our understanding of glomerulus biology and mechanisms of glomerular disease. The mutations identified thus far that cause hereditary monogenic glomerular diseases encoded glomerulus-specific or -associated proteins with critical roles in glomerulus development and function. Thus, the pathological findings in Alport and congential nephrotic syndromes have provided unique insight into the molecular nature and properties of the GBM and the podocyte slit diaphragm. The present in situ hybridization analyses revealed the existence of several novel podocyte protein-coding mRNAs, as well as additional mRNAs in mesangial cells. The more detailed expression analysis and immuno-electron microscopic localization of the novel podocyte protein dendrin to the slit diaphragm region, imply that this intracellular protein, that was previously considered to be brain specific, also has a role in renal filtration. To understand the physiologic roles of the novel glomerular proteins, they also need to be explored individually, e.g. by mutagenesis in animal models. Interestingly, some of the glomerular genes identified in this study, such as adenylate cyclase 1 and Foxc2, that also have restricted extrarenal expression, have already been inactivated in mice, and we have recently shown that these mutants develop both mild and severe renal phenotypes (Patrakka et al. and Takemoto et al., manuscripts in preparation). Accordingly, it is very likely that many of the other novel glomerular proteins identified in this study are involved in glomerular disease, both as primary targets and bystanders.

[0207] It is now a major task to examine the physiological role and disease involvement of the many novel glomerulus proteins using animal and cellular model systems, as well as pathologicalal specimens. To study the function of such a large number of genes in mice using gene targeting in embryonic stem cells is a huge task, but an attractive alternative is to apply the approach of gene knock-down using morpholino oligonucleotides in zebrafish embryos. Zebrafish embryos develop a fully functioning mesonephros containing a single glomerulus already 48-72 hours post fertilization.

[0208] Global transcript profiling of kidney diseases has already facilitated advancement of the categorization of renal dysfunction (76), and it is likely to help in predicting individual responsiveness to therapy, delineation of molecular pathways controlling renal physiological and pathological processes, including identification of putative future molecular targets of pharmacological therapy. From the point of view of glomerular disorders, renal tissue heterogeneity and scarcity of the relevant cell types will inevitably confound data interpretation. It is therefore important to make sure that the profiling platform meets the demands required for transcriptome analysis in the relevant cell types. The present study provides an important step towards such goals with regard to mouse models of glomerular diseases.

### REFERENCES

[0209] 1. Deen, W. M. 2004. What determines glomerular capillary permeability? J Clin Invest 114:1412-1414.
[0210] 2. Barker, D., Hostikka, S. L., Zhou, J., Chow, L. T., Oliphant, A. R., Gerken, S. C., Gregory, M. C., Skolnick, M. H., Atkin, C. L., and Tryggvason, K. 1990. Identification of mutations in the COL4A5 collagen gene in Alport syndrome. Science 248:1224-1227.
[0211] 3. Kestilä, M., Lenkkeri, U., Männikkö, M., Lamerdin, J., McCready, P., Putaala, H., Ruotsalainen, V., Morita, T., Nissinen, R., Herva, R., et al. 1998. Positionally cloned gene for a novel glomerular protein—nephrin—is mutated in congenital nephrotic syndrome. Mol. Cell 1:575-582.
[0212] 4. Boute, N., Gribouval, O., Roselli, S., Bennessy, F., Lee, H., Fushshuber, A., Dahan, K., Gubler, M. C., Niaudet, P., and Antignac, C. 2000. NPHS2, encoding the glomerular protein podocin, is mutated in autosomal recessive steroid-resistant nephrotic syndrome. Nat Genet. 24:349-354.
[0213] 5. Somlo, S., and Mundel, P. 2000. Getting a foothold in nephrotic syndrome. Nat Genet 24:333-335.
[0214] 6. Haber, D. A., Buckler, A. J., Glaser, T., Call, K. M., Pelletier, J., Sohn, R. L., Douglass, E. C., and Housman, D. E. 1990. An internal deletion within a 11p13 zinc finger gene contributes to the development of Wilm's tumor. Cell 61:1257-1269.
[0215] 7. Mochizuki, T., Lemmink, H. H., Mariyama, M., Antignac, C., Gubler, M. C., Pirson, Y., Verellen-Dumoulin, C., Chan, B., Schroder, C. H., Smeets, H. J., et al. 1994. Identification of mutations in the alpha3(IV)and alpha4(IV) collagen genes in autosomal recessive Alport syndrome. Nat Genet 8:77-82.
[0216] 8. Zenker, M., Aigner, T., Wendler, O., Tralau, T., Muntefering, H., Fenski, R., Pitz, S., Schumacher, V., Royer-Pokora, B., Wuhl, E., et al. 2004. Human laminin beta2 deficiency causes congenital nephrosis with mesangial sclerosis and distinct eye abnormalities. Hum Mol Genet 13:2625-2632.
[0217] 9. Dreyer, S. D., Zhou, G. Baldini, A., Winterpacht, A., Zabel, B., Cole, W., Johnson, R. L., and Lee, B. 1998. Mutations in LMX1B causes abnormal skeletal patterning and reanal dysplasia in nail patella syndrome. Nat Genet 19:47-50.
[0218] 10. Klamt, B., Koziell, A., Poulat, F., Wieacker, P., Scambler, P., Berta, P., and Gessler, M. 1998. Frasier syndrome is caused by defective alternative splicing of WT1 leading to an altered ratio of WT1±KTS splice isoform. Hum Mol Genet 7:709-714.
[0219] 11. Tryggvason, K., and Wartiovaara, J. 2005. How does the kidney filter plasma? Physiology 20:96-1001.
[0220] 12. Hudson, B. G, Tryggvason, K., Sundaramoorthy, M., and Neilson, E. G 2003. Alport's syndrome, Goodpasteur's syndrome, and type IV collagen. New Engl. J Med. 348:2543-2556.
[0221] 13. Miner, J. H., Patton, B. L., Lentz, S. I., Gilbert, D. J., Snider, W. D., Jenkins, N. A., Copeland, N. G., and Sanes, J. R. 1997. The laminin alpha chains: expression, developmental transitions, and chromosomal locations of alpha 1-5, identification of heterotrimeric laminins 8-11, and cloning of a novel alpha3 isoform. J Cell Biol 137:685-701.
[0222] 14. Pavenstadt, H., Kriz, W., and Kretzler, M. 2003. Cell biology of the glomerular podocyte. Physiol Rev 83:253-307.
[0223] 15. Rodewald, R., and Karnowsky, M. J. 1974. Porous substructure of the glomerular slit diaphragm in the rat and mouse. J Cell Biol 60:423433.
[0224] 16. Wartiovaara, J., Öfverstedt, L. G., Koshnoodi, J., Zhang, J., E., M., Sandin, S., Ruotsalainen, V., Cheng, R. H., Jalanko, H., Skoglund, U., et al. 2004. Nephrin strands contribute to a porous slit diaphragm scaffold as revealed by electron tomography. J Clin Invest 114:1475-1483.
[0225] 17. Shih, N. Y., Li, J., Karpitskii, V., Nguyen, A., Dustin, L. M., Kanagawa, O., Miner, J. H., and Shaw, A. S. 1999. Congenital nephrotic syndrome in mice lacking CD2-associated protein. Science 286:312-315.
[0226] 18. Schnabel, E., Anderson, J. M., and Farquhar, M. G. 1990. The tight junction protein ZO-1 is concentrated along slit diaphragms of the glomerular epithelium. J Cell Biol 111:1255-1263.
[0227] 19. Inoue, T., Yaoita, E., Kurihara, H., Shimizu, F., Sakai, T., Kobayashi, T., Ohsohiro, K., Kawachi, H., Okada, H., Suzuki, H., et al. 2001. FAT is a component of glomerular slit diaphragms. Kidney Int. 59:1003-1012.
[0228] 20. Sellin, L., Huber, T. B., Gerke, P., Quack, I., Pavenstadt, H., and Walz, G. 2003. NEPH1 defines a novel family of podocin interacting proteins. FASEB J. 17:115-117.
[0229] 21. Liu, G. Kaw, B., Kurfis, J., Rahmanuddin, S., Kanwar, Y. S., and Chugh, S. S. 2003. Neph1 and nephrin interaction in the slit diaphragm is an important determinant of glomerular permeability. J Clin Invest 112:209-221.
[0230] 22. Barletta, G. M., Kovari, I. A., Verma, R. K., Kerjaschki, D., and Holzman, L. B. 2003. Nephrin and Neph1 co-localize at the podocyte foot process intercellular junction and form cis hetero-oligomers. J Biol Chem 278:19266-19271.
[0231] 23. Reiser, J., Kriz, W., Kretzler, M., and Mundel, P. 2000. The glomerular slit diaphragm is a modified adherence junction. J Am Soc Nephrol 11:1-8.
[0232] 24. Tsukaguchi, H., Sudhakar, A., Le, T. C., and al., e. 2002. NPHS2 mutations in late-onset focal segmental glomerulosclerosis. J Clin Invest 110: 1659-1666.
[0233] 25. Kim, J. M., Wu, H., Green, G., and al., e. 2003. CD2-assoiciated protein haploinsufficiency is linked to glomerular disease susceptibility. Science 300:1298-1300.
[0234] 26. Putaala, H., Soininen, R., Kilpelainen, P., Wartiovaara, J., and Tryggvason, K. 2001. The murine nephrin gene is specifically expressed in kidney, brain and pancreas: inactivation of the gene leads to massive protenuria and neonatal death. Hum Mol Genet 10:1-8.
[0235] 27. Donoviel, D. B., Freed, D. D., Vogel, H., Potter, D. G., Hawkins, E., Barrish, J. P., Mathur, B. N., Turner, C. A., Geske, R., Montgomery, C. A., et al. 2001. Proteinuria and perinatal lethality in mice lacking NEPH1, a novel protein with homology to NEPHRIN. Mol Cell Biol 21:4829-4836.
[0236] 28. Ciani, L., Patel, A., Allen, N. D., and Ffrench-Constant, C. 2003. Mice lacking the giant protocadherin mFAT1 exhibit renal slit junction abnormalities and a partially penetrant cyclopia and anophtalmia phenotype. Mol Cell Biol 23:3575-3582.
[0237] 29. Shaw, A. S., and Miner, J. H. 2001. CD2-associated protein and the kidney. Curr Opin Nephrol Hypertens 10: 19-22.
[0238] 30. Kaplan, J. M., Kim, S. H., North, K. N., Rennke, H., Correia, L. A., Tong, H. Q., Mathis, B. J., Rodriguez-Perez, J. C., Allen, P. G., Beggs, A. H., et al. 2000. Mutations in ACTN4, encoding alpha-actinin-4, cause familial focal segmental glomerulosclerosis. Nat. Genet. 35:408-417.
[0239] 31. Kos, C. H., T. C., L., Sinha, S., and al., e. 2003. Mice deficient in alpha-actinin-4 have severe glomerular disease. J Clin Invest 111: 1683-1690.
[0240] 32. Michaud, J. L., Lemieux, L. I., Dube, M., and al., e. 2003. Focal and segmental glomerulosclerosis in mice with podocyte-specific expression of mutant alpha-actinin-4. J Am Soc Nephrol 14:1200-1211.
[0241] 33. Breier, G., Albrecht, U., Sterrer, S., and Risau, W. 1992. Expression of vascular endothelial growth factor during embryonic angiogenesis and endothelial cell differentiation. Development 114:521-532.
[0242] 34. Maynard, S. E., Min, J. Y., Merchan, J., and al., e. 2003. Excess placental soluble fms-like tyrosine kinase 1 (sFlt1) may contribute to endothellial dysfunction, hypertension, and proteinuria in preeclamsia. J Clin Invest 111:649-658.
[0243] 35. Sugimoto, H., Hamano, Y., Charytan, D., and al., e. 2003. Neutralization of circulating vascular endothelial growth factor (VEGF) by anti-VEGF antibodies and soluble VEGF receptor 1 (sFlt-1) induces proteinuria. J Biol Chem 278:12605-12608.
[0244] 36. Eremina, V., Sood, M., Haigh, J., Nagy, A., Lajoie, G. Ferrara, N., Gerber, H. P., Kikkawa, Y., Miner, J. H., and Quaggin, S. E. 2003. Glomerular-specific alterations of VEGF-A expression lead to distinct congenital and acquired renal diseases. J Clin Invest 111:707-716.
[0245] 37. Schiffer, M., Schiffer, L. E., Gupta, A., and al., e. 2002. Inhibitory smads and TGF-beta signaling in glomerular cells. J Am Soc Nephrol 13:2657-2666.
[0246] 38. Satchell, S. C., Abnderson, K. L., and Mathieson, P. W. 2004. Angiopoietin 1 and vascular endothelial growth factor modulate human glomerular endothelial cell barrier properties. J Am Soc Nephrol 15:566-574.
[0247] 39. Virlon, B., Cheval, L., Buhler, J. M., Billon, E., Doucet, A., and Elalouf, J. M. 1999. Serial microanalysis of renal transcriptomes. Proc Natl Acad Sci USA 96:15286-15291.
[0248] 40. Elalouf, J. M., Aude, J. C., Billon, E., Cheval, L., Doucet, A., and Virlon, B. 2002. Renal transcriptomes: segmental analysis of differential expression. Exp Nephrol 10:75-81.
[0249] 41. El-meanawy, M. A., Schelling, J. R., Pozuelo, F., Churpek, M. M., Ficker, E. K., Iyengar, S., and Sedor, J. R. 2000. Use of serial analysis of gene expression to generate kidney expression libraries. Am J Physiol Renal Physiol 279:F383-392.
[0250] 42. Chabardes-Garonne, D., Mejean, A., Aude, J.-C., Cheval, L., Di Stefano, A., Gaillard, M.-C., Imbert-Teboul, M., Wittner, M., Balian, C., Anthouard, V., et al. 2003. A panoramic view of gene expression in the human kidney. Proc Natl Acad Sci USA 100:13710-13715.
[0251] 43. Yano, N., Endoh, M., Fadden, K., Yamashita, H., Kane, A., Sakai, H., and Rifai, A. 2000. Comprehensive gene expression profile of the adult human renal cortex: Analysis by cDNA array hybridization. Kidney Int. 57:1452-1459.
[0252] 44. Higgins, J. P. T., Wang, L., Kambham, N., Montgomery, K., Mason, V., Vogelmann, S. U., Lemley, K. V., Brown, P. O., Brooks, J. D., and van de Rijn, M. 2004. Gene expression in the normal adult human kidney assessed by comlementary DNA microarray. Mol Biol Cell 15:649-656.
[0253] 45. Takemoto, M., Asker, N., Gerhardt, H., Lundkvist, A., Johansson, B. R., Saito, Y., and Betsholtz, C. 2002. A new method for large scale isolation of kidney glomeruli from mice. Am. J. Pathol. 161:799-805.
[0254] 46. Consortium, I. H. G. S. 2004. Finishing the euchromatic sequence of the human genome. Nature 431:931-945.
[0255] 47. Doyonnas, R., Kershaw, D. B., Duhme, C., Merkens, H., Chelliah, S., Graf, T., and McNagny, K. M. 2001. Anuria, omphalocele, and perinatal lethality in mice lacking the CD34-related protein podocalyxin. J Exp Med 194:13-27.
[0256] 48. Mundel, P., Heid, H. W., Mundel, T. M., Kruger, M., Reiser, J., and LKriz, W. 1997. Synaptopodin: an actin-associated protein in telencephalic dendrites and renal podocytes. J Cell Biol 139:193-204.
[0257] 49. Hiromura, K., Haseley, L. A., Zhang, P., Monkawa, T., Durvasula, R., Petermann, A. T., Alpers, C. E., Mundel, P., and Shankland, S. J. 2001. Podocyte expression of the CDK-inhibitor p57 during development and disease. Kidney Int. 60:2235-2246.
[0258] 50. Wharram, B. L., Goyal, M., Gillespie, P. J., Wiggins, J. E., Kershaw, D. B., Holzman, L. B., Dysko, R. C., Saunders, T. L., Samuelson, L. C., and Wiggins, R. C. 2000. Altered podocyte structure in GLEPP1 (Ptpro)-deficient mice associated with hypertension and low glomerular filtration rate. J Clin Invest 106:1281-1290.
[0259] 51. Heathcott, R. W., Morison, I. M., Gubler, M. C., Corbett, R., and Reeve, A. E. 2002. A review of the phenotypic variation due to the Denys-Drash syndrome-associated germline WT1 mutation R362X. Hum Mutat 19:462-???
[0260] 52. Cui, S., Schwartz, L., and Quaggin, S. E. 2003. Pod1 is required in stromal cells for glomerulogenesis. Dev Dyn 226:512-522.
[0261] 53. Kume, T., Deng, K., and Hogan, B. L. 2000. Murine forkhead/winged helix genes Foxc1 (Mf1) and Foxc2 (Mfh1) are required for the early organogenesis of the kidney and urinary tract. Development 127:1387-1395.
[0262] 54. Enge, M., Bjarnegård, M., Gerhardt, H., Gustafsson, E., Kalén, M., Asker, N., Hammes, H.-P., Shani, M., Fässler, R., and Betsholtz, C. 2002. Endothelium-specific platelet-derived growth factor-B ablation mimics diabetic retinopathy. EMBO J. 21:4307-4316.
[0263] 55. Belteki, G., Haigh, J., Kabacs, N., Haigh, K., Sison, K., Costantini, F., Whitsett, J. A., Quaggin, S. E., and Nagy, A. 2005. Conditional and inducible transgene expression in mice through the combinatorial use of Cre-mediated recombination and tetracycline induction. Nucl Acids Res In press.
[0264] 56. Watanabe, G. Saito, Y., Madaule, P., Ishizaki, T., Fujisawa, K., Morii, N., Mukai, H., Ono, Y., Kakizuka, A., and Narumiya, S. 1996. Protein kinase N (PKN) and PKN-related protein rhophilin as targets of small GTPase Rho. Science 271:645-648.
[0265] 57. Nakamura, K., Fujita, A., Murata, T., Watanabe, G. Mori, C., Fujita, J., Watanabe, N., Ishizaki, T., Yoshida, O., and Narumiya, S. 1999. Rhophilin, a small GTPase Rho-binding protein, is abundantly expressed in the mouse testis and localized in the prinipal piece of the sperm tail. FEBS Lett 445:9-13.
[0266] 58. Tamagnone, L., and Comoglio, P. M. 2004. To move or not to move? Semaphorin signalling in cell migration. EMBO Reports 5:356-361.
[0267] 59. Serini, G, Valdembri, D., Zanivan, S., Morterra, G, Burkhardt, C., Caccavari, F., Zammataro, L., Primo, L., Tamagnone, L., Logan, M., et al. 2003. Class 3 semaphorins control vascular morphogenesis by inhibiting integrin function. Nature 424:391-397.
[0268] 60. Shoji, W., Isogai, S., Sato-Maeda, M., Obinata, M., and Kuwada, J. Y. 2003. Semaphorin3a1 regulates angioblast migration and vascular development in zebrafish embryos. Development 130:3227-3236.
[0269] 61. Koshikawa, N., Nakamura, T., Tsuchiya, N., Isaji, M., Yasumitsu, H., Umeda, M., and Miyazaki, K. 1996. Purification ans identification of a novel and four known serine proteinase inhibitors secreted by human glioblastoma cells. J Biochem 119:334-339.
[0270] 62. Shioda, T., Fenner, M. H., and Isselbacher, K. J. 1997. MSG1 and its related protein MRG1 share a transcription activating domain. Gene 204:235-241.
[0271] 63. Yin, Z., Haynie, J., Yang, X., Han, B., Kiatchoosakun, S., Restivo, J., Yuan, S., Prabhakar, N. R., Herrup, K., Conlon, R. A., et al. 2002. The essential role of Cited2, a negative regulator for HIF-1alpha, in heart development and neurulation. Proc Natl Acad Sci USA 99:10488-10493.
[0272] 64. Neuner-Jehle, M., Denizot, J. P., Borbely, A. A., and Mallet, J. 1996. Characterization and sleep deprivation-induced expression modulation of dendrin, a novel dendritic protein in rat brain neurons. J Neurosci Res 46:138-151.
[0273] 65. Goutebroze, L., Brault, E., Muchardt, C., Camonis, J., and Thomas, G. 2000. Cloning and characterization of SCHIP-1, a novel protein interacting specifically with spliced isoforms and naturally occuring mutant NF2 proteins. Mol Cell Biol 20:1699-1712.
[0274] 66. Pohl, U., Smith, J. S., Tachibana, I., Ueki, K., Lee, H. K., Ramaswamy, S., Wu, Q., Mohrenweiser, H. W., Jenkins, R. B., and Louis, D. N. 2000. EHD2, EHD3, and EHD4 encode novel members of a highly conserved family of EH domain-containing proteins. Genomics 63:255-262.
[0275] 67. Galperin, E., Benjamin, S., Rapaport, D., Rotem-Yehudar, R., Tolchinsky, S., and Horowitz, M. 2002. EHD3: a protein that resides in recycling tubular and vesicular membrane structures and interacts with EHD1. Traffic 3:575-589.
[0276] 68. Melkonyan, H. S., Chang, W. C., Shapiro, J. P., Mahadevappa, M., Fitzpatrick, P. A., Kiefer, M. C., Tomei, L. D., and Umansky, S. R. 1997. SARPs: a family of secreted apoptosis-related proteins. Proc Natl Acad Sci USA 94:13636-13641.
[0277] 69. Lescher, B., Haenig, B., and Kispert, A. 1998. sFRP-2 is a target of the Wnt-4 signaling pathway in the developing kidney. Dev Dyn 213:440-451.
[0278] 70. Morello, R., Zhou, G, Dreyer, S. D., Harvey, S. J., Ninomiya, Y., Thorner, P. S., Miner, J. H., Cole, W., Winterpacht, A., Zabel, B., et al. 2001. Regulation of glomerular basement membrane collagen expression by LMX1B contributes to renal disease in nail patella syndrome. Nat Genet 27:205-208.
[0279] 71. Taragnat, C., Berger, M., and Jean, C. 1988. Preliminary characterization, androgen-dependence and ontogeny of an abundant protein from mouse vas deferens. J Reprod Fertil 83:835-842.
[0280] 72. Putilina, T., Jaworski, C., Gentleman, S., McDonald, B., Kadiri, M., and Wong, P. 1998. Analysis of a human cDNA containing a tissue-specific alternatively spöliced LIM domain. Biochem Biophys Res Commun 252:433-439.
[0281] 73. Ooshio, T., Irje, K., Morimoto, K., Fukuhara, A., Imai, T., and Takai, Y. 2004. Involvement of LMO7 in the asssociation of two cell-cell adhesion molecules, nectin and E-cadherin, through afadin and alpha-actinin in epithelial cells. J Biol Chem 279:31365-31373.
[0282] 74. Kriz, W. 2003. Progression of chronic renal failure in focal segmental glomerulosclerosis: consequence of podocyte damage or of tuboluinterstitial fibrosis? Pediatr Nephrol 18:617-622.
[0283] 75. Sadlier, D. M., Connolly, S. B., Kieran, N. E., Roxburgh, S., Brazil, D. P., Kairaitis, L., Wang, Y., Harris, D. C., Doran, P., and Brady, H. R. 2004. Sequential exctracellular matrix-focused and baited-global cluster analysis of serial transcriptomic profiles identifies candidate modulators of renal tubulointerstitial fibrosisin murine adriamycin-induced nephropathy. J Biol Chem 279:29670-29680.
[0284] 76. Sarwal, M., Chua, M. S., Kambham, N., Hsieh, S. C., Satterwhite, T., Masek, M., and Salvatierra, O. J. 2003. Molecular heterogeneity in acute allograft rejection identified by DNA microarray profiling. N Engl J Med 349:125-138.
[0285] 77. Wilson, K. H. S., Eckenrode, S. E., Li, Q.-Z., Ruan, Q.-G, Yang, P., Shi, J.-D., Davoodi-Semiromi, A., McIndoe, R. A., Crocker, B. P., and She, J.-X. 2003. Microarray analysis of gene expression in the kidneys of new- and post-onset diabetic NOD mice. Diabetes 52:2151-2159.
[0286] 78. Wada, J., Zhang, H., Tsuchiyama, Y., Hiragushi, K., Hida, K., Shikata, K., Kanwar, Y. S., and Makino, H. 2001. Gene expression profile in streptozotocin-induced diabetic mice kidneys undergoing glomerulosclerosis. Kidney Int 59:1363-1373.
[0287] 79. Susztak, K., Böttinger, E., Novetsky, A., Liang, D., Zhu, Y., Ciccone, E., Wu, D., Dunn, S., McCue, P., and Sharma, K. 2004. Molecular profiling of diabetic mouse kidney reveals novel genes linked to glomerular disease. Diabetes 53:784-794.
[0288] 80. Peterson, K. S., Huang, J.-F., Zhu, J., D'Agati, V., Liu, X., Miller, N., Erlander, M. G., Jackson, M. R., and Winchester, R. J. 2004. Characterization of heterogeneity in the molecular pathogenesis of lupus nephritis from transcriptional profiles of laser captured glomeruli. J Clin Invest 113:1722-1733.
[0289] 81. Baelde, H. J., Eikmans, M., Doran, P. P., Lappin, D. W. P., de Heer, E., and Bruijn, J. A. 2004. Gene expression profiling in glomeruli from human kidneys with diabetic nephropathy. Am J Kidney Diseases 43:636-650.
[0290] 82. Eremina, V., Wong, M. A., Cui, S., Schwartz, L., and Quaggin, S. E. 2002. Glomerular-specific gene excision in vivo. J Am Soc Nephrol 13:788-793.
[0291] 83. Soares, M. B., Bonaldo, M. F., Jelene, P., Su, L., Lawton, L., and Efstratiadis, A. 1994. Construction and characterization of a normalized cDNA library. Proc. Natl. Acad. Sci. USA 91:9228-9232.
[0292] 84. Gargett, C. E., Bucak, K., and Rogers, P. A. 2000. Isolation, characterization and long-term culture of human myometrial microvascular endothelial cells. Hum. Reprod. 15:293-301.
[0293] 85. Scheidl, S., Nilsson, S., Kalen, M., Hellstrom, M., Takemoto, M., Håkansson, J., and Lindahl, P. 2002. mRNA expression profiling of laser microbeam microdissected cells from slender embryonic structures. Am. J. Pathol. 160:801-813.
[0294] 86. Smyth, G. K. 2004. Linear models and empirical Bayes methods for assessing differential expression in microarray experiments. Statistical Applications in Genetics and Molecular Biology 3: Article 3.
[0295] 87. Benjamini, Y., and Hochberg, Y. 1995. Controlling the false discovery rate: a prectical and powerful approach to multiple testing. J Royal Statistical Society Series B 57:289-300.
[0296] 88. Boström, H., Willetts, K., Pekny, M., Levéen, P., Lindahl, P., Hedstrand, H., Pekna, M., Hellström, M., Gebre-Medhin, S., Schalling, M., et al. 1996. PDGF-A signaling is a critical event in lung alveolar myofibroblast development and alveogenesis. Cell 85:863-873.
[0297] 89. Herb, A., Wisden, W., Catania, M. V., Marechal, D., Dresse, A., and Seeburg, P. H. 1997. prominent dendritic localization in forebrain neurons of a novel mRNA and its product, dendrin. Mol Cell Neurosci 8:367-374.
[0298] 90. Lahdenkari, A. T., Lounatmaa, K., Patrakka, J., Holmberg, C., Wartiovaara, J., Kestila, M., Koskimies, O., and Jalanko, H. 2004. Podocytes are firmly attached to glomerular basement membrane in kidneys with heavy proteinuria. J Am Soc Nephrol 15:2611-2618.

The application's sequence listing, which the Patent Office published only in electronic form, follows.

SEQUENCE LISTING (2985 sequences)

SEQ ID NO: 1 - DNA, 1910 bp, Mus musculus
ggagtctcgctttttctttccagtgttggctgacttacagcttctctaaagtagaggcagtttctgaacctcaggctcctgcctcgcagttctggcttgtgagcaccaatgcaaagaactgcccggagcgagacactttcctgagccccggatctttcccccttctggaactatcccaccatacggatttatctcttgagaatccccacaccatggacctcatcgggctgctgaagtcccagtttctatgtcacctggtcttctgctacgtgttcatcgcctcggggctcattgtcaacgccatccagctgtgcacgctggtcatctggcccatcaacaagcagctgttccgcaagatcaatgccagactctgctactgcgtctccagccagttggtgatgcttctggagtggtggtcgggcacggagtgtaccatctacaccgacccgaaggcctgcccccactacgggaaggaaaacgccatcgtggtcctcaatcacaagtttgagattgactttctctgtggctggagcctggctgagcgcctggggatcctggggaactccaaagtcctggccaagaaagaactggcttatgtcccaatcattggctggatgtggtacttcgtggaaatgatcttttgcacacgcaagtgggagcaagatcggcagacggttgccaagagcctgctgcacctccgggactacccagagaagtatctgttcctgatccactgtgagggcacacggttcacagagaagaaacaccaaatcagcatgcaggtggcccaagccaaggggctgcccagcctcaaacaccacctgctgccgcgcaccaaaggctttgctattactgtgaagtgcttgcgagatgttgtcccagctgtatatgactgtacactcaatttcagaaacaatgaaaacccaacactgctgggagtcttaaatggaaagaaatatcacgctgactgctacgttcggaggatccccatggaggacattccggaggatgaggacaagtgctctgcctggttacacaagctctaccaggagaaggatgcctttcaggaggaatactacaggacaggggtcttcccagagactccctgggttcccccacggcggccctggtctctggtcaactggttgttctgggcatcgctgctgctctaccctttcttccagttcctagttagcatggtcagcagcggttcctcggtgacgctggccagcttggtcctcatcttctgtatggcctccatgggagttcgatggatgattggcgtgacagaaatcgacaagggctctgcctacggcaacatcgacaacaaacggaaacaaacggactgatgtgggaaagtcacctccagagggaaccgtgggggacggctggcctctgcttagcctttgtagcagggctcagtgatggagactggggggcccttgctgggacaaacacaaaccacagcccctctggtcacggagttttgcctcagcgctggatgggaaaggaagacgggtttagacctttcccctcccctcctccctgtgtgatatggtttcggttatgtctcttttcagttgcgcgtgcgtgcgtgcgtgtgtgtgtgtgtgtgtgtgtgtgtgtgtgtgtgtgtgagtgtgtgagagagagagggagagagagagagagagagatggggtgaggagaatgggtgtgtggttgcgtgtgcacttgtgaccctgtaacagtagggtctgggaggctgcaaggaagggcagggccagggtggaagggaaggtgtccctgtcaccccatggtgctgcgtcttctctaaccctcgattgccggagacagagtgaaaagtgctttgggtaagatgactaaattatgcctccaaataagaaaaagaattaaagtgtttctctggg

SEQ ID NO: 2 - protein, 378 aa, Mus musculus
MDLIGLLKSQFLCHLVFCYVFIASGLIVNAIQLCTLVIWPINKQLFRKINARLCYCVSSQLVMLLEWWSGTECTIYTDPKACPHYGKENAIVVLNHKFEIDFLCGWSLAERLGILGNSKVLAKKELAYVPIIGWMWYFVEMIFCTRKWEQDRQTVAKSLLHLRDYPEKYLFLIHCEGTRFTEKKHQISMQVAQAKGLPSLKHHLLPRTKGFAITVKCLRDVVPAVYDCTLNFRNNENPTLLGVLNGKKYHADCYVRRIPMEDIPEDEDKCSAWLHKLYQEKDAFQEEYYRTGVFPETPWVPPRRPWSLVNWLFWASLLLYPFFQFLVSMVSSGSSVTLASLVLIFCMASMGVRWMIGVTEIDKGSAYGNIDNKRKQTD

SEQ ID NO: 3 - DNA, 1560 bp, Mus musculus
agatttgaggaagacagtgagctgctgagtaacccggggcctcagcttccacacctctgagaatgctgttccccgatgacttcagtacttgggagcagacatttcaagaactgatgcaggaggagaagcccggggccaagtggagcctgcatttggataagaacattgtaccagatggtgcagccctgggatggaggcagcaccagcagacagtgcttggcaggttccagtgttccagatgctgcagaagttggacctctgctcaggtgatgatcttgtgccacatgtacccggacactttgaaatcgcagggccaggcacgcatgaggatctttggtcagaagtgccagaagtgttttggatgtcaatttgagactcccaagttctccacagagatcatcaaaagaattctgaataacctagttaattatattctgcagagatactatggacacaggaagatagcattgacctcgaatgcatctttgggtgagaaggtgactttggatgggccccacgacacacgcaattgtgaggcatgcagtctaaactctcatggaagatgtgcccttgcacacaaagtaaaaccacccagatctccatctccattaccaaagagttcctccccatcaaagagctgccctcctccgcctcagacccggaatacggattttgggaataaaacttttcaggattttgggaatagaacttttcagggatgcagagagcccccccaacgtgaaatagagccaccactatttctgtttttgtctattgctgcatttgccctttttagtcttttcactagataataggtttatcgtcttgttttaataccttggtgatcaatgaaatagatgtcatttcaataggacagtgaattcatatagaatcaagtaaggtcgagtatataaaataaatctgctttcctggacatgctctgaaaatagcctaaaccatggcccacacataatggacccaataacagatttgtattgagttgctgaactgtctgcactagcttgctcacgtattgttctcaagctatgttgattaaataaatcttgattataactaacagtcacctgtgctatgagatacaaagcggcggccggagtaagggaatacctgcagggcccctgccaaggtgccccctgagaaatcatgccacgtaacagacctggtgtaagggagtttattagtgagggaagcagggacctagagaagtggggagcagagctatgaggacagagaacgggggacagagaaggacagagagaggggctggccaggaacacgagggaacagagagagaaagaggaaggaggaggggggctggggagtaggctgcccctgcaccacctggctcgaacccagtgggcagcaggtgatgacataagcctaggtccctgggagaagcctagtggaatcttctgttaaccaacaatgagtattattgtaaatttactgtggcagactgggtgatgctccccccccacacacaccaaaaatgcccttccccatagcctctagaatttgtgaataaactctatttgttgg

SEQ ID NO: 4 - protein, 249 aa, Mus musculus
MLFPDDFSTWEQTFQELMQEEKPGAKWSLHLDKNIVPDGAALGWRQHQQTVLGRFQCSRCCRSWTSAQVMILCHMYPDTLKSQGQARMRIFGQKCQKCFGCQFETPKFSTEIIKRILNNLVNYILQRYYGHRKIALTSNASLGEKVTLDGPHDTRNCEACSLNSHGRCALAHKVKPPRSPSPLPKSSSPSKSCPPPPQTRNTDFGNKTFQDFGNRTFQGCREPPQREIEPPLFLFLSIAAFALFSLFTR

SEQ ID NO: 5 - DNA, 6058 bp, Mus musculus
gctgtgctactcagccatgccaccacggggcactgtgtgtgccccagggcccagatcctaacagcttccgttgctactgtgtgcctggattccagggaccccactgtgaactggacatcgatgagtgtgcgtcccggccttgccagcatgggggcacctgccaaaatctggcagatcactacgagtgccactgtcccctgggatatgcaggcgtgacctgtgaggccgaggtggacgagtgctcgtcagcgccctgcctgcacggaggctcgtgcctggacggtgtgggttcctaccgctgcgtgtgcgcgccgggatacgccggtgcgaactgtcagctggacgtggacgagtgccagagccagccgtgcgcgcacggtggcgtgtgtcacgacctggtcaacggtttccggtgcgactgcgcggacacgggttacgaaggcgcgcgctgcgagcaggaggtgctggagtgcgcctctgcgccctgcgcgcacaacgcgtcctgcctcgacggcttccggagcttccgctgcctctgctggccaggcttcagtggagagcggtgcgaagtggatgaggacgaatgtgcatcgggcccctgtcaaaatgggggccagtgcttgcagcgctctgacccgaccttgtacgggggtgttcaggccatcttcccgggagccttcagcttcagccacgccgctggcttcctttgcagctgtcctctgggctttgctgggaatgactgcagcatggatgtggatgagtgtgcctcagggccgtgcctcaatggaggtagctgccaggacctgcccaatggtttccagtgctactgccaggatggatacacaggcctgacatgtcaggaagatatggatgaatgccagtcggaaccatgcctgcatggtggaacctgcagcgacactgtagcaggctacatctgccagtgccctgaggcctggggtggacatgactgttctgtgcagctcacaggctgccagggccatacctgcccactggctgccacctgcatccccaccttcaagtctggcctccacggttacttctgccgctgcccaccggggacctatgggcctttctgtggccagaatacgaccttctcggttgtgtctgggagttctgtgtggggattggtgccagctgctgcctccctgggtctggcactgagatttcgtaccaccctgcttgccggaaccctggctactctcaaagacactcgggacagcttggagctggttctggtgggggccgtgctccaagccacactctcgagacatggcactgcggtgctcatccttacactgcctgacctagccttaaatgatgggcattggcaccaggtggaagtgacgctccacctgggaaccctggagctgcggctctggcacgagggctgccctggccagctctgtgtggcctctggtccggtggctacaggccctacagcctcggtggcctctgggcctccgggatcctactccatctatctgggcggcggggtctttgccggctgcttccaggatgtgcgtgtggaagggcaccttctgctgcctgaggagctcaagggaactgtgcttctgggttgtgagcgcagggaaccttgccagcctctgccttgtgcccatggaggggcctgcgtggacctgtggactcacttccgctgcgactgcccgagaccttaccgtggagccacatgcactgatgaggttcctgctgccacttttggcttgggtggagccacgagctcagcctcttttctgctccaccaactaggcccaaacctcaccgtgtcatttttcctccgcacccgcgaacctgccggcctgttgctccagtttgccaatgattcagttgcgagcctgactgtgttcctgagtgagggccagatccgggctgaggggctgggtcaccctgctgtggtcctccctgggcgctgggatgatggactcccccacttggtgatgctcagctttgggcctgaccagctgcaggacctgggccagcggctgtatgtgggtgggaggttctaccctgatgacacccagctctggggtgggcccttccgaggctgtctccaggacctacaactcaacagcatccacctccccttcttctcttccccgatggagaactcaagttggcccagtgaactggaagctggccagtcctccaacctcacccagggttgtgtctctgaggacacgtgcaatcccaatccctgtttcaatggtggcacgtgccacgtcacctggaatgacttctactgcacctgctccgagaacttcacggggcccacctgtgcccagcagcgatggtgccccaggcagccatgcctgcctcctgccacctgtgaggaggttccagatggctttgtgtgtgtggccgaggccacgttccgcgagggccctcctgctgtgttcacaggccacaacgtgtcctcatcgctcagcgggctcaccctggccttccgcacgcgcgactccgaggctgggctactgcgcgccgtctccgccgcaggtgcccactccaatatctggttggcggtgcgcaacggctcgctggcaggagatgtggcgggttcggtgctgcccgcgcccgggccgcgcgtggccgacggcgcctggcatcgcgtgcgcctagcccgggagttcccacaggccgctgcctcgcgctggctgctgtggctggacggcgcggcgacacccgtggccttgcacggcttgggcggcgacctgggctttctgcagggtccgggtgcagtgcctctgctactggctgagaacttcacgggctgcctgggccgcgtggcacttggcgacttcccgttacccttggcgccaccgcggtctggcacggtgtctggggcgcgcgagcacttcgtggcctggcccgggtctccggccgtgagtctcggctgccgtggcggacccgtatgttcaccctcgccctgcctgcacggtggcgcctgccgcgacctcttcgacgcctttgcttgctcctgcggccccgcctgggaaggaccccgctgcgagatccgcgctgacccatgtcgctccactccctgtgtccggggccaatgccatgcgcgccccgacggccgcttcgagtgtcgctgccctccgggcttctccggcccgcgctgcaggttgcctgtcctgcctcagggatgcaacctcaactccacatgcaaggatggcgccccttgtgaaggcggccccttaggcaccaactgcagttgccaggaaggtcttgctggcctcagatgtcagagtctcgacaaaccctgtgaagccagcccttgcttgaatgggggcacttgccgggtggccagtggcatatttgaatgtacttgcagtgcaggattctctggccagttctgtgaagtggtgaaaaccctacctctgcctctgccgttcccactgctggaggtagcagtgcctgcagcctgtgcctgcctcctccttctcctcctgggcctcctctcaggaatcctggctgccagaaagcgccgccagtctgagggcacttacagcccaagtcagcaggaggtggctggggctcgtctggagatggacagtgtcctcaaggtgccaccagaggagagacttatttaggtttgcctggctgctggtgccatgtcctgaaggtcctaaagggtcaccacaggacttctacctggagacccaaggagactgtttccagagctgggacatccacaggatgtgcccccatggttggcagcccttgctctgtccatcatggactcaggaaatggggaacaactcagggaagcagaggaggctgtgagagtgtgtacttctctgacctgctgggctggatacagggcacatgttggtgcccatgatatgacagggtgtgtgcatgtgcttctgtgcatatgtgtttgtgtatgtgtgtgcatctttctgtttggggaagaggaggaaagagagaggagaaggagaaggagactatacatagggatgtgttggtctgcagattgtaatgtgttatgactgtggtaagggcttcatgtctgggaaccacccagatggttacctctgggacaggggcagcccaaggctgcacgttctctagcactggacaggccagagcttacccaagcacctagactttggtcttgacatcttgttcaacctccaagaacagccagaagctgggatagggaggagtctccttggtttccagaacaaaagccctttgggcaggtctgtaggaaccaaggagcggctgccctgggttgccctgcctgctgtgggcatttgccagagtggagcaaccaacctgtctgcctacctcacatcacacggctattctgaggatccgagagacaaacaggcagaaaactccagtctggtgggaagaactggctgcccttgggtgttggaaagtgtcttgcccacctagagttgaaaaggcttcttgggaccctagcaagaaggccagagaggtggaagaacggagatgctattatcttctgtccctgacccctgcaaactcacccctttgcctgcagttctgttgccaaggaaggctctgttgtgtgccaaacaacagtgtccagcagatggacatcaggcagcttctgcattggcgctcaggctgcagaagccgattacatcctgtggacactcagtgcaagtgacttctgacaactcctctcccagggcattggcctgaaggtttagcctcccttgaactttccagaggcctctgacttggagatgtgtcctttgtcatctttgtttatcaggcagtgccttctcacaggagttcccatgtgcaaacgccaggtgacttttacacaaggaagctcggtgtctccaggtttcagctgcctcccaaggcacagacttgggggaaccaggagatcagtagaagctttgttaagagaccctggatgctaagcgagaaggcctacttggttcttactctgtagtggtgaggccactttgccccgagctatctccatgccccttgggagaggggagaggaaacaggctcttgggtgaactgtttcagttgccagctcctaagatgattcttgtggaatgccaacggaacgaaacatcccagttccacgtcagtgtcaccaatgtggcctacacaagtactctcacttgggggagatggtgttcttgctgagacaagggggaggagtggagcttgttcctttgtgtagtcctgcccatgatgtagtgtccactatgattccctcatggggagggatggtgtaagtggctcagagcctcaagcatgcataggctggaggacagtggcctctgcttctgcaggatggctggtggaggtggccaagtgcctgctcaggcagccatcccccagagctccttgtaggactcaggactacagccctctccccagttttattgaccacatatagaattcatcgttggattgcaaagtctacccagtgaaatggacagatgacaacaaacatgtgaactacaggtgtgtgccttcttaggctgcccgacaccctgtcaccctattggcccactaggctgtggcactgcctcatcttgggtggaacccggaatttgttaggatggaggaagtggggctgaggcctgtcctgggacaccagaatgccagaaggcttcccacgacccagtgagactccgctccctggtagctgagcacaccaccaagacagagccctggggaaggagggctacctctctggcctagacctcagggacccataaacaacctctcagacagagagggtccctaaagtaacaggtacctctgatgaccccacccccttgttcccaacccccagaaaccctggggtaggctgtctgaccatttacacataggaaatgagaaatcaggtcaaatgtgcacaatttcctgcatgtctctgatggatgttttcttaaacggtcagtctgtgttttaccttggtttattgaaaggaatcaattttcaagattcatcaaatcaataaggtaaaaaggaaaagcaagatcaaagaaaaaataacaaaacatttcattat

SEQ ID NO: 6 - protein, 1208 aa, Mus musculus
CATQPCHHGALCVPQGPDPNSFRCYCVPGFQGPHCELDIDECASRPCQHGGTCQNLADHYECHCPLGYAGVTCEAEVDECSSAPCLHGGSCLDGVGSYRCVCAPGYAGANCQLDVDECQSQPCAHGGVCHDLVNGFRCDCADTGYEGARCEQEVLECASAPCAHNASCLDGFRSFRCLCWPGFSGERCEVDEDECASGPCQNGGQCLQRSDPTLYGGVQAIFPGAFSFSHAAGFLCSCPLGFAGNDCSMDVDECASGPCLNGGSCQDLPNGFQCYCQDGYTGLTCQEDMDECQSEPCLHGGTCSDTVAGYICQCPEAWGGHDCSVQLTGCQGHTCPLAATCIPTFKSGLHGYFCRCPPGTYGPFCGQNTTFSVVSGSSVWGLVPAAASLGLALRFRTTLLAGTLATLKDTRDSLELVLVGAVLQATLSRHGTAVLILTLPDLALNDGHWHQVEVTLHLGTLELRLWHEGCPGQLCVASGPVATGPTASVASGPPGSYSIYLGGGVFAGCFQDVRVEGHLLLPEELKGTVLLGCERREPCQPLPCAHGGACVDLWTHFRCDCPRPYRGATCTDEVPAATFGLGGATSSASFLLHQLGPNLTVSFFLRTREPAGLLLQFANDSVASLTVFLSEGQIRAEGLGHPAVVLPGRWDDGLPHLVMLSFGPDQLQDLGQRLYVGGRFYPDDTQLWGGPFRGCLQDLQLNSIHLPFFSSPMENSSWPSELEAGQSSNLTQGCVSEDTCNPNPCFNGGTCHVTWNDFYCTCSENFTGPTCAQQRWCPRQPCLPPATCEEVPDGFVCVAEATFREGPPAVFTGHNVSSSLSGLTLAFRTRDSEAGLLRAVSAAGAHSNIWLAVRNGSLAGDVAGSVLPAPGPRVADGAWHRVRLAREFPQAAASRWLLWLDGAATPVALHGLGGDLGFLQGPGAVPLLLAENFTGCLGRVALGDFPLPLAPPRSGTVSGAREHFVAWPGSPAVSLGCRGGPVCSPSPCLHGGACRDLFDAFACSCGPAWEGPRCEIRADPCRSTPCVRGQCHARPDGRFECRCPPGFSGPRCRLPVLPQGCNLNSTCKDGAPCEGGPLGTNCSCQEGLAGLRCQSLDKPCEASPCLNGGTCRVASGIFECTCSAGFSGQFCEVVKTLPLPLPFPLLEVAVPAACACLLLLLLGLLSGILAARKRRQSEGTYSPSQQEVAGARLEMDSVLKVPPEERLI

SEQ ID NO: 7 - DNA, 4389 bp, Mus musculus
tggggagaacccggggaagacccacagatacacagaaacgagagagacagaagaggagagagacagagacaaagagacagcagcaggaggaggaggaggaggaggcaaagacagggcgagcactgaggcaaagccagacagctgagcagagggagaagccaaggagtcacagacaaagacctgggacagaaaggcaaaggaggaagttttggagcagaaagaacccgtgggcacttttcctgagcccaggggctgttttctttttcatcttctctgaaagtccctagcccatttaaaaactttgcctcagattttggcacaagccccaaagcccttctggctttaacgaggagccttccacagttagggtgtggagcattttggtgccgcagatggcctcaatccatcccagctgcagcccgggtaccatgtcccagatgggcttgcatcccaggaggggcttgactgggcactggctgcaaagattccaaccctgcttgccgcttcacactgtgcagtggcggaggctgctgctgctggccttcctcctgtccttagcgtggcccgccagccccctcccccgggaggaggagatcgtgtttccagagaagctcaatggcagtagcatcctacctggatcaggcgttcctgccaggctgctgtaccgattgccagcctttggggagatgttgctactagaactagaacaggaccctggggtgcaggtagagggtttgactgtacagtacctgggccaggcacctgagatgctgggtggggcagagccaggtacctacctgactggcaccatcaatggagatccggagtcggtggcatctctgcactgggacgggggagccctattaggggtactgcagtaccgtggggccgaactccacctccagcctctggaaggaggcgcccttaactctgctgggggaccgggggctcacatcctacgccggaagagtcctgccagcagccaaggtcccatgtgcaccgtcaaggctccttctgggagcccgagtcccatttcccgcagaaccaagcgcttcgcttctctgagtagattcgtggagacactggtggtagcagatgacaagatggcagcattccatggtacagggttaaagcgctacctgctgacggttatggcagctgccgctaaagcctttaaacacccaagcatccgaaaccctgtcaacttggtggtgacgcgcctggtgatcctggggtccggccaggaagggccccaagtggggccaagtgccgcccagaccctacgcagcttctgcacctggcagcggggcctcaacacccctaacgactcagatcctgaccactttgacacagccattctgttcacccggcaggacctgtgtggggtctccacttgtgacaccctgggtatggctgatgtgggcacagtgtgtgatccagctaggagctgtgctattgtggaagatgatgggctccagtcagccttcactgctgctcatgaactgggccatgtcttcaacatgctccatgataactccaagccatgcactaacttgaatgggcaggggggttcctctcgccatgtcatggctcctgtcatggcccatgtggaccctgaagagccctggtcgccctgcagtgcccgattcatcactgacttcctggacaatggttatgggcactgcctcttagacaaaccggaggctcccctccatctaccagcgacttttcctggcaaggactatgacgctgaccgccaatgccaactgaccttcggtcctgactcaagccattgtccacagctgccaccgccctgtgctgccctctggtgctctggccacctcaatggccatgccatgtgccagacgaagcactcaccttgggctgatggcactccctgcgggtcttcacaggcctgcatgggtggccgctgtctgcacgtggaccagctcaaggacttcaatgttcctcaggctggaggctggggcccctggggaccatggggtgactgctccaggacttgtgggggtggtgtccagttctcctcccgggattgcacgaggcccgtcccccggaacggtggcaagtattgtgagggccgccggactcgcttccgctcctgcaacacggagaactgcccacacggctcagcattgaccttccgtgaagagcagtgtgctgcctacaaccaccgaaccgacctcttcaagagctttccagggcccatggactgggttccgcgctacacaggtgtggcccctcgagaccaatgcaaactcacctgccaggcccgggcactgggctactactacgtattggagccccgggtggcagatgggactccctgctccccagacacctcctctgtctgtgtccagggccgctgtatccatgctggctgtgaccggatcattggctccaaaaagaaatttgacaagtgcatggtgtgcggcggggatggctctcgctgcagcaagcagtcgggctccttcaaaaaattcaggtatggatacagcgatgtggtcacgatccctgcgggggccacccatatccttgtacggcagcagggggggtctggtctcaagagcatctacctggccctgaagctttctgacggttcttacgccctcaatggtgaatacacgctgatgccctccccaacagatgtggttcttcctggggcagtcagcttgcgctacagcggagccacagcagcctcagagacactgtctggacatgggccgctggcccagcccttgacgctgcaagtcctggtggctggcaacccacagaatgcacgtctgcggtacagtttctttgtcccgcggccagtcccttcaacaccacgccctcctccccaagactggctgcaacgcagggcagagatactgaagatccttcggaagcgtccctgggcaggccggaaataacctcactgtcccggctgccctttttgggcgccggggcctcggactcatctgggagaatgagcaggcttctgcaactgcctcctgctaaaacacagtagggaggtgtagagggtgagatctgcctgcctcactgccccaaaccgcaggctggccctgccctggcttcctgccctgggaggcagtgatgtcttggtgaatggaaaggggctaggtgacagtaccctatctactaaactgccccctctaccctgcaggtcacaggaggaatggggggaagacagggtgggtcctgggccctagttgtatttatttggtatttattcatttttatttagcaccaggaaaggggactagggtcttggggaaactcacccattatagccctaacctagctatgaaatccagggtgttggtgacaaatatgagtggtgtgtgtgtgtgtgtgtgtgtgtgtgtgtgtgtttatgtatgaggtacaacctgccctgctttcctctccctaatttttttttttttctgggaaaaggaaagtcaaaggtaggactgccttcagggagtaagggatgattgtgtttttaaattgaagtttgctatttatatgctctttttggagtcagacaaatgtgggttatattctggccccgcatctttgagcattagttttctcatgtgccaataataatcccttagaaattggttgtaaggattaaatgatgttaataaagaactagcatagagcctctcactcagtaggtgctcaaggaatggcagctgctgctcctgtggtccttgttctcccagtcaccctccacagaggctctgccaggcactcgaagtccacaaggattcatgtcacttgtgcctatctttagtcccaggctcaggaccttcggttggcaggaccctgtttaggatttggagagagttcagactctcagatggccatcttgtctattacttctgtaggcacgtaagcacctgcagcagacataataaacacttggcaaagatagtcaacaagaacatgaaggtacaagaacagaacccaacaactccctggacacaaacaggagcttagttgtaagaatggcggaaggggcagagaagggatgatgtaatagcatcctggcattccaggagctggtggatctgaacttgagttagggttcagcatcttattacctgggtgatgttgggcaagtgctgataagtgaccttggagtacaagtctgtggaatggggccagtaataactgctctgacagcattgctctgtgctcaaggattttcaaacagtaaaggccgttgtaacaggagaggtgacctttgtggtgacagactgggacagtgactccagaatcaatcaaagtaagcccaaccaacatctaggaatggaattcaatgagaggaacaggatgtggtctggtattgcctaataatcaacaaagcaaagcaaagcc

SEQ ID NO: 8 - protein, 845 aa, Mus musculus
MASIHPSCSPGTMSQMGLHPRRGLTGHWLQRFQPCLPLHTVQWRRLLLLAFLLSLAWPASPLPREEEIVFPEKLNGSSILPGSGVPARLLYRLPAFGEMLLLELEQDPGVQVEGLTVQYLGQAPEMLGGAEPGTYLTGTINGDPESVASLHWDGGALLGVLQYRGAELHLQPLEGGALNSAGGPGAHILRRKSPASSQGPMCTVKAPSGSPSPISRRTKRFASLSRFVETLVVADDKMAAFHGTGLKRYLLTVMAAAAKAFKHPSIRNPVNLVVTRLVILGSGQEGPQVGPSAAQTLRSFCTWQRGLNTPNDSDPDHFDTAILFTRQDLCGVSTCDTLGMADVGTVCDPARSCAIVEDDGLQSAFTAAHELGHVFNMLHDNSKPCTNLNGQGGSSRHVMAPVMAHVDPEEPWSPCSARFITDFLDNGYGHCLLDKPEAPLHLPATFPGKDYDADRQCQLTFGPDSSHCPQLPPPCAALWCSGHLNGHAMCQTKHSPWADGTPCGSSQACMGGRCLHVDQLKDFNVPQAGGWGPWGPWGDCSRTCGGGVQFSSRDCTRPVPRNGGKYCEGRRTRFRSCNTENCPHGSALTFREEQCAAYNHRTDLFKSFPGPMDWVPRYTGVAPRDQCKLTCQARALGYYYVLEPRVADGTPCSPDTSSVCVQGRCIHAGCDRIIGSKKKFDKCMVCGGDGSRCSKQSGSFKKFRYGYSDVVTIPAGATHILVRQQGGSGLKSIYLALKLSDGSYALNGEYTLMPSPTDVVLPGAVSLRYSGATAASETLSGHGPLAQPLTLQVLVAGNPQNARLRYSFFVPRPVPSTPRPPPQDWLQRRAEILKILRKRPWAGRK

SEQ ID NO: 9 - DNA, 12000 bp, Mus musculus
acgaagatggcggcggtgaccgcggggcccgtgcaggccggcacgagtcgccggtgagcgcccagcgtgtcccgggtggccacggagctctgtccgcctctttctaaacagatctttcctctccactgcgtcccagcctaccctgcagacgccatggaggacgaggagaggcaaaggaagctggcagccggcaaggcgaagcttgctcggtttcgacaaagaaaagcccaatatgatggggacattccgaagaaacagaagaagaagaggacgtcaagctctaaacatgattcaagcttacatactgatcaacagagtggtgagctctgctcggaaagttctcagagggtagacttagccgggaatcctgattgctccgggccagagagaaagcacggccaggtcttctctgctgaacctgaaagtgaaatttctaccactgcagatgaatgtagctcggaggaagaagaattttcacttgatgactcctcctctgagcaaggagctcagtccagtcagacctgtcttcagatggtagaaaaggagttggccgagaagcagcatgatattgaagagttgactcaggagttggaagagatgagggccagctttgggaccgaagggctgaagcagttacaagaatttgaagccgccattaaacagcgagacggcatcataactcagctcacagctaacttgcagcaagcaaggagagagaaggatgacacgatggtagaattcttagagctgacagaacaaagtcaaaaactgcagattcagttccagcacttacaggctaatgaaactttgcaaaacagcactctcagccgaactgcgacagatttactgcaggccaaacgacagatcttcactcaacagcaacagctgcaagattatcagaaaaaggaggaggacctccaagcgcagatttcttttttacaagagaaattaagagcgtttgaaatggaaaaagacagaaaaatagaaaacttaaatgcaaaagaaatacaggagaagcaggcactcattgatgagttgaatacaagagtagtagaagaagagaagaaaactgttgagttaaagaataaagtaacaactgctgatgagttactaggagggttacacgaacagcttacacagaggaatcaggagatccaaagcctgaaactagaactgggcaactctcagcagaacgagcggaagtgttcagaggaaatcaaagagctaatgaggacagttgaagaactccagaagagaaaccttaaagatagctggctggaaactagcgccgtgcgaagggtggaacaggaaacccaacggaaattaagccatctccaagcagagctggatgagatgtatgggaagcaaatagtgcaaatgaaacaagagttaataaatcagcacatgtctcagatagaggagctcaaatcccaacataagagagaaatggagaacaccttaaagtcggatacaaatgctgccatcagtaaagaacaagtaaatttaatgaatgccgccataaatgaactcaatgtaagattacaggagactcatgctcaaaaggaggaactcaagggagagcttggcgtagttctgggagaaaagtcagctttgcaaagtcagtctaatgacctcttagaagaggtaaggtttttaagagagcaagttcagaaagctaggcagacaatcgcagagcaagagaacaggctgagtgaggcgcgcaagtccctgagcacagtggaagacctaaaagctgagatcgtggctgcctccgaatccagaaaggaactcgagctcaagcatgaagccgagattacaaattataaaataaaacttgaaatgctagaaaaagaaaaaaatgctgtgctagacagaatggcggaatcccaagaagcagagctggagaggctgagaacacagctcctctttagtcatgaggaagaattgtctaaactaaaagaagatttagaagtagaacatcgaataaatattgaaaaacttaaagataatttaggcattcactacaagcaacagatagacggcttacagaatgaaatgaataggaagatggaaagtatgcagtgtgaaacagacaacctgataacccagcagaatcagttaattctggaaaattcaaagctaagagatttacaggaatgccttgttaactcaaaatcagaagaaatgaatcttcaaatcaatgaactgcaaaaagagattgaaatcctcaaacaagaagaaaaggagaaaggtacccttgagcaggaagtccaggagttgcaacttaaaactgaacaattggagaaacagctgaaggagaaggaagatgaccttcaagaaaaatgtgcacagctggacgcagagaacaacattctcaaagaggagaagagagtccttgaagacaagttgaaaatgtacagtccttcggaacaagaggagagatccattgccgtagatcccagcacaagcaagtcggcagactcgaggtggcaaaaagaagtagcgatgctgaggaaggagaccgaggaccttcaacaacaatgcctttatctaaatgaagagatcgagaagcaaaggaatacgtttgcgtttgctgaaaagaactttgaagttaactatcaagagttacagagggagtatacttgtctgctcaagataagagatgatttagaggccacacagaccaagcaggcattggaatatgagagcaagctgagagcgctggaggaagagctcctttcgaaaagaggaaatccagccgcgccaaaggggaagagttctggaattttcccatctgagacgctggaaattggggaagttgtagaaaaagatacaacagagcttatggagaagctagaagtaaccaagcgagaaaagttggagctctcagagaaagtctctggcctttctgaacaactaaagcagacccattgtaccatcaattctctaagtgcagaggtcagagccttaaagcaagagaaggaacagcttttattgagatgtggagaacttgaactcctcgctaaccctagtggaacagaaaatgcagctgtctgccctgtgcagatgagttcttaccaagctgggcttgtgatgggcaaggtcggggattctgggggatctatttctaaaattagtaaagatttggctgaagaatcaaaaccaatgatagaagataaaattccctttaaagaaagtgggagagaacagttgctcttgccaacaagagcacaaaaaccgtctcatgcgacagttgaaccatgtgaaagtgaaaaactccagcaagagcttcatgccctcaaagccgagcaggatgatctaaggctgcagatggaggcccagcgcatatgcctttttgtggtttactcaactcatgcggatcaggttcgtgcacacatggaaaaggagagggaggaagctctttgcagccttaaagatgagctcatttccgctcaacagaaaaagatcgacgaacttcataaaatgcaccagtgccagctccagaattttaaaatacaggagacaggtgatgagcctttacaggtgctcattgaacgacttcaacaggcagtgtctgagaaatgctttcacatttcaaagaccctaaacaatgttttcgatgaatgctatactcctttaaaatgtgaaatgaatatagaagagaaagagaattctggtgtttacacttctcaaaatcaaagcccagaattacaagagtatagatacgaagttcaagactttcaagagagcatgcaagtccttcttggtaaagtgacggaagaatgccgcaaactctcaggactgcagacgcgcttaggcaagatccatgaacaacagacagatggtgtggcactagagtttgctgaacaaaatgcggcagaagaggaagcaggtcttctgtcaggttgttctcagagtgctttacagagcacagatgtcagtcttgagagcaaggtgtcttctctgcctgcgagtgagaaaagcagagaatgtgagaggcaagtccaagagttacagagccctgtggctgccggacagctgcagctcacggaaaccgaagcaaaccacagagcagaaactgagtctttgcagcagagacttgaggctgtcagtgaggctccggttcagccaagcttgtccattgattctgtggtgtttaaaggatctggtgcccagaaaccagtgtactgtggaagctgtctaagagagtgtgtggatggcacagcaaagttttctgatagattcgaagtgaggcaagaaacaaatatggttaacttgatggaaaaacagtatcaagaacgactggaagaagaaatagctaaggtcatcgtatcaatgagtatagcatttgctcaacagacggaactctctagattatctgaggggaaagaaaacactatacaatcagaacaagcacacactctatgttctcaaaacaaacaccaattaaatgacatcacatcacaaagtcaagttggtcttcagacttttgaggcaacggacaagaattttaaagaagaatttaaaccgcttagcaaagagttaggcgaatatagaaaagcagttcctttgtccagtcatgatgaccttgatgatatactaaagtcagaagaacatggactggctatttcagaagaaatattttccaaagatgaaacatttatagtgagaaaatctatgcatgatgaggtgttggtgtcaagtatggatacttctagacagctcatcttaaatgaacagttggaagatatgcggcaagaacttgtgcgacaatatgaagaacaccagcaggcaacagaaatgttgaggcaggcccacatgcaacagatggagaggcaacgggaagaccaggagcagctccaagaggaaatcaagagactcaacgagcagctagcccagaaatcctccatagatactgaacacgtggtttcagagagagaaagggttctattagaggagctggaagcactaaagcagctgcccctagctggaagaaaggagctgtgttgtgagctgcgccacagcagtacgcaaacacaggatggacatgacgatcaggaagttgaggaacagacgttaaaagacaagacattggagagaagccctgaagatgctcttctcgatagaaacctgtccaatgaaaggtacgctctcaaaaaagctaataatagacttctgaagatcttgttagaggttgtcaagacaacatcagctgctgaagaaacaattggccgccatgttcttgggattctggaccgatctagtaaaggtcagacagctagcagcctgctttggaggtcagaagcagacgcatccgccacgacttgtgcaccagaagattgtgcaagagctatggatgagtccataccctcctatcctggaactgccatagcaacacatgacagcatttggtccaaagtcacagaggaaggagcagagctgtcacagcggctcgtgaggagtggttttgctgggcctgtaatagatcctgaaaatgaagaacttatgctgaacatcagctctcgactacaagcagctgttgaaaaactcctagaagccataagtgaaaccaacactcagcttgaacatgcgaaagttacacagacagagttgatgcgtgagtcctttagacaaaaacaagaggcaacagagtcacttcattgcctggaagaactgcgagagcgccttcaggaggagtccagggccagggagcagctggccgaggagctcaataaagctgagagtgtcattgatgggtactcggatgaaaaaactctctttgaaaggcaaattcaagaaaaaaccgatattatagagcatcttgagcaggaggtgttatgtatgaacaacagactgcaggagctagagtcagaccaacgccgggtggaagaggaacggcagctgctgtgcaggcagagggaggcgatgagagcagaggctggccccgtggagcagcaatttctgcaggagacagaaaaactaatgaaggaaaagttggaagtacagtgtcaagctgaaaaagtccgtggtgaccttcagaagcaagtgaaagctctagaaatagatgttgaagaacaagtcagtaggttcatagaactggagcaagagaaaaacgctgaactcacagatctaaggcagcaaagccaagcgctggagaagcagctggaaaaaatgagaaaatttttagatgagcaggccatcgatagagagcacgagagagatgtttttcagcaggagatacagaagctggagcatcagcttaaggctgtgcctagaatccagcctgtgagtgagcaccaagccagagaggttgaacagttaactaatcacttgaaagagaaaacagacaggtgcagtgagctgctgctatccaaggagcaactgcagcgagacattcaggagaggaatgaggagattgagaagctggagtgccgagtgcgagagctggagcaagccctgctggctagtgcagagcccttccccaaggtagaggaccagaaaaggtctggagctgtagaagcagacccagaattatccctagaagttcagttgcaggtggagcgggatgctacagacagaaaacagaaagagatcaccaacctagaagaacaattagaacagtttcgggaagaactggaaaataagaacgatgaggtccaggagctcctcatgcagctggagattcagagaaaagagtccaccacccgcctgcaggagctgcagcaggaaaacaggctatttaaggatgaaatagaaaaacttgggtttgccatgaaggaatctgattctgtatctactcgggatcagcccatgctgtttggcaaatttgcacagctaatacaagaaaaggagattgaaattgaccggttaaatgagcagtttataaaactgcagcagcaacttaaactcacaacggataacaaggtcattgaagaacaaaaggaacagatacaagatctggaaacccagattgaacgtttgatgagtgagcgagaacatgagaagaaacagagagaggaagaagtagagcagctcactggggtggttgagaaactgcagcaggaggtggtcagcactgaacagcagagagagggtgccaggaccctcccagaagatgaggagagctttaaacatcagctggacaaggtgactgctgaaaagctggttttagagcaacaagtagaaaccaccaaccaggtaatgacgcacatgaacaatgtccttaaagaaatcaatttcaaaatggatcagataacacaatcactgtgcaacttgaataaagaatgtgccagcaatgaagaacttccaagtctacctaaggaaagtgtccacatgactgtgcatgagctaggcagtgacaatctgcagccagaagatgcccctgcccaggatgtgaccaaacctctagaaaaacagacctcccttacgcgtcttcagaaaagccctgaagcttctagaacacaagaaatagagtccctggcaagctctgttggcgccaaggacgttgagcttacccagtgtcgtgaacaaacagaaaccatacaagagcaagcccagtctgagacagacaggcttcagaagaagctcacagacctgcagagaagccttgagaagttcgccgctgcactggtcagtcaggtccaaatggaggcagctcaggagtatgtgccgttccaccaagaaaagcagccggtttcatcagcacccggaagcacagatatacagaatgcaaatggtctgactggagccagcacggagtcactcatccccacagtgaccctgaggctagcagaggtggagagccgtgtagctgaagtgcacagtggtacaatgtcagaaaaacttgtgggaattgtggggggaaatgcttcagagacagaaaagagagttatagagctacagaagctattggaggaggccgaggaaagaccggaagagggaggagaacaaagctctcgggatggggaggtaagagaaagctacatgacatcactgcagaaggacttaggccaagttaaagatccactcacagaagccaaggagaaactatcctactccttagaaaaagaaaagaggactggagaacaggaaagcagagaggcccccataccagagccaccttctgttgaagtaggtggctgctctgggctcacagagagaacagacaaggtgagcagcagcggcaatcagaccctgcagatccttcttagagacgcagcgattcagactgacttacagagtgagagctcccaagaagaggtcagagataccatcaatcaacttactaaaaaaatggagcacatacaagagctacatgccgctgagattttggatatggaatccagacatattttagaaactgagtctttgaagaaagaacattatgttgcgatccagttactgactaaggaatgcgagaccctgaaggagatgacccagtgtctgagatgcaaagagggatcctccattcctgaattggcagattctgttgcttatcaaagtagagaagtctattccagtgattctgaatcagactggggtcaaagccagggatttgatacagcaatagaaggccgagaagaaggggaaacatcagcagatttatttccaaagaaaataaaggggttagtgaaggctgtccacagtgagggcatgcaggtgctctctctctccagtcccctctgtgatgatggagaggaccgttccattcagcagctttcggaatcttggctgaaagagagacaagcttacctcaataccatctcatctcttaaagatttaatttctaagatgcaagtgcgaagagaaactgaggtctatgacaggtgtcacctctcagactggcgaggtgaacttctgcttgcctgtcagcgtgttttcataaaggaacgtagtgttttactagctacattccaaactgagctgacatctctcagcactagagatgtggatggattgttaaactctttggaacagagaatacaagagcagggcattgaatatcacacagcaatggactgcctgcagaaagcagataggaggagtttactggctgaaatcgaagatctgcgtgctcagattaatggcgggaaaatgactctggaaagagaacaaggaactgagaaaagcagccaagaactcctggactgcagtatgcagcagaagcagtcgctggaaatgcaactggaactcagcagcctgagagacagagcagccgagctgcaggaacagctgagttcggaaaagatggtggttgcggaactaaaaagtgaacttgcacaggcaaaactggaattgggaacaacactcaaggcccagcataagcgcctaaaggaattagaagcattcaggtcggaagttaaggagaagacggatgaaatccatttccttagtgatacattagcaagggaacagaagaattcattagagctgcagtgggctttggaaaaggaaaaggccaggtcgggacaccacgagggacgggaaaaagaagaactcgaggatctgaaattttcacttgaggatcagaaacggagaaatacacagttaaacctccttttggaacaacagaagcagctactaaatgaatctcagcagaaaatagagtcacagaaaatgttgcatgatgcccagttatcagaagaacaaggccgcaacttagggcttcaagctctcctggagtcagagcaagttaggattcaggagatgaagagcacactagacaaggaacgggagctgtatgcccagttgcagagccgtgaagatggcgggcagcccccgccagccttgccttctgaggacctacttaaagagctacagaaacaactggaggaaaaacacagccgcatagtagaactgttaagtgaaactgaaaaatataaactagattccttgcaaacaaggcaacagatggaaaaggacaggcaggttcatcagaagacactgcagacagaacaggaggcaaacacccagggccaaaagaaaatgcaggagctgcagtccaaagtggaagagctgcagcgccagctccaggagaaaaggcagcaggtgtacaagctagacctggagggaaagcgactgcaagggcttatgcaggaattccaaaagcaggagctggagccggaggagaaaccgggaagcagaggccttgtggatcagaatctgaatgagccagccacctggaacttcactgatgatcggactagaaattgggttcttcaacagaaaatgggagaggccaaagacaggaacttcacaaagttgattgaaataaacggaggagaacttgaccataatcatgacttggaaatgatcagacagacactccagcatgtggcttcaaaacttcagcatgtagcccagaaagcctgcagcaggctgcagtttgaaacagccggtgatgatgcatttatttggattcaggagaatattgatggaattattttgcaactacagaaactaactggccagccaggtgatgagcacagcttaggaccccccagttcttcctgtggctccttaactgaaagcctaatgagacaaaatactgagttaacaagacttatcaaccaactaacagaagaaaagaacaccttacggagcattgtcataaagctggaggagctgaacaggtgctactggcacacaggagccagcagagactgttgttctaggttctcatttattgatccagctgacatcgaagccatcattgcttcagaaaaggaagtctggaacagagaaaagttatctcttcagaaagccttgaagagggcagaagcaaaagtgtacaagctaaaagctgaactacgaaacgatgccttgcttcggaatctgggccctgacactgatcatgctgccctgcagaaaatttataataaatacttgagagcttcaagtttccggaaagctctcatatatcagaaaaaatacctgctgctgctcctggggggattccaggagtgtgaagacgtcaccctgggggttcttgcccgaatggggggacacctagccttgaaagattccaagaccatcaccaaccacccgaaggcattcagcaggtttcgctccgccgtcagagtgtccattgcgatttcaagaatgaaatttttggtgcggcggtggcagcaagtgacaagtactagctccatcaatattaacagggatggatttggactgagtccaggcattgaaaagactgatccattctatcattctcctggtgggctgcagctctatggagaaccaagacacacaatgtaccgttcaagatttgatctggactatcctcggtctctcttaccattgcagaataggtacccgggtactccaggagacttaaattctatttcaatggcttcttctcaacttcaccagtacaatcctgataaatctctgacagattacgtcactcggctagaggcgctgagaaggcgacttggagctatacagtcagggtccactactcaatttcactttggcatgaggagataatccgttgaaacattaattgaatattaaatagattcccttttgtaaatcaatggctcttttgtgcttttgtattgtgaatattcgatgggaccaatacatgcacagcttatgattgtatacaaatccttagcagcagcacatgaagacaaactggagtttgtgtatataagcaatgtgtgtgtgttcatgcacagtaatcattaaattacatgtatatttgtggaatgctaatttaagtgattaaattataaactttgtgtatttatcaggtgggtgaaaagattaaactttttcaaatgacagtgctgctggacgagtaccttgcggtgccctgcgcttttcttacaaagctactgaagttacatgtttctgcttaatatatttgctactggtgatgaagacaacatatcacttgtagagacctatttttgtataatggtcaaagttttgaactttatgggtattttgtcaagtactgaaataaaaagacctcaccattttcacctt

SEQ ID NO: 10 - protein, 3811 aa, Mus musculus
APSVSRVATELCPPLSKQIFPLHCVPAYPADAMEDEERQRKLAAGKAKLARFRQRKAQYDGDIPKKQKKKRTSSSKHDSSLHTDQQSGELCSESSQRVDLAGNPDCSGPERKHGQVFSAEPESEISTTADECSSEEEEFSLDDSSSEQGAQSSQTCLQMVEKELAEKQHDIEELTQELEEMRASFGTEGLKQLQEFEAAIKQRDGIITQLTANLQQARREKDDTMVEFLELTEQSQKLQIQFQHLQANETLQNSTLSRTATDLLQAKRQIFTQQQQLQDYQKKEEDLQAQISFLQEKLRAFEMEKDRKIENLNAKEIQEKQALIDELNTRVVEEEKKTVELKNKVTTADELLGGLHEQLTQRNQEIQSLKLELGNSQQNERKCSEEIKELMRTVEELQKRNLKDSWLETSAVRRVEQETQRKLSHLQAELDEMYGKQIVQMKQELINQHMSQIEELKSQHKREMENTLKSDTNAAISKEQVNLMNAAINELNVRLQETHAQKEELKGELGVVLGEKSALQSQSNDLLEEVRFLREQVQKARQTIAEQENRLSEARKSLSTVEDLKAEIVAASESRKELELKHEAEITNYKIKLEMLEKEKNAVLDRMAESQEAELERLRTQLLFSHEEELSKLKEDLEVEHRINIEKLKDNLGIHYKQQIDGLQNEMNRKMESMQCETDNLITQQNQLILENSKLRDLQECLVNSKSEEMNLQINELQKEIEILKQEEKEKGTLEQEVQELQLKTEQLEKQLKEKEDDLQEKCAQLDAENNILKEEKRVLEDKLKMYSPSEQEERSIAVDPSTSKSADSRWQKEVAMLRKETEDLQQQCLYLNEEIEKQRNTFAFAEKNFEVNYQELQREYTCLLKIRDDLEATQTKQALEYESKLRALEEELLSKRGNPAAPKGKSSGIFPSETLEIGEVVEKDTTELMEKLEVTKREKLELSEKVSGLSEQLKQTHCTINSLSAEVRALKQEKEQLLLRCGELELLANPSGTENAAVCPVQMSSYQAGLVMGKVGDSGGSISKISKDLAEESKPMIEDKIPFKESGREQLLLPTRAQKPSHATVEPCESEKLQQELHALKAEQDDLRLQMEAQRICLFVVYSTHADQVRAHMEKEREEALCSLKDELISAQQKKIDELHKMHQCQLQNFKIQETGDEPLQVLIERLQQAVSEKCFHISKTLNNVFDECYTPLKCEMNIEEKENSGVYTSQNQSPELQEYRYEVQDFQESMQVLLGKVTEECRKLSGLQTRLGKIHEQQTDGVALEFAEQNAAEEEAGLLSGCSQSALQSTDVSLESKVSSLPASEKSRECERQVQELQSPVAAGQLQLTETEANHRAETESLQQRLEAVSEAPVQPSLSIDSVVFKGSGAQKPVYCGSCLRECVDGTAKFSDRFEVRQETNMVNLMEKQYQERLEEEIAKVIVSMSIAFAQQTELSRLSEGKENTIQSEQAHTLCSQNKHQLNDITSQSQVGLQTFEATDKNFKEEFKPLSKELGEYRKAVPLSSHDDLDDILKSEEHGLAISEEIFSKDETFIVRKSMHDEVLVSSMDTSRQLILNEQLEDMRQELVRQYEEHQQATEMLRQAHMQQMERQREDQEQLQEEIKRLNEQLAQKSSIDTEHVVSERERVLLEELEALKQLPLAGRKELCCELRHSSTQTQDGHDDQEVEEQTLKDKTLERSPEDALLDRNLSNERYALKKANNRLLKILLEVVKTTSAAEETIGRHVLGILDRSSKGQTASSLLWRSEADASATTCAPEDCARAMDESIPSYPGTAIATHDSIWSKVTEEGAELSQRLVRSGFAGPVIDPENEELMLNISSRLQAAVEKLLEAISETNTQLEHAKVTQTELMRESFRQKQEATESLHCLEELRERLQEESRAREQLAEELNKAESVIDGYSDEKTLFERQIQEKTDIIEHLEQEVLCMNNRLQELESDQRRVEEERQLLCRQREAMRAEAGPVEQQFLQETEKLMKEKLEVQCQAEKVRGDLQKQVKALEIDVEEQVSRFIELEQEKNAELTDLRQQSQALEKQLEKMRKFLDEQAIDREHERDVFQQEIQKLEHQLKAVPRIQPVSEHQAREVEQLTNHLKEKTDRCSELLLSKEQLQRDIQERNEEIEKLECRVRELEQALLASAEPFPKVEDQKRSGAVEADPELSLEVQLQVERDATDRKQKEITNLEEQLEQFREELENKNDEVQELLMQLEIQRKESTTRLQELQQENRLFKDEIEKLGFAMKESDSVSTRDQPMLFGKFAQLIQEKEIEIDRLNEQFIKLQQQLKLTTDNKVIEEQKEQIQDLETQIERLMSEREHEKKQREEEVEQLTGVVEKLQQEVVSTEQQREGARTLPEDEESFKHQLDKVTAEKLVLEQQVETTNQVMTHMNNVLKEINFKMDQITQSLCNLNKECASNEELPSLPKESVHMTVHELGSDNLQPEDAPAQDVTKPLEKQTSLTRLQKSPEASRTQEIESLASSVGAKDVELTQCREQTETIQEQAQSETDRLQKKLTDLQRSLEKFAAALVSQVQMEAAQEYVPFHQEKQPVSSAPGSTDIQNANGLTGASTESLIPTVTLRLAEVESRVAEVHSGTMSEKLVGIVGGNASETEKRVIELQKLLEEAEERPEEGGEQSSRDGEVRESYMTSLQKDLGQVKDPLTEAKEKLSYSLEKEKRTGEQESREAPIPEPPSVEVGGCSGLTERTDKVSSSGNQTLQILLRDAAIQTDLQSESSQEEVRDTINQLTKKMEHIQELHAAEILDMESRHILETESLKKEHYVAIQLLTKECETLKEMTQCLRCKEGSSIPELADSVAYQSREVYSSDSESDWGQSQGFDTAIEGREEGETSADLFPKKIKGLVKAVHSEGMQVLSLSSPLCDDGEDRSIQQLSESWLKERQAYLNTISSLKDLISKMQVRRETEVYDRCHLSDWRGELLLACQRVFIKERSVLLATFQTELTSLSTRDVDGLLNSLEQRIQEQGIEYHTAMDCLQKADRRSLLAEIEDLRAQINGGKMTLEREQGTEKSSQELLDCSMQQKQSLEMQLELSSLRDRAAELQEQLSSEKMVVAELKSELAQAKLELGTTLKAQHKRLKELEAFRSEVKEKTDEIHFLSDTLAREQKNSLELQWALEKEKARSGHHEGREKEELEDLKFSLEDQKRRNTQLNLLLEQQKQLLNESQQKIESQKMLHDAQLSEEQGRNLGLQALLESEQVRIQEMKSTLDKERELYAQLQSREDGGQPPPALPSEDLLKELQKQLEEKHSRIVELLSETEKYKLDSLQTRQQMEKDRQVHQKTLQTEQEANTQGQKKMQELQSKVEELQRQLQEKRQQVYKLDLEGKRLQGLMQEFQKQELEPEEKPGSRGLVDQNLNEPATWNFTDDRTRNWVLQQKMGEAKDRNFTKLIEINGGELDHNHDLEMIRQTLQHVASKLQHVAQKACSRLQFETAGDDAFIWIQENIDGIILQLQKLTGQPGDEHSLGPPSSSCGSLTESLMRQNTELTRLINQLTEEKNTLRSIVIKLEELNRCYWHTGASRDCCSRFSFIDPADIEAIIASEKEVWNREKLSLQKALKRAEAKVYKLKAELRNDALLRNLGPDTDHAALQKIYNKYLRASSFRKALIYQKKYLLLLLGGFQECEDVTLGVLARMGGHLALKDSKTITNHPKAFSRFRSAVRVSIAISRMKFLVRRWQQVTSTSSININRDGFGLSPGIEKTDPFYHSPGGLQLYGEPRHTMYRSRFDLDYPRSLLPLQNRYPGTPGDLNSISMASSQLHQYNPDKSLTDYVTRLEALRRRLGAIQSGSTTQFHFGMRR

SEQ ID NO: 11 - DNA, 3759 bp, Mus musculus
accgaggccaagccatggcggagctgcagcagttacagcagctgcaggagtttgatatccccacgggccgggaggctctgcggggcaaccacagcgccctgctacgggtggccaactactgcgaggataactacttgcaggccacagacaagcggaaggcgctggaagagacgatggctttcaccacccaggccctagccagtgtggcctaccaagtgggtaacctggccgggcatactcttcgaatgctggatctacagggtgctgccctgcggcaggtagaagccaagatgagcacactgggccagatggtaaacatgcatatggagaaggtagctagaagggagatcggcactttggccactgttgtgcggctgccctctaaccagaaagtcatccctcctgagagcctgccttccctcactccctaccacagaaaacccctcaactttgcctgcttggatgacattggccacggagtcaaggacttgagcacgcagctgtcacggaccgggaccctgtctcgcaagagcataaaggcgcctgctacacctgtttccgccacgctggggagaccaccccggatccctgagccggtgcagctcccagccgtgccagacggcaagctctccgctgcctcctctgcctcttccttggcctcggcaggcagtgcggaaggtgccagtgggatcccccagtccaagggacaggtagcgcctgcaaccccgcctcctccacctgtagcacctgtaaccccgcctcctccaccgttgtctgccgaggtcttcttgccgccccctccgctggaggtgtcccagccccctctggaagcagagttgcccctgcctcctcccccagctctagagggggatgaactggggctgctgcctccgcccccaccaggttttggaccagatgagcccagctgggtccctgctagctacttggagaaagtggtgaccctgtacccatacacccggcaaaaggacaatgagctctccttctctgaaggcaccgtcatctgtgtcactcgccgctactcggatggctggtgtgagggtgtcagttcagagggcactggattcttcccagggaactatgtggagcccagctgctgacagcccaggatctatccctgcaccaaccctgcactgcctcggtgggcctctcgagccccaggaagccagcttccacagtcaaagctggactaaggacctgtctacctcttgggctgtgaactgtgttcagtccctgctccatacagcagtgggaagagggtgggctagagaggggtggtactcaggggggactgctgcagatggcataaagaatacaaaaacaaacaaacctagaaggcaaggagtttaagcaccttgcccagaggacccccagctcatgctcagaagatcgccagctttgaataaaactgctgacctcctggtagttgctccaaagggctagaaggccagacagggagtgatggaaagggaacacggaagccctgcagtctgccccagaaggactctcaatctcaaccctctttactcttcccattaggcccctgacgtcacaagcagccattcgctgggctcttcacgccctcactacttaaataggactccctgagagcagagagcacctctctttcatccccccttctcactgtggcacaagagaacaagtccctttgtcccccttcacctcctttattggtctgaaactccagagaggggaagggcttgggtttccctggctctgcttaaaaacatggctttctgttccataagggcaaaggggaatgcaaggggggaggggtgcggggggggaggggacgactttggtgaagtccctggtctcttgctggagtgctaggatttttcacactctccgaggtcagtggtcggttcttctacctcgttctaccagcaggaggcggtagttccttctgactttttcttcctttgggtgggtggggggtgtctggtgggcgggggtggggtgggggtggagagggggaaggaagcaaggcgcagccagcgcagcggtagtgtagggttgcgttggctgaagcaagatcaagacctagagctgtcttctgagagcatcataggtctgccgcgaggaatctggtactggcatgcggattgggggatcctgagtccgtttgaaagactgggcagaggaggttatgcagccggtacagcagctaaagtaagtgggagatgttccttctcccaacttccaggaacccgttcctctcagttcgaggggcactgcctgccttccaaggggtgctcacctccctggagggaaggcagcagagctgtgttaactgcatagatagggacggctctgaacccctgctcccagcccacaagcagactgaattccagatatgcccggaggagcatagcaaagcgaaaggaaagaggagggtagtaaaactaggtgatcctaaccaatccccagtcccgtccctcctccgtcggttgtcccgagcacccctggcaggcgatggtcttcaacacatcttcagcacctgttgcagatgttggcgcacatcggcggctgtttcccagggcaccacgtgggcgcggaaggagctgggctcagctttctgtgcctcctggatgaggcggtgcatggggtagccgcggcgcgggaaggccacgtccccgcccgccagcagccccatggggcaaaagtcatttgcaccatcacccacgtagaagaggcgctcgaagtgcacgccgtcgcgggcccgctcacgcaggtattcgctgagcaccttgtgcttgcacatgttggccgggcagcgcgagcagctgtgcgtgtggaagggccgcagcgtcagcagtccccgcgcgtcgggccccgacgggttgctgaggatgcggcggaataaactgtggtggccagcggcacgcagggcactctccacaccgaaggtgttggcatccgaaatgagaataacctcgaagcaggagccctgtttggctatgaactgcaacaaatcgcccatgcctggcgacagggggatggtctcgtagacagcgcgcaggtcccggggccgtacaccctgctcacccaggtacttaaagactcgttgcatgtactcattgtagtagccctcgcgataggtggcacgcaggctctcgggcagttgctggcctggcgcggcacgcacgatcgagtcgtcgctgttctcgtccacgatggtctcatcgaagtcgaaggtgaggaggaagcgaggcgcgcccggcgcagccatcctgccgtcctgggagcagggggaagaggagcaggaggaggaggcaagcgagaggcggcgcggcgggagccggccagggagaagctgattagcgggccacagccagggtcgctggcacatccaagacctgaggaggacccaaggctggttaagcaggagatggaaccaatgtgctgcccacaccccgccgtcccttgcctgtctctcagttaatcgtgctggggtcgacgcaagggggccatactagtcttgaagccaaaagcttccttggcttcggtttctgctgctctcataggatcccttaagagaggggatgactcgtcaaggatcactccttgagactcctcaactgggttggaggtttctggtgtcagagcagagtagacagcagattcatgtacccagggggagcagcctccttttcccgtgatccccctgggatcaagaataaatggaggagccaggctcctggaaaagccattgacatc

SEQ ID NO: 12 - protein, 367 aa, Mus musculus
MAELQQLQQLQEFDIPTGREALRGNHSALLRVANYCEDNYLQATDKRKALEETMAFTTQALASVAYQVGNLAGHTLRMLDLQGAALRQVEAKMSTLGQMVNMHMEKVARREIGTLATVVRLPSNQKVIPPESLPSLTPYHRKPLNFACLDDIGHGVKDLSTQLSRTGTLSRKSIKAPATPVSATLGRPPRIPEPVQLPAVPDGKLSAASSASSLASAGSAEGASGIPQSKGQVAPATPPPPPVAPVTPPPPPLSAEVFLPPPPLEVSQPPLEAELPLPPPPALEGDELGLLPPPPPGFGPDEPSWVPASYLEKVVTLYPYTRQKDNELSFSEGTVICVTRRYSDGWCEGVSSEGTGFFPGNYVEPSC

SEQ ID NO: 13 - DNA, 1438 bp, Mus musculus
accgaggccaagccatggcggagctgcagcagttacagcagctgcaggagtttgatatccccacgggccgggaggctctgcggggcaaccacagcgccctgctacgggtggccaactactgcgaggataactacttgcaggccacagacaagcggaaggcgctggaagagacgatggctttcaccacccaggccctagccagtgtggcctaccaagtgggtaacctggccgggcatactcttcgaatgctggatctacagggtgctgccctgcggcaggtagaagccaagatgagcacactgggccagatggtaaacatgcatatggagaaggtagctagaagggagatcggcactttggccactgttgtgcggctgccctctaaccagaaagtcatccctcctgagagcctgccttccctcactccctaccacagaaaacccctcaactttgcctgcttggatgacattggccacggagtcaaggacttgagcacgcagctgtcacggaccgggaccctgtctcgcaagagcataaaggcgcctgctacacctgtttccgccacgctggggagaccaccccggatccctgagccggtgcagctcccagccgtgccagacggcaagctctccgctgcctcctctgcctcttccttggcctcggcaggcagtgcggaaggtgccagtgggatcccccagtccaagggacaggtagcctgcaaccccgcctcctccacctgtagcacctgtaaccccgcctcctccaccgttgtctgccgaggtcttcttgccgccccctccgctggaggtgtcccagccccctctggaagcagagttgcccctgcctcctcccccagctctagagggggatgaactggggctgctgcctccgcccccaccaggttttggaccagatgagcccagctgggtccctgctagctacttggagaaagtggtgaccctgtacccatacacccggcaaaaggacaatgagctctccttctctgaaggcaccgtcatctgtgtcactcgccgctactcggatggctggtgtgagggtgtcagttcagagggcactggattcttcccagggaactatgtggagcccagctgctgacagcccaggatctatccctgcaccaaccctgcactgcctcggtgggcctctcgagccccaggaagccagcttccacagtcaaagctggactaaggacctgtctacctcttgggctgtgaactgtgttcagtccctgctccatacagcagtgggaagagggtgggctagagaggggtggtactcaggggggactgctgcagatggcataaagaatacaaaaacaaacaaacctagaaggcaaggagtttaagcaccttgcccagaggacccccagctcatgctcagaagatcgccagctttgaataaaactgctgacctcctg

SEQ ID NO: 14 - protein, 285 aa, Mus musculus
MAELQQLQQLQEFDIPTGREALRGNHSALLRVANYCEDNYLQATDKRKALEETMAFTTQALASVAYQVGNLAGHTLRMLDLQGAALRQVEAKMSTLGQMVNMHMEKVARREIGTLATVVRLPSNQKVIPPESLPSLTPYHRKPLNFACLDDIGHGVKDLSTQLSRTGTLSRKSIKAPATPVSATLGRPPRIPEPVQLPAVPDGKLSAASSASSLASAGSAEGASGIPQSKGQVACNPASSTCSTCNPASSTVVCRGLLAAPSAGGVPAPSGSRVAPASSPSSRGG

SEQ ID NO: 15 - DNA, 2153 bp, Mus musculus
cgtcacttcccctggcctgaggccgctatccggacaaacttcactgagcgaaagaggcagggccatggccttaggggcgctgcttctgcttctaggggtactcgggacgcccctcgccccaggcgcccgcgggtcggaagccgaaggccaactgattaagaaacttttctccaactatgatagctcggtgaggccggcgcgggaggtgggagaccgcgtcggggtcagcatcggcctcaccctggcgcaactcatcagcctgaacgagaaggatgaagaaatgagcacaaaggtgtacttagacctggagtggaccgactacaggttaagctgggaccccgcagaacatgatggcatcgattctctccgcatcactgctgaatccgtttggctccctgatgtggtgctgctgaacaacaatgacggaaatttcgacgttgccctggacatcaatgttgtggtatctttcgagggctctgtgcgctggcaaccccctggcctgtaccgcagcagctgcagcatccaggtcacctacttcccctttgactggcagaactgcaccatggtgtttagttcctacagctatgacagctctgaggtcagcctgaagacgggcctggatcctgaaggagaggagaggcaggaagtctacattcatgaagggaccttcattgagaatggccaatgggagattatccacaaaccttctaggttaatccaacttccaggggatcagagaggtgggaaggaagggcatcatgaggaagttatcttctatctcattattcggcggaagcctctcttctacctggtcaacgtcattgccccatgcatcctcatcacgctcctggccatctttgtcttctacctcccaccagatgcaggagagaagatggggctctccatctttgccctgctgacgctcactgtgttcttgctgctgttggccgacaaagtgcctgagacctccctggcggtgcccatcattatcaagtacctcatgtttaccatggtccttgtcaccttctccgttatccttagtgttgtggtcctcaacctgcatcatcgctcaccccacacccaccaaatgcccttttgggtccgccagatcttcattcacaagctccctccatacctgggtctgaagaggcccaaacccgagagagaccaactccctgaaccacatcactctctttctccaagaagtggctggggcagaggaactgatgaatatttcatccggaagcctccaagtgattttcttttccctaaacttaacaggtttcagcctgaatcatctgccccggacctgcgacgatttatcgatggtccaacccgggctgtaggtctgcctcaggagctacgagaggtcatttcctcaatcagctacatggcccgacagcttcaggaacaggaggaccacgacgcactgaaggaggactggcagtttgtggccatggttgtggaccgtctttttctgtggacattcatcgttttcacaagcgtcgggaccctagtcattttcctagatgccacgtaccatttgccccctcctgaacctttcccttgaggaccctccggtcatttttgccaaatgctgcaggtactctcaagctcaatagcgcttggcgcttgtaagaatcttgtttctgggaagacgttcaagtgagacttggaggctgagcatggtgccttggacccacccgaaatgtccttctacttattatttagagttttgttcttctgcggttttgtttttgttgtttttgagacagagtctcactctgtggcccaggctagcctggaactgtggcgtccaggctggtctcaaactcccaacaatgttacttccttagcctagcaattgttggaatcacagacctggtaaaccagcacacttggagtttgtttcttgaaactacatagaatgtcacagcttagatctctagtgaaatagaattataaccaagtagtagactgtaagccttttgaggacaggagatctgttggctactgaattatccccagcaatgtgtacaggtcctagcccataagtgcttaacatttgttgaagagagggaaaataaatctggaaggaaatataaatatcgcctacaattgcacgtattaaaattaaaatgtagaaaatgatt

SEQ ID NO: 16 - protein, 501 aa, Mus musculus
MALGALLLLLGVLGTPLAPGARGSEAEGQLIKKLFSNYDSSVRPAREVGDRVGVSIGLTLAQLISLNEKDEEMSTKVYLDLEWTDYRLSWDPAEHDGIDSLRITAESVWLPDVVLLNNNDGNFDVALDINVVVSFEGSVRWQPPGLYRSSCSIQVTYFPFDWQNCTMVFSSYSYDSSEVSLKTGLDPEGEERQEVYIHEGTFIENGQWEIIHKPSRLIQLPGDQRGGKEGHHEEVIFYLIIRRKPLFYLVNVIAPCILITLLAIFVFYLPPDAGEKMGLSIFALLTLTVFLLLLADKVPETSLAVPIIIKYLMFTMVLVTFSVILSVVVLNLHHRSPHTHQMPFWVRQIFIHKLPPYLGLKRPKPERDQLPEPHHSLSPRSGWGRGTDEYFIRKPPSDFLFPKLNRFQPESSAPDLRRFIDGPTRAVGLPQELREVISSISYMARQLQEQEDHDALKEDWQFVAMVVDRLFLWTFIVFTSVGTLVIFLDATYHLPPPEPFP

SEQ ID NO: 17 - DNA, 3000 bp, Mus musculus
ccggcgggcagcgcactatgcggctcgagtgggcgcccttgttgctgctactgctgctgctgagcgcgtcctgcctgtccctggccgctgacagccccgccgcggcacctgcccaggataaaaccaggcagcctcaggctgcagcagcggccgccgagccggaccagccgcagggggaggaaacacgggagcgaggccatttacaacccttggccgggcagcgcaggagcggcgggctggtccagaatatagaccaactctactctggcggtggcaaagtgggctaccttgtctacgcgggcggccggaggttcctgctggacctggagagagatgacacagtgggtgctgctggtagcatcgttactgcaggaggagggctgagcgcatcctctggccaccggggtcactgtttctacagaggcaccgtggacggcagccctcgatccctagctgtctttgacctctgcgggggtctcgatggcttctttgcagtcaagcatgcgcgctacactctaaagccactcctgcgtgggtcctgggcagagtatgaacgaatttatggggatggatcttcccgcatcctgcatgtctacaaccgcgagggctttagcttcgaggccctgccgccacgcgccagttgcgagactcctgcatccccatctgggccccaagagagcccctcggtgcacagtagatctaggagacgctcagcgctggccccgcagctgctggaccactcagctttctcgccatctgggaacgcgggacctcagacttggtggaggcgtaggcgccgttccatctccagggcccgccaggtggagctcctcttggtggctgactcgtccatggccaggatgtatgggcggggcctgcagcattacctgctgaccctggcctccatcgccaacaggctgtacagtcatgcaagcattgagaaccacatccgcctggcggtggtgaaggtggtggtgctgacggacaaggacacgagtctggaggtgagcaagaatgcggccacgaccctcaagaacttttgcaaatggcagcaccaacataaccagctaggggatgatcacgaagagcactacgatgcagccatcctgttcacccgagaggatttatgtgggcatcattcatgtgacaccctgggaatggcagacgttgggaccatatgttctccggagcgcagctgtgcagtgattgaagatgatggcctccatgcagccttcactgtggctcatgaaattgggcatctacttggcctttctcatgacgattccaaattctgtgaagagaacttcggtactacagaagacaagcgtttaatgtcttcaatccttaccagcatcgatgcatccaagccctggtccaaatgcacgtcagccaccatcacagaattcctggatgatggtcatggtaattgtttgctagacctaccacggaagcagattttgggtcccgaggaactcccaggacagacctacgatgccacccagcagtgcaacttgacatttgggcctgagtactcggtgtgccctggcatggatgtctgtgcgcggctgtggtgtgctgtggtgcgccaaggccaaatggtgtgtctgaccaagaagctgccggctgtggagggcactccctgtgggaagggaagagtctgccttcaaggcaaatgtgtggacaaaactaagaaaaaatattactcgacatcaagccatggaaattgggggtcctggggcccctggggtcagtgttctcgctcatgcgggggaggagtgcagtttgcctaccgccattgtaataaccctgcacctcgaaacagtggccgctactgcacagggaagagggccatataccgttcctgcagtgttacaccctgcccacccaatggtaaatcttttcgccatgagcagtgtgaagccaaaaatggctatcagtctgatgcaaaaggagtcaaaacatttgtagaatgggttcccaaatatgcaggtgtcctgccggcagatgtgtgcaagcttacctgcagagctaagggcacaggctactatgtggtcttttctccaaaggttacggatgggactgaatgcaggccgtacagcaactctgtgtgtgtccgaggacggtgtgtgagaactggatgtgacggcattattggctcaaagctacaatatgacaagtgtggagtgtgcggaggggataactccagttgtacaaagattatcggaaccttcaataaaaaaagcaagggttatactgacgttgtgaggatccctgaaggagcaacccacataaaagtccgacagttcaaagccaaagaccagactagattcactgcctacttagccctgaagaagaaaactggcgagtaccttatcaatggcaagtacatgatttccacttcagagaccatcatcgacatcaatggtaccgtcatgaactacagtggatggagccacagagatgattttttacatgggatgggctattcagccacaaaagaaatcctgatcgtgcagatccttgccacagacccaactaaagcgctagacgtccgttacagcttttttgttcccaagaagaccactcaaaaagtaaactctgtcatcagccatggcagcaacaaggtgggaccacactctacacagctgcagtgggtgacaggtccatggctggcctgctccaggacctgtgacacaggctggcacactaggaccgtgcagtgccaggatggaaacaggaaattagctaaaggatgccttctctctcagaggccttctgcatttaagcaatgtctgctgaagaaatgttagcctgtggtttactctaatgcacaaaaaaacaacaggaggatcatcgcagatacagctgtggtgaagacaaggcctacccaaagcacagaaagtcatgccttcatgtcattgtcaccacgagtcgaattatgggcagaatctgctctctgcgaccaaaaggtttactctacttggtgtaatgatggtgacc

SEQ ID NO: 18 - protein, 930 aa, Mus musculus
MRLEWAPLLLLLLLLSASCLSLAADSPAAAPAQDKTRQPQAAAAAAEPDQPQGEETRERGHLQPLAGQRRSGGLVQNIDQLYSGGGKVGYLVYAGGRRFLLDLERDDTVGAAGSIVTAGGGLSASSGHRGHCFYRGTVDGSPRSLAVFDLCGGLDGFFAVKHARYTLKPLLRGSWAEYERIYGDGSSRILHVYNREGFSFEALPPRASCETPASPSGPQESPSVHSRSRRRSALAPQLLDHSAFSPSGNAGPQTWWRRRRRSISRARQVELLLVADSSMARMYGRGLQHYLLTLASIANRLYSHASIENHIRLAVVKVVVLTDKDTSLEVSKNAATTLKNFCKWQHQHNQLGDDHEEHYDAAILFTREDLCGHHSCDTLGMADVGTICSPERSCAVIEDDGLHAAFTVAHEIGHLLGLSHDDSKFCEENFGTTEDKRLMSSILTSIDASKPWSKCTSATITEFLDDGHGNCLLDLPRKQILGPEELPGQTYDATQQCNLTFGPEYSVCPGMDVCARLWCAVVRQGQMVCLTKKLPAVEGTPCGKGRVCLQGKCVDKTKKKYYSTSSHGNWGSWGPWGQCSRSCGGGVQFAYRHCNNPAPRNSGRYCTGKRAIYRSCSVTPCPPNGKSFRHEQCEAKNGYQSDAKGVKTFVEWVPKYAGVLPADVCKLTCRAKGTGYYVVFSPKVTDGTECRPYSNSVCVRGRCVRTGCDGIIGSKLQYDKCGVCGGDNSSCTKIIGTFNKKSKGYTDVVRIPEGATHIKVRQFKAKDQTRFTAYLALKKKTGEYLINGKYMISTSETIIDINGTVMNYSGWSHRDDFLHGMGYSATKEILIVQILATDPTKALDVRYSFFVPKKTTQKVNSVISHGSNKVGPHSTQLQWVTGPWLACSRTCDTGWHTRTVQCQDGNRKLAKGCLLSQRPSAFKQCLLKKC

SEQ ID NO: 19 - DNA, 3394 bp, Mus musculus
gtgagtagtagccatcccacccaggttccctcctggagcctagctttgctgagagaacttctggagcttgacccaaagcgggcaggggctccgggctggggcggggaagaccatggcccgcctcttcagtccccggcctcctcccagcgaagatctcttctacgaaacttactacagcctgagccaacagtacccactgctgatactgcttttggtcattgtgctctgcgcgctggtggcactgcccgccgtcgcctgggccagcggcagggagctgacctcagacccaagcttcctgacaactgtgctgtgtgctttgggtggcttctctctgctattggggcttgcttcccgggagcagcaactgcagcgatggacacgacctctttctggtctcatatgggttgcattactggctctgggctatggatttctgttcactgggggtgtggtgagcgcctgggaccaggtgtcttttttcctcttcatcatcttcaccgtgtacgccatgctgcccttgggcatgcgggatgctgctgctgcgggagtcatctcatccctctcgcacctgctggtccttggactgtatcttgggtggcagcctgagtcacagagagctctgctaccacagttggcagcaaacgcggtattgttcctgtgtgggaacgtggtgggagcgtaccacaaggccctgatggagcgagcattgcgggccacgttccgggaggctcttagctctctgcactcacgccggaggctggacactgagaaaaagcaccaggagcacctcctcttgtctatccttcctgcctacctggcccgagagatgaaagcagagatcatggcccggctgcaggctggacagcgctcacggccagagaacacaaacaactttcacagcctgtatgtcaagaggcaccaaggagtgagtgtgctgtatgctgacatcgtgggcttcacgcggctggccagcgagtgttccccgaaggagctggtgctcatgctgaatgagctctttggcaagttcgaccaaattgccaaggagcacgaatgcatgcggatcaagatcctgggagactgttactactgtgtctccgggctgcccctctcgctgcctgaccacgctatcaattgtgtgcgcatggggctggacatgtgccgggccatcaggaaacttcgggtagccaccggtgtggatatcaacatgcgtgtgggcgtgcactcgggcagcgttctctgtggagtcattgggctacagaagtggcagtatgatgtctggtcccatgatgtcacattggccaaccatatggaagcaggcggtgtaccaggacgagtgcacatcacaggggccacgctggccctgctagcaggagcttatgctgtggagagggcagacacggaacaccgagacccataccttcgggagctaggagaacctacatacctggtcattgatcctcgggctgaggaggaagacgagaagggcaccgcaaaaggattgctgtcttctctggaggggcacacgatgcgtccgtcactactgatgactcgctatctggagtcttggggtgcagccaagcctttcgcccacctaagccaccttgacagtcccgtgtccacctccactccactcccggagaaagccttcagcccccagtggagcctggaccggagtcgcaccccccggggactagatgatgaactggacactggtgatgctaagttcttccaggtcatcgaacaactcaactctcagaaacagtggaagcagtcgaaggacttcaacctcctgacgctgtacttcagagagaaggagatggagaaacagtatcggctctctgcactccccgccttcaaatactacgcagcctgcaccttcctggtttttctgtccaacttcactatccaaatgctggtgacaaccaggcccccagctctgatcatcacctacagcatcaccttccttctcttctttctcctcctcttcgtctgcttctcagagcacctgacgaagtgtgtccagaaaggtcccaagatgttgcactggctgcctgcactgtctgtcctggtggccacacggccaggatttcgagtagccctgggtacggccaccatcctcctggtattcactatggccatcgccagcctgctcttcttaccagtgtcatcagactgccttttcctggcttccaatgtgtcatctgtgactttcaatgcttcctgggagatgccaggatccctgcccctcatcagcatccccctcatcagcatcccatactccatgcattgctgcgtgttgggtttcctctcctgctccctttttctgcacatgagcttcgaactgaagctgctcctacttctgctgtggctggtggcatcttgttccctatttctgcattcccacgcctggctgtctgactgcctcattgcccgcctttatcaaagcccttcggactccagaccaggggtactgaaggaacccaagctgatgggagcgatctacttcttcatcttcttcttcacactcctggtcctggctcggcagaatgagtattactgccgcctggacttcctgtggaaaaagaaactgaggcaggagcgagaggagactgagacaatggagaacctgacccggctcctcctggagaatgtactccctgcacacgtggccccccagttcatcggccagaaccggcgcaatgaggacctctaccaccagtcgtacgaatgcgtttgtgtcctcttcgcgtcggtcccagactttaaggaattctactctgaatccaacatcaaccacgaggggctggagtgcctgcggctgctcaatgagatcattgctgactttgatgagctgctctccaagccaaagttcagtggagtagagaagatcaaaactattggcagtacctacatggcggccacaggcttaaatgccacctctggacaggatactcagcaggattctgagagaagctgcagtcatctgggcaccatggtggaatttgcagtggccctggggtctaagctgggagtcatcaacaagcactcgttcaataacttccgcctgcgtgtggggttgaaccacggaccagtagtagcaggggtgattggggcgcagaagccacagtacgacatctgggggaacacagtgaatgtggccagccgaatggagagcacaggcgttctcggcaagatccaagtgactgaggagacagcgcgggccctgcagtccctgggttacacgtgctatagcagaggcagcatcaaggtcaaaggcaaaggggaactctgtacctacttcctgaacacagacctgacgcggaccggatctccctcagcatcctaggcacctgagctcccctcttcgaagatcctcaataaaatgtctccgagc

SEQ ID NO: 20 - protein, 1077 aa, Mus musculus
MARLFSPRPPPSEDLFYETYYSLSQQYPLLILLLVIVLCALVALPAVAWASGRELTSDPSFLTTVLCALGGFSLLLGLASREQQLQRWTRPLSGLIWVALLALGYGFLFTGGVVSAWDQVSFFLFIIFTVYAMLPLGMRDAAAAGVISSLSHLLVLGLYLGWQPESQRALLPQLAANAVLFLCGNVVGAYHKALMERALRATFREALSSLHSRRRLDTEKKHQEHLLLSILPAYLAREMKAEIMARLQAGQRSRPENTNNFHSLYVKRHQGVSVLYADIVGFTRLASECSPKELVLMLNELFGKFDQIAKEHECMRIKILGDCYYCVSGLPLSLPDHAINCVRMGLDMCRAIRKLRVATGVDINMRVGVHSGSVLCGVIGLQKWQYDVWSHDVTLANHMEAGGVPGRVHITGATLALLAGAYAVERADTEHRDPYLRELGEPTYLVIDPRAEEEDEKGTAKGLLSSLEGHTMRPSLLMTRYLESWGAAKPFAHLSHLDSPVSTSTPLPEKAFSPQWSLDRSRTPRGLDDELDTGDAKFFQVIEQLNSQKQWKQSKDFNLLTLYFREKEMEKQYRLSALPAFKYYAACTFLVFLSNFTIQMLVTTRPPALIITYSITFLLFFLLLFVCFSEHLTKCVQKGPKMLHWLPALSVLVATRPGFRVALGTATILLVFTMAIASLLFLPVSSDCLFLASNVSSVTFNASWEMPGSLPLISIPLISIPYSMHCCVLGFLSCSLFLHMSFELKLLLLLLWLVASCSLFLHSHAWLSDCLIARLYQSPSDSRPGVLKEPKLMGAIYFFIFFFTLLVLARQNEYYCRLDFLWKKKLRQEREETETMENLTRLLLENVLPAHVAPQFIGQNRRNEDLYHQSYECVCVLFASVPDFKEFYSESNINHEGLECLRLLNEIIADFDELLSKPKFSGVEKIKTIGSTYMAATGLNATSGQDTQQDSERSCSHLGTMVEFAVALGSKLGVINKHSFNNFRLRVGLNHGPVVAGVIGAQKPQYDIWGNTVNVASRMESTGVLGKIQVTEETARALQSLGYTCYSRGSIKVKGKGELCTYFLNTDLTRTGSPSAS

SEQ ID NO: 21 - DNA, 2008 bp, Mus musculus
aggcagggcactcactggccccagcgcccaccacaccctcccccaggagtgctgacctagctcccagatctcagcaggatggaagagaagctgaagaaggccaagatcatctttgtggtgggcggacctggctcaggaaagggcacccagtgcgagaagattgtacagaaatatggctacacccacctgtctactggggacctgcttcgggcagaagtcagctctggatcggagaggggcaagaagctgtcggctatcatggagaagggagagctagtgccactggacacggtgctggacatgctccgagatgctatgttagccaaagtggattcttccaatggcttcctgatcgacggctacccgagggaggtgaaacagggagaagaatttgaacagaagattggacagcccacactgctgctgtatgtggacgcaggcgccgagaccatgacccaacgactcctgaagcgaggggagaccagtggccgcgtggatgacaacgaggagaccatcaagaagcggctggagacttattacaatgccacagaacctgtcatctccttctatgacaagcgtggcattgtgcgcaaggtcaatgccgaaggcacggtggacactgtcttctctgaggtctgcacctatcttgactccctgaagtaactggatcccttggccagctcccagcccgccccacccttgctccctgaccccaggcagcctggctcaagcccagcacctccaccctgccgggctgtgcacagacacaggaagccatgttatcctgtcccatggacactaaagaaattgccaaggagggttaggattgctcctttcctttgcttccagttatggtgattcatgctgccacagccggaggccccagcgtggccggcccattcttccctgtgcctcagcccagctgtcttgtctccctctggctctgctgggatcctaggcccttccttagccaggctgtgtcaaagcctaggggtccctgggttggcaggctgctctggggggtctggtgttcaccctgtttctcatagcctcgttgtgtggctttggccctaagccattgtctctctggagtgagttttctttttttctttctttctttttcttttttttctttctctgtttctttctttttttttttttttaagacagcatctcgtgtgacttaagctggcctcaaccctgttatgtaactaagggcaaccttaatccttctgcctccacttgtcttcctgtgtgctgagattacaggtgtgtgtgtggacctccaccactcctggttttgggggcactgggaatcaagcccatggccctgtatacgaggccagcacgctacagagtgagctgcatcccgggctgggcaggttttctgtgcctgactggggtctggcatgggcaaagggcaaagggccatgggctcaccagctggggccacgtggtcactgggtgccaaggagctgtgcaatgggcatacagctaggtgggaagctggggtcaggggtggccttcctgaagaaggctcccttggtatagacctgccaggccttgccatcctttggctggttttaaagcttgtcctgtcacgctatgtcccaacccttatcctcggcgttaagacaagagcatgcagattaaggagtgtgagctgccatagacaaggatgtgggatcaaggaccaggcctgggacccggagaggacacccagggatgccaagaagagctggcatctctcttctgctctttattctttggtctcattacacaggaagcctctgttggtactcacttgtcctggggccccgtctccatccctagtgacttcccctgtaagcccagatagcctgtaagccagcagccatggctgtcccagggacacctgcccctgggggtgacggtgctcactcctttctgtttactaccagtggggccacctttccttctgcattgcctatttaagctgtcctttaaaataaataaatgtatttcagtt

SEQ ID NO: 22 - protein, 194 aa, Mus musculus
MEEKLKKAKIIFVVGGPGSGKGTQCEKIVQKYGYTHLSTGDLLRAEVSSGSERGKKLSAIMEKGELVPLDTVLDMLRDAMLAKVDSSNGFLIDGYPREVKQGEEFEQKIGQPTLLLYVDAGAETMTQRLLKRGETSGRVDDNEETIKKRLETYYNATEPVISFYDKRGIVRKVNAEGTVDTVFSEVCTYLDSLK

SEQ ID NO: 23 - DNA, 2403 bp, Mus musculus
atgggctgctgtgtgtctagtgaaccccaagaagagggaggcagaaagactggagagaagctgaagaaggccaagatcatctttgtggtgggcggacctggctcaggaaagggcacccagtgcgagaagattgtacagaaatatggctacacccacctgtctactggggacctgcttcgggcagaagtcagctctggatcggagaggggcaagaagctgtcggctatcatggagaagggagagctagtgccactggacacggtgctggacatgctccgagatgctatgttagccaaagtggattcttccaatggcttcctgatcgacggctacccgagggaggtgaaacagggagaagaatttgaacagaagattggacagcccacactgctgctgtatgtggacgcaggcgccgagaccatgacccaacgactcctgaagcgaggggagaccagtggccgcgtggatgacaacgaggagaccatcaagaagcggctggagacttattacaatgccacagaacctgtcatctccttctatgacaagcgtggcattgtgcgcaaggtcaatgccgaaggcacggtggacactgtcttctctgaggtctgcacctatcttgactccctgaagtaactggatcccttggccagctcccagcccgccccacccttgctccctgaccccaggcagcctggctcaagcccagcacctccaccctgccgggctgtgcacagacacaggaagccatgttatcctgtcccatggacactaaagaaattgccaaggagggttaggattgctcctttcctttgcttccagttatggtgattcatgctgccacagccggaggccccagcgtggccggcccattcttccctgtgcctcagcccagctgtcttgtctccctctggctctgctgggatcctaggcccttccttagccaggctgtgtcaaagcctaggggtccctgggttggcaggctgctctggggggtctggtgttcaccctgtttctcatagcctcgttgtgtggctttggccctaagccattgtctctctggagtgagttttctttttttctttctttctttttcttttttttctttctctgtttctttctttttttttttttttaagacagcatctcgtgtgacttaagctggcctcaaccctgttatgtaactaagggcaaccttaatccttctgcctccacttgtcttcctgtgtgctgagattacaggtgtgtgtgtggacctccaccactcctggttttgggggcactgggaatcaagcccatggccctgtatacgaggccagcacgctacagagtgagctgcatcccgggctgggcaggttttctgtgcctgactggggtctggcatgggcaaagggcaaagggccatgggctcaccagctggggccacgtggtcactgggtgccaaggagctgtgcaatgggcatacagctaggtgggaagctggggtcaggggtggccttcctgaagaaggctcccttggtatagacctgccaggccttgccatcctttggctggttttaaagcttgtcctgtcacgctatgtcccaacccttatcctcggcgttaagacaagagcatgcagattaaggagtgtgagctgccatagacaaggatgtgggatcaaggaccaggcctgggacccggagaggacacccagggatgccaagaagagctggcatctctcttctgctctttattctttggtctcattacacaggaagcctctgttggtactcacttgtcctggggccccgtctccatccctagtgacttcccctgtaagcccagatagcctgtaagccagcagccatggctgtcccagggacacctgcccctgggggtgacggtgctcactcctttctgtttactaccagtggggccacctttccttctgcattgcctatttaagctgtcctttaaaataaataaatgtatttcagttataagaagtgagtgtattgaaacacagggaggttcagaggaagagggcaggcatcaccaggcacagccttctgcctgatcaggtttgcctctgtcccccagggtgacttcaggaaagcaaaaggctctggagccccgcaccagtctgtgacagctctgctccaatgctgtgtgcatgtgcatatacacacagacacgcatgagcgcacataggcatgtgcacacatgcacacgcacactgcagccccgctgaacatggatctcttaaggccggcctaggagcagacagaggatgcacagaagaggggaaagctggagaaaacggcctgaaaaatccccattatcttaatgtgctaattacagctcaattaattcaagtgggtcccagtttatgaagacctggctgattaaactagaaaattctcc

SEQ ID NO: 24 - protein, 210 aa, Mus musculus
MGCCVSSEPQEEGGRKTGEKLKKAKIIFVVGGPGSGKGTQCEKIVQKYGYTHLSTGDLLRAEVSSGSERGKKLSAIMEKGELVPLDTVLDMLRDAMLAKVDSSNGFLIDGYPREVKQGEEFEQKIGQPTLLLYVDAGAETMTQRLLKRGETSGRVDDNEETIKKRLETYYNATEPVISFYDKRGIVRKVNAEGTVDTVFSEVCTYLDSLK

SEQ ID NO: 25 - DNA, 1395 bp, Mus musculus
aggcgaagctcgcgaagcagaggaacatggacgtgaacctcgccccgctccgtgcctgggacgatttcttcccgggctctgatcgtttcgcccggccggacttcagggacatttccaaatggaacaaccgtgtagtgagcaatctgctctattaccagaccaactacctggtggtggctgccatgatgatttcggttgttgggtttctgagccccttcaacatgatcctcggaggagtcattgtggtgctggtgttcatggggttcgtgtgggcagcgcacaataaagacatcctccgccggatgaagaagcagtacccaacggccttcgtgatggtggtcatgctagccagctacttcctcatatccatgttcgggggtgtcatggtctttgtgttcggcatcactcttcctttgctgttgatgttcatccacgcatccctgagacttcgcaacctcaagaacaagctggaaaataaaatggagggaatcggcctgaagaaaactccgatgggcattatcctggatgccttggaacagcaggaagataacatcaacaaatttgctgactacatcagcaaagcgagggagtaagcacagcccgcccagtgacggggccccgcagcaggaatccggttgcactttcccccttgttcagacccattttcagtctgtggtttttaaacagaaggtgcacgtcttaccacccacctctccaaggcatcatgcatgcacaggcccactgctaagatctccgatatgacccatagaaggcctcagaaactgcaaaaatacagacccactctcccgttgtgtctgaagtgtccggtgtgcttttgaaaaagagtgtggattagacggccacagtgccatcttatcgtagggaagaagtccctgtagagcctggaggcaatgtggaggacatgaagatcagttaaagtcgaggatgttgtgtgtcagcctgtttctaatgctgtctgacatcccctccaaaatcccctaagactctgatgtgtcgggtatgttagtttagcggtattatttttgttgttttaaaaccagaggctatcacttgggcacctgtttgatgtgcagtggaaactgggtcagccagttgtttatattttgtttacgaatatgaaggtagctgtttaggacaatgttttgttaaattttgtaaaatttttaaaagggttagtaatatgctttcaccagcaggtgtttcttgcaaactaaatgtcaacctcctggggtaggggtggggggtggggggatggttacaactctgtaacttctgttattcttgttaagaataaatacaatagaaccaaacttgagttctgtctatatggcacatttttcgttactacaacaataaaagggtgtccaagataat

SEQ ID NO: 26 - protein, 188 aa, Mus musculus
MDVNLAPLRAWDDFFPGSDRFARPDFRDISKWNNRVVSNLLYYQTNYLVVAAMMISVVGFLSPFNMILGGVIVVLVFMGFVWAAHNKDILRRMKKQYPTAFVMVVMLASYFLISMFGGVMVFVFGITLPLLLMFIHASLRLRNLKNKLENKMEGIGLKKTPMGIILDALEQQEDNINKFADYISKARE

SEQ ID NO: 27 - DNA, 1181 bp, Mus musculus
gcggccgccgggtaagcgcacgccgggaggaggccgagttgaccccagctaaatcccgggtggcgtccagctccccagccctagagggggacaaatcgggaacctggcgcggcttcagggtttccctggcaggatggacgtgggaagccacggggcgcgaaacaaaccagaagctgtagaagtaacatttgcagattttgatggcgtcctttatcatatttcaaatcctaatggagacaaaacaaaagtgatggtcagtatttctttgaaattctacaaggaacttcaggcacatggagctgatgagttgttaaagagagtgtatgggagcttcttggtaaatccagaaccaggatataatgtttctttgctatatgacctggaaaatctacctgcatccaaggattctattgtgcatcaggctggcatgttgaagcgaaattgttttgcctctgtgtttgagaaatacttccaattccaagaagagggcaaagaaggagagaacagagcagttatccattatagggatgatgagaccatgtatgtggaatctaagaaagacagagtcacagtagtcttcagcacggtttttaaagatgacgacgatgtggtcatcggaaaggtgttcatgcaggagttcaaagaaggacgaagagccagccacacagccccccaggtccttttcagccacagggaacctcctctagagctgaaagacacagatgctgctgtgggtgacaacattggctacatcacctttgtgctgttccctcgccacaccaatgccactgctcgagacaacaccatcaacctgatccacacgttccgggactatctgcactaccacattaagtgctctaaggcctatattcatacacgaatgcgagcaaaaacatccgacttccttaaggtgctcaaccgtgcacgcccagatgccgagaaaaaagaaatgaaaacaatcacggggaagactttttcatcccgctaactcttgggaactgaggaggaagcgctgtcgaccgaaggctggactgcttgctactggataatcgtagcccttcatgttgcaccttctccaggttcttgagggattctccatttgggttccattttgtacgagtttggcaaataacctgcagaaacgagctgtgcttgcaaggacttgatagttcctaagaatt

SEQ ID NO: 28 - protein, 191 aa, Mus musculus
SLLYDLENLPASKDSIVHQAGMLKRNCFASVFEKYFQFQEEGKEGENRAVIHYRDDETMYVESKKDRVTVVFSTVFKDDDDVVIGKVFMQEFKEGRRASHTAPQVLFSHREPPLELKDTDAAVGDNIGYITFVLFPRHTNATARDNTINLIHTFRDYLHYHIKCSKAYIHTRMRAKTSDFLKVLNRARPDA

SEQ ID NO: 29 - DNA, 1250 bp, Mus musculus
gagaaagcaggcatttcatctgctcactcagagaactctctgcagcaaccatggccaccttcgtggaactcagtaccaaagccaagatgccccttgtgggcctgggcacctggaagtcttccccaggccaagtcaaggaagccgtgaaggcggccattgatgctgggtatcgccacattgactgtgcctatgtgtatcacaatgagaatgaggtgggagaagctatccaagagaagatcaaagagaatgctgtgaagcgggaggatctcttcatcgtcagcaagctgtgggccacattctttgagaaaagcctggtgaagaaagccttccagaacaccctctcggatctgaagctggactatctggacctgtatctggtccactggccacagggatttcaggctgggaatgcgttattacccaaagacaataaaggcaaagttctcctgagtaaatccacattcttggatgcctgggaggccatggaggaactggtggaccaggggctggtgaaagctctgggcatctccaacttcaaccacttccagattgaaaggctcctgaacaagcctggactaaaacataagccagtgaccaaccagattgagagccacccttatctcacccaggaaaaactgatccaatactgtcaatccaagggcatcgctgttacagcctacagtcccctgggctccccagacaggccttatgccaagccagaagaccccgtagtaatggagattcccaagatcaaagagattgctgcaaaacacaagaaaacagtagctcaggttctgattcggttccatgtccaaaggaatgtggtggtgatccccaagtctgtgacaccctcacgcatacaggagaacctgcaggtcttcgacttccagttgagtgaggaggacatggctgccattctcagcttcaacaggaactggagggcctgtgacctgttggatgcaaggactgaagaggactatcctttccacgaggaatactgaggtccacttgcttgatgagatccgtgcatgatagattccttcgtctctctaaaatcaacctggatgtaggctaccatctggcaatgcaggatttaaatttttgtgttcatcaaggagcaagaaaatgttccagagaaacgaagggcaacggttctcactagcgagggctgagcacatgtttgtcatcaggagcatgtagtatggtaacactgaagatacaatgatagaacaataaaaaagcaataatag

SEQ ID NO: 30 - protein, 316 aa, Mus musculus
MATFVELSTKAKMPLVGLGTWKSSPGQVKEAVKAAIDAGYRHIDCAYVYHNENEVGEAIQEKIKENAVKREDLFIVSKLWATFFEKSLVKKAFQNTLSDLKLDYLDLYLVHWPQGFQAGNALLPKDNKGKVLLSKSTFLDAWEAMEELVDQGLVKALGISNFNHFQIERLLNKPGLKHKPVTNQIESHPYLTQEKLIQYCQSKGIAVTAYSPLGSPDRPYAKPEDPVVMEIPKIKEIAAKHKKTVAQVLIRFHVQRNVVVIPKSVTPSRIQENLQVFDFQLSEEDMAAILSFNRNWRACDLLDARTEEDYPFHEEY

SEQ ID NO: 31 - DNA, 1048 bp, Mus musculus
agagcgccgcgcgcgtcggaggagttgggagccggcgcaaaagtttcctcccaactctggccccgcgcgccgccgccgccgcccactccagcccggggcctggggccggccctgccacggtcgctagggccaccgccagaggcagggccgggccgggccgcacccgcagtttcactttggcgcgtggagcctccgcttgcgcccggccgaccctccgcgtccccgcgtctccgagcccgcgttcccgccctcggcctcccgtggggctgcaggggagcagctgtgggtcccggtcccggaggcacgcgtgggacagcgtcgtgtccgccccacgtcccccgacggaggggctgtgcctgggggccaggcacctgttcggcccagccccgcgcgggagcccagggccaggatgaaagtgacagtgtgcttcgggaggacgggcatcgtggtgccctgcaaggacggccagctccgggtccgcgagctcacccagcaggcgctgcagcggtacctgaagacccgggaccaggatcctggatactgggtgaagattcatcacttagaatacacagatggaggaatcctggatccggatgatgtcttagcagatgttgttgaagacaaagataagctgattgctgtgtttgacgaacaagagccactccaaaagactgagagccccggtggaaaccctgcggatcggcagagcccagatgctttcgagacagaagtggctgcccaactggctgcatttaaacctgtcggtggggaaatcgtagtaaccccttctgctctgaagttaggcactccactgctggttaggagaagcagtgacccagcaccagggccccatgctgatgcccagccaagcactgcaagcctgagtggccagagtttgaaacctgttgttctgaggactctcattgggaactccagctcctgggaattcagtgccctcttttggcttctgtgggcacttcactcatgtgcatggatcaacacacatagcaagcacataactgaaaataaaataaaaacctttaaagat

SEQ ID NO: 32 - protein, 213 aa, Mus musculus
MKVTVCFGRTGIVVPCKDGQLRVRELTQQALQRYLKTRDQDPGYWVKIHHLEYTDGGILDPDDVLADVVEDKDKLIAVFDEQEPLQKTESPGGNPADRQSPDAFETEVAAQLAAFKPVGGEIVVTPSALKLGTPLLVRRSSDPAPGPHADAQPSTASLSGQSLKPVVLRTLIGNSSSWEFSALFWLLWALHSCAWINTHSKHITENKIKTFKD

SEQ ID NO: 33 - DNA, 2441 bp, Mus musculus
agagcgccgcgcgcgtcggaggagttgggagccggcgcaaaagtttcctcccaactctggccccgcgcgccgccgccgccgcccactccagcccggggcctggggccggccctgccacggtcgctagggccaccgccagaggcagggccgggccgggccgcacccgcagtttcactttggcgcgtggagcctccgcttgcgcccggccgaccctccgcgtccccgcgtctccgagcccgcgttcccgccctcggcctcccgtggggctgcaggggagcagctgtgggtcccggtcccggaggcacgcgtgggacagcgtcgtgtccgccccacgtcccccgacggaggggctgtgcctgggggccaggcacctgttcggcccagccccgcgcgggagcccagggccaggatgaaagtgacagtgtgcttcgggaggacgggcatcgtggtgccctgcaaggacggccagctccgggtccgcgagctcacccagcaggcgctgcagcggtacctgaagacccgggaccaggatcctggatactgggtgaagattcatcacttagaatacacagatggaggaatcctggatccggatgatgtcttagcagatgttgttgaagacaaagataaggtagatgactctgaatactttcttcattttcctataccaagcagcatattttcaagccattcaatttcttaacaaactcatatgtcagttattattaaaagataccatctgttttggtttcacctggacagctcataaatcaaagttcttcatcagatgtttgcctgaagtttgtcgaagtttgggaactttttttgtggtggcctaattagcagactcttcattctcaagagctcccaatacatctcaataaattagtgtcagctacagaggctgttggagccactgctgctgttggagtttattccagacagttgctaaatattcatcttaatgcctgaggttggaacgtgttttgtgttttatactggataatatagtagggtatggatgactcccaaagagccacagagtagatttttctcaaagtagatggcacactgtatcctgtgtatgtctttctttcatgttaatcctcaccctgaaacaaaagaaaagcattgcactgagtatgttgaatatttaggaaattttaaaactgttcttttaattatttgggaataattcatcacaaatgtagcattttaatggaattttgcttcttattactttgatgaggtataaaaggaaagtatcccatggcaatatcctagattattgtcattgaaacacactgtttaatatgagctgtgttgtccttagaaacagaactgcttccaagatttcttctctataacattagcactgtttatttttatttgtagcatgtctctctctctctctctctctctctctctctctctctctctctctttctctctctctgtgtgtgtgtgtgtgtgtgtgtgtgtgtgtgtgtgttacgttaatatttgcaaacatagtcttctattttatatttcttttgacacttggcttgacttacttcatatggtagtcagccacacagtaagcaaattgtgtttctaagtagattgccaactcctagaaggcaggggctgaagatcctttcctcctctgtatttcttatgttaagatatctggtaaggcatttaatgaccgttcttttgttgtggtttcattttagctacttagattgaccatgaaatcaagaacttccctcacctgagcctccagagtgctgagtttgcagcctgagctaccgtgcatagctacagagtgtttcatgatttcccccttataacaccaaatgatggccattcatttgccttttcccagttcactttctgcttcttccctgggaacaccttccttttttgagatagttgagatatttggcttgatttttaataatgaaggccgcctgcatctcaaattccactgccagtgtgttcatacaaaaagcaagaaaatgctacattaaagaaagggcagaagataccggctcatcctggccttatttcaaatcccatttcaggaagggaaattctgttaacaatatctgaggagatctgtctgatgcagcactttcctctgatgcattctttcaactgtttcctcaaggccttttcaaaatgtagcttgtatcttagacacagaaacagcgttattatgtgtgtctttttgaaatgggacttaacaccactattaaatacggagacaaggacacagtcagctaagagcctagcagaggatccatatatgttagctacagctacagctttcctcttagtgcacattcatggctctccatgatgcctgccattgtgctacacaatcgataaggatttgcacttttcgtgttgcctgaagaagaatcactcaattttcttctttttgttaaaaaagg

SEQ ID NO: 34 - protein, 198 aa, Mus musculus
RAPRASEELGAGAKVSSQLWPRAPPPPPTPARGLGPALPRSLGPPPEAGPGRAAPAVSLWRVEPPLAPGRPSASPRLRARVPALGLPWGCRGAAVGPGPGGTRGTASCPPHVPRRRGCAWGPGTCSAQPRAGAQGQDESDSVLREDGHRGALQGRPAPGPRAHPAGAAAVPEDPGPGSWILGEDSSLRIHRWRNPGSG

SEQ ID NO: 35 - DNA, 2060 bp, Mus musculus
agtttcctctggcggcacgtaaaggctccacaaaggacctgggagttcaactgaggctgctgctgtcggcctggggatggaccccaagccctgagtggtgttgttggacccaggacctgcaagaagcatgcactaaggcagctgcggaccacactgtgagggagagcaggttgggagcagccccggtgacaccagagccagcctcatccctaggagcttcagagagcatagactgctgccagctgaggccagtgaggcagggctgctcggcggccagtccagcctgagactcgggacctctcctggaggccacggccaggctgtgctgctgatggcaccgtgaggcatgtgaagcgctgctccagggccaagcaggagagaagaggctttcagttcataaagaccaaccagcacactgcaaggaccatgaggccactgtgtatgacctactggtggcttggactgctggccacggtcggagctgctacaggcccagaggctgacgttgagggcacagaggatggttcacagagagagtacatttacctcaacaggtacaagcgggcaggtgagtcccccgacaagtgcacctacactttcattgtgccccagcagcgggtcacaggtgccatttgtgtcaactccaaggagcctgaggtgcacctggagaaccgtgtgcacaagcaggagctggagctgctcaacaatgagctgcttaagcagaagcggcagatcgagacgctgcagcagctggtagaggtagacggaggcatcgtgagcgaggtgaagctgctgcgcaaggagagccgcaacatgaactcgagagtcacgcagctgtacatgcaacttctacatgagatcattcgaaagcgagacaatgcgctggagctctcccagctggagaacaggatcctgaaccagacagctgacatgctgcagctggctagcaagtacaaggacctggagcacaagttccagcacctggctatgctggcacacaaccaatcagaggtcattgctcagctcgaagagcactgccaacgcgtacctgcagccaggcctatgccccagccacccccagcagctccacctcgggtctaccaaccacccacctacaaccgcatcatcaaccagatttccaccaatgagatccagagtgaccagaatctgaaggtgctgccgccctccttgcccaccatgcctgcccttaccagtctcccatcttccactgataagccatcaggtccatggagagactgcctgcaagccctggaagatggtcacagcaccagctccatctacctggtgaagcctgagaataccaaccgcctgatgcaggtgtggtgtgaccagagacatgaccctggaggttggactgtcatccagagacgcctggatggctctgtcaacttcttcaggaactgggagacctataagcaagggtttgggaacatcgatggtgagtactggctgggcctggagaacatctactggctgacgaaccaaggcaactacaaactgctggtaaccatggaggactggtctggccgtaaagtctttgctgagtatgccagtttccgactggagccagaaagcgagtactataagctgcggctggggcgttatcatggcaatgcaggcgactcctttacctggcacaacggcaaacagtttaccaccctggacagggaccatgatgtctacacaggaaactgtgcccactatcagaagggaggatggtggtataacgcctgtgctcactccaacctcaatggggtctggtaccgtgggggccattaccggagcagataccaggacggggtctactgggctgagttccgaggaggctcttactcactcaagaaggtggtgatgatgattcggcccaaccccaacaccttccactaagctctccctgcctggccactaacaccatggccagaagccatcccagccgtgtgacctcagcacagctcttcgctggcccacctcaggctggaggactgtgctttccaatgtggctctgtcagacgatggaaatgaacagtgttctctgtccc

SEQ ID NO: 36 - protein, 493 aa, Mus musculus
MRPLCMTYWWLGLLATVGAATGPEADVEGTEDGSQREYIYLNRYKRAGESPDKCTYTFIVPQQRVTGAICVNSKEPEVHLENRVHKQELELLNNELLKQKRQIETLQQLVEVDGGIVSEVKLLRKESRNMNSRVTQLYMQLLHEIIRKRDNALELSQLENRILNQTADMLQLASKYKDLEHKFQHLAMLAHNQSEVIAQLEEHCQRVPAARPMPQPPPAAPPRVYQPPTYNRIINQISTNEIQSDQNLKVLPPSLPTMPALTSLPSSTDKPSGPWRDCLQALEDGHSTSSIYLVKPENTNRLMQVWCDQRHDPGGWTVIQRRLDGSVNFFRNWETYKQGFGNIDGEYWLGLENIYWLTNQGNYKLLVTMEDWSGRKVFAEYASFRLEPESEYYKLRLGRYHGNAGDSFTWHNGKQFTTLDRDHDVYTGNCAHYQKGGWWYNACAHSNLNGVWYRGGHYRSRYQDGVYWAEFRGGSYSLKKVVMMIRPNPNTFH

SEQ ID NO: 37 - DNA, 1567 bp, Mus musculus
gggcagtccgtgagtagaaacaggaggaggggctgaggaagggtgcggtctgggttgccacccaggctagccgggagctacggccggccgaggctgatctttcaccttcgctgagcttctgcctgggcttcgcctccgcggccccaaggattgctgtgatctcggcttgagagaaaggtggactgtcatggcctctatctgggttggacctcgaggaaccataaaagattatccaggctttagcccgtcggtggatgccgaagctatccggaaagcgatcagaggacttgggactgacgagaaaaccctcatcaacattctgacggagcggtcgaacgcgcagcgacagctgattgtcaagcagtaccaagcagcgtatgaacaggagctgaaagatgacttgaagggtgatctctctggccacttcgagcacgtcatggtggctcttgttactgcaccagccctgtttgatgcgaagcaactgaagaaatccatgaagggaactggcacagatgaagatgccctgattgaaatcctaacaaccaggtcaagcaggcagatgaaggaaatctcgcaggcctattatacagtgtataagaagagcctcggggatgacattagctctgagacgtctggagacttccggaaagctctgctgactctggcagatgtaagaagagatgaaagcctcaaagtggatgaacatctggccaaaaaggatgctcagatcctctataatgctggtgagaacaaatggggcacagacgaagacaaattcaccgaggtcttgtgtctacggagcttcccgcagctgaaactaacatttgatgagtacagaaatattagccagaaggacattgaggacagcattaaaggagaattatctggacattttgaagacctgctgctggccatagttcattgtgcgaggaacactccagcgtttttggcagaaagacttcatcaggctttgaagggtgctggaacagatgaattcactctgaacagaataatggtttccagatcagagattgatcttttggacatcagacatgagttcaagaagcactatggctactctctatactcggccatccaatcagatacttctggagactacagaaccgtgctcttgaagatctgtggagaagatgattgaagaagatggctcccaatggctgcctgccctgatggtggaccgcctcaaaatctctgcacactgctttcatgcagcactctaaagtgcaagcaaatgcaagacagaacctgtctgcctgataggcattggcatcgttcagtgcaatggcaaaaatgaacttgattttatttcagaccatctcattcatgataagggaaattcaatctagaattaaagacctactaatgattttctgtttggcttaggaagttggaatctgtgtagttcaaaaccattaaacataaatcaggatactaaagatggctgcctttcctaattgtaatttgtgtatttgttttcagtatctactaatactgtatgttgcctggtgccaacaaatatttcaaaatacatttgttgtaaatgctc

SEQ ID NO: 38 - protein, 318 aa, Mus musculus
VGPRGTIKDYPGFSPSVDAEAIRKAIRGLGTDEKTLINILTERSNAQRQLIVKQYQAAYEQELKDDLKGDLSGHFEHVMVALVTAPALFDAKQLKKSMKGTGTDEDALIEILTTRSSRQMKEISQAYYTVYKKSLGDDISSETSGDFRKALLTLADVRRDESLKVDEHLAKKDAQILYNAGENKWGTDEDKFTEVLCLRSFPQLKLTFDEYRNISQKDIEDSIKGELSGHFEDLLLAIVHCARNTPAFLAERLHQALKGAGTDEFTLNRIMVSRSEIDLLDIRHEFKKHYGYSLYSAIQSDTSGDYRTVLLKICGEDD

SEQ ID NO: 39 - DNA, 756 bp, Mus musculus
gcctattgggcgccgcgccctcgtcggctcgggcctccgccgcggtccgagggcgccgtgacgtgtgctcggcgcgcggcgcgctgcgcgctgctgaaggctgtgtctggtacccgctaccatgcccaagcggagctgcccgttcgcagacgcagccccgctccaactcaaagtccacgtgggcctgaaagagctgagccacggtgtgttcgccgagcgctactcacgcgaggtcttcgaaagaaccaagcagctccttttccaaggggctcgggcctatagagatcacatatcgagcgaagattgttccgtgaaccacctgcaggagtcactgaagtctggtgtggtaggagcccctcaacctgcgaggggacagatgttgattggacctgatggccgactgacacggtgccaagctcaggcctcagaaggtggccttcccaggacagcgcccatcgcttgttcatcgtgcatgagatctgtggatgggaaggcggtctgcagccagtgcgagcgggccctgtgtgggcagtgtgtatacacctgctggggctgcggtgctttggcctgtgtgctgtgtggccttgcagactatgccgacgatggtgagaagacactgtgcaccagctgtgctatgtttgaagcctgaggtggccacagacagcacaagatgttcacactaaagagagagaaggtggctttttatatgttatgttttatacccagtaacaagtgaataaacctctttatatttgc

SEQ ID NO: 40 - protein, 175 aa, Mus musculus
MPKRSCPFADAAPLQLKVHVGLKELSHGVFAERYSREVFERTKQLLFQGARAYRDHISSEDCSVNHLQESLKSGVVGAPQPARGQMLIGPDGRLTRCQAQASEGGLPRTAPIACSSCMRSVDGKAVCSQCERALCGQCVYTCWGCGALACVLCGLADYADDGEKTLCTSCAMFEA

SEQ ID NO: 41 - DNA, 505 bp, Mus musculus
cgtgacgtgtgctcggcgcgcggcgcgctgcgcgctgctgaaggctgtgtctggtacccgctaccatgcccaagcggagctgcccgttcgcagacgcagccccgctccaactcaaagtccacgtgggcctgaaagagctgagccacggtgtgttcgccgagcgctactcacgcgaggtcttcggccttcccaggacagcgcccatcgcttgttcatcgtgcatgagatctgtggatgggaaggcggtctgcagccagtgcgagcgggccctgtgtgggcagtgtgtatacacctgctggggctgcggtgctttggcctgtgtgctgtgtggccttgcagactatgccgacgatggtgagaagacactgtgcaccagctgtgctatgtttgaagcctgaggtggccacagacagcacaagatgttcacactaaagagagagaaggtggctttttatatgttatgttttatacccagtaacaagtgaataaacctctttatatttgc

SEQ ID NO: 42 - protein, 110 aa, Mus musculus
MPKRSCPFADAAPLQLKVHVGLKELSHGVFAERYSREVFGLPRTAPIACSSCMRSVDGKAVCSQCERALCGQCVYTCWGCGALACVLCGLADYADDGEKTLCTSCAMFEA

SEQ ID NO: 43 - DNA, 5350 bp, Mus musculus
agagtccaggcccctgataagcaaaggcggttgggtaaggggcccaaaccacctgaaggcgggcgcttgcacaaggagcagcgagccatcgagccgtcggggcggggccgggctgtcgggggagggctgcggggaggcggtgctggcagggccggacccctcagcctcggacagcacagcccgcaccctgaagctgaaggaggccacagcgaggacctggacatcgctgtgtggttggccctggtgcatctggagcagtatgcggacactttccgacggcatggcctagctacagctggtgcggcccaacacctgggccacgaggagctgaggcacttgggcatcagtgctacaggacaccggaaacgcatcttgcgcctgttgcgggcaggctctgctgagggtttcctggattctcatctggataataccatggagccaactcccagcccagcccctgatgcccaaccccccaagcctgtgcctaagcccaggacggtgtttgggctcagcaaccctgccactgcccagaggcctggactgagcccaatcttctgggatccagaagtatccaggaactcagagtgtacgcaaagatcctctcctctccttccttcctcctctgaacagccttcagtcccgaataccatggagatgatgcctaatgccatctactttggcctggacttaagaggtcgggcccaggcagctcaggacgtgactccagatagttctcaggcgactgtcccaacccctgccttcaggcccacaacaggcacagtgcacatcatggatcctggttgcctgtactacggtgtccagcctgtggggatcccaggagcctctgacaggagagacggcaggggtgtctgtcaggaaagggcagaacacagacaggatctggagacacgggaggatgctggttatgccagcctcgagctacctggagactccattctttcgctacccacccaggatgcagagaccagtgatgacctcatttcgccctatgccagcttctcctccacagcagatcgtcccgtgcctctgctcagtggctggctggacaagctctcacctcagggaaactatgtgttccagagacgttttgtgcagttcaatggaaggagtctaatgtactttggcagtgacaaggaccccttccccaaaggtgtgatccctctgactgccatcgagatgacccgaagcagcaaggacaacaaattccaggtcattaccggccagagagtatttgtgttccgcacagagagtgaggctcagcgtgacctatggtgctccacgctgcaatcctgcctgaaggaacagcgcctcctgggccacccccggccccctcacccaccacgacccctccgcacgggcacgttagagttgcgtggacacaaggccaaggtgtttgctgccttgatccctggagagctggcactgtacaagagtgagcaggccttctcactgggcatcgggatctgcttcattgaactgcaaggctgcagtgtccgggagaccaagagtcgaagcttcgatctgctcacaccccatcgctgcttcagcttcacagccgagtctgggggggctcgacagagctgggcagccgctctgcaagaagcagtaaccgagacactgtctgactacgaggtggctgagaaggtctggtccaacccggcaaaccggcattgtgcggactgcagggcctcccggccggattgggctgccgtcaacctgggggtcgtcatctgcaagcagtgtgcaggtcagcacagggccctgggctctgggatctccaaggtgcagagcctgaagctggacacgagtgtctggagtaatgagatagtgcagctgttcattgtcctgggaaatgatcgtgccaattgcttctgggcaggggcacttcccccaggtgaagggctgcatccagattcagcccctggccctcgaggagagttcatctcccgaaagtataagctgggtctcttccggaagccccaccctcggcatccagatcatagccagcttctccaggcactgtgtgcagctatggcaggacccaacctgctcaagaacatggcccagcttctctgtgtcgaaacctctgagggagaggaacccttgtccccttcagccctcaatggcagcttgcttagccttctaccttcagactcccctggagtatacaatgaggtggtagtgcctgccacttacagaggtttcctgtactgtggctccatcagcaacaaggctggagccccaccccttcgcaggggccgggatgctcctccccgcttgtggtgtgtgctgggagctgccctggaaatgtttgcatcagagagcagccctgaacccctcagccttctccagccccaggatattgtatgtctgggtgtaagccccccacctgctgatccaggtgaccttgacaggttccccttttcctttgaactcatcctcactgggggaagaatccagcattttgccactgatggagcagacagtctagaggcctggatcagtgcagtgggcaagtggttctccccgctcagctgccaccagctgctgggccctgggttgctgcggatgggtcgcctgtggctacggtccccctcccacgcaggcctggcccctggtctctggctgtcgggcttcggcctccttcgtggtgatcatctcttcctgtgcccagcgcctggccctggtccccctgctccggaggacatggtgcatttacgacgtctacaggagatcagtgtggtctcggcagctgacactccagacaaaaaggagcatttggtccttgtagagacaggaaggaccctgtatttgcagggggaaggcaggctagactttgcagcgtggaacacggccattggaggtgctgccggagggggtggcacgggcctgcaggagcagcagatgagccggggagacatccctatcattgtggacgcttgcatcagttttgtcacgcagcatgggctccggctggaaggtgtatatcggaaaggaggcgctcgagcccgcagcctgcgactcttggctgagtttaggcgggatgcccggtcagtgaagcttagaccacgggaacactttgtagaagatgttactgacacactcaaacgcttctttcgagagcttgatgaccccgtgacctctgctaggttgctgcctcgatggagagaagctgcagagctttcccagaagaatcagcgcctggagaagtacaaagaagtgattagctgcctgcctcgagtcaaccgcagaacactggccaccctcatcgggcatctgtaccgggtgcagaagtgtgcgtctctaaaccagatgtgcacgcggaacctggccctactgtttgcacctagtgtgttccagacagatgggcggggagagcatgaggttcgggtactgcaggagctcatcgatggctacatctctgtttttgatattgactcggaccaggcagctcagattgacttggaggtcagtctcattaccacctggaaggatgtgcagttgtcccaggctggagacctcatcatggaggtttacatagaacagcagctcccggacaactgtgtcaccctaaaggtatccccaacactgactgctgaggagttgactaaccaggtgctggagatgcgaggggcggcatcggggacagacttgtgggtgacatttgaaattcttgaacacggagagcttgagaggccactgcaccccaaagaaaaggttctagagcaggccttgcagtggtgccagcttccagagccctgctcagcctctctgcttctgagaaaagtctctatggcacacgctggctgcctcttcacaggagtccggcgtgagagcccacgagtggggctgctacggtgtcgtgaggagccacctcgattgctgggaaaccgtttccaggagaggttctttttggtgcgtggccgatgcctgctgctgctcaaggagaagaagagctctaagccagaacgggagtggtctctggaaggtgccaaggtctacctgggaatccgcaagaagttaaaacctccaacactgtggggtttcacattaatattggaaaagatgcacctctgtctgtcctgcatggatgaggaggagatgtgggactggaccacaagcatccttaaagcccagcatgatgaccaacagtccgtggttttacgtcgccgttcctcctctgaccttgctcgtcagaagtttggcactatgcccttgctgcccatccgaggggatgacagtggagccacccttctctctgccaatcagaccctgcggcgactacacaaccggaggaccttatccatgttctttccaatgaagtcaccccagggatctgtggaagagcaagatgagctggaggagcctgtgtatgaagagccagtatatgaggaggtcggggccttccctgagcttaccaaggacacgaccttctcttccacatgggagtggtcagccaagtcagatccatcccttaccagccagaggtcctttgatcaaccccccctctccaaggcaagcatgttgggccacgaagagaggatacctgaccctcctccgggccccccttcaaaaagcagttctcaggcacgagggtccctagaggaacagctgcttcaggaactcaacaacctcatcctgaggaaaggagagcctgcctcgtgcccagaaagctcttcccagcccaccagtccccaagccccaagccccaccagccttccaacaccgacccccagcttacccacccaaccgccctgcacttccaatccaccctccagccagcctctcacatgaccccagggcccgcagttgaggaggtaggtaaccagaggcgaagccaggctctcaccatggcagattactgctgggagctgcttctgccctggatggatgactctggaatccagtatggtaccatggaaggagcactggactgagagccctggagactgtgtgtctcagggaagatcatggcccctctctgggcccagcccatttgtctgtactatgaagtcactaaaagaaggagaggggtgaacaccgaactgtttctgagctaggagccctgatatttcccctcaataagggcagctcctagttgatatatttgatataggggttcagtgagagctttgtggcctaagaatggttttactacattataggaaagtgaaggtttggaagctagagatgggcatgatatctaaatctatgttattccgcttcctatgtactggaactgccttgaggccctagagtggctgattgggattgggagctggggcaaaggggagtcgaagaggaatggatcactattaataaaatttgg

SEQ ID NO: 44 - protein, 1604 aa, Mus musculus
RVQAPDKQRRLGKGPKPPEGGRLHKEQRAIEPSGRGRAVGGGLRGGGAGRAGPLSLGQHSPHPEAEGGHSEDLDIAVWLALVHLEQYADTFRRHGLATAGAAQHLGHEELRHLGISATGHRKRILRLLRAGSAEGFLDSHLDNTMEPTPSPAPDAQPPKPVPKPRTVFGLSNPATAQRPGLSPIFWDPEVSRNSECTQRSSPLLPSSSEQPSVPNTMEMMPNAIYFGLDLRGRAQAAQDVTPDSSQATVPTPAFRPTTGTVHIMDPGCLYYGVQPVGIPGASDRRDGRGVCQERAEHRQDLETREDAGYASLELPGDSILSLPTQDAETSDDLISPYASFSSTADRPVPLLSGWLDKLSPQGNYVFQRRFVQFNGRSLMYFGSDKDPFPKGVIPLTAIEMTRSSKDNKFQVITGQRVFVFRTESEAQRDLWCSTLQSCLKEQRLLGHPRPPHPPRPLRTGTLELRGHKAKVFAALIPGELALYKSEQAFSLGIGICFIELQGCSVRETKSRSFDLLTPHRCFSFTAESGGARQSWAAALQEAVTETLSDYEVAEKVWSNPANRHCADCRASRPDWAAVNLGVVICKQCAGQHRALGSGISKVQSLKLDTSVWSNEIVQLFIVLGNDRANCFWAGALPPGEGLHPDSAPGPRGEFISRKYKLGLFRKPHPRHPDHSQLLQALCAAMAGPNLLKNMAQLLCVETSEGEEPLSPSALNGSLLSLLPSDSPGVYNEVVVPATYRGFLYCGSISNKAGAPPLRRGRDAPPRLWCVLGAALEMFASESSPEPLSLLQPQDIVCLGVSPPPADPGDLDRFPFSFELILTGGRIQHFATDGADSLEAWISAVGKWFSPLSCHQLLGPGLLRMGRLWLRSPSHAGLAPGLWLSGFGLLRGDHLFLCPAPGPGPPAPEDMVHLRRLQEISVVSAADTPDKKEHLVLVETGRTLYLQGEGRLDFAAWNTAIGGAAGGGGTGLQEQQMSRGDIPIIVDACISFVTQHGLRLEGVYRKGGARARSLRLLAEFRRDARSVKLRPREHFVEDVTDTLKRFFRELDDPVTSARLLPRWREAAELSQKNQRLEKYKEVISCLPRVNRRTLATLIGHLYRVQKCASLNQMCTRNLALLFAPSVFQTDGRGEHEVRVLQELIDGYISVFDIDSDQAAQIDLEVSLITTWKDVQLSQAGDLIMEVYIEQQLPDNCVTLKVSPTLTAEELTNQVLEMRGAASGTDLWVTFEILEHGELERPLHPKEKVLEQALQWCQLPEPCSASLLLRKVSMAHAGCLFTGVRRESPRVGLLRCREEPPRLLGNRFQERFFLVRGRCLLLLKEKKSSKPEREWSLEGAKVYLGIRKKLKPPTLWGFTLILEKMHLCLSCMDEEEMWDWTTSILKAQHDDQQSVVLRRRSSSDLARQKFGTMPLLPIRGDDSGATLLSANQTLRRLHNRRTLSMFFPMKSPQGSVEEQDELEEPVYEEPVYEEVGAFPELTKDTTFSSTWEWSAKSDPSLTSQRSFDQPPLSKASMLGHEERIPDPPPGPPSKSSSQARGSLEEQLLQELNNLILRKGEPASCPESSSQPTSPQAPSPTSLPTPTPSLPTQPPCTSNPPSSQPLT

SEQ ID NO: 45 - DNA, 5199 bp, Mus musculus
ccaccctgaacctctgctctggaaaccagtcaatggcctgaaagcccatggctgcccctcaggacctggacatcgctgtgtggttggccctggtgcatctggagcagtatgcggacactttccgacggcatggcctagctacagctggtgcggcccaacacctgggccacgaggagctgaggcacttgggcatcagtgctacaggacaccggaaacgcatcttgcgcctgttgcgggcaggctctgctgagggtttcctggattctcatctggataataccatggagccaactcccagcccagcccctgatgcccaaccccccaagcctgtgcctaagcccaggacggtgtttgggctcagcaaccctgccactgcccagaggcctggactgagcccaatcttctgggatccagaagtatccaggaactcagagtgtacgcaaagatcctctcctctccttccttcctcctctgaacagccttcagtcccgaataccatggagatgatgcctaatgccatctactttggcctggacttaagaggtcgggcccaggcagctcaggacgtgactccagatagttctcaggcgactgtcccaacccctgccttcaggcccacaacaggcacagtgcacatcatggatcctggttgcctgtactacggtgtccagcctgtggggatcccaggagcctctgacaggagagacggcaggggtgtctgtcaggaaagggcagaacacagacaggatctggagacacgggaggatgctggttatgccagcctcgagctacctggagactccattctttcgctacccacccaggatgcagagaccagtgatgacctcatttcgccctatgccagcttctcctccacagcagatcgtcccgtgcctctgctcagtggctggctggacaagctctcacctcagggaaactatgtgttccagagacgttttgtgcagttcaatggaaggagtctaatgtactttggcagtgacaaggaccccttccccaaaggtgtgatccctctgactgccatcgagatgacccgaagcagcaaggacaacaaattccaggtcattaccggccagagagtatttgtgttccgcacagagagtgaggctcagcgtgacctatggtgctccacgctgcaatcctgcctgaaggaacagcgcctcctgggccacccccggccccctcacccaccacgacccctccgcacgggcacgttagagttgcgtggacacaaggccaaggtgtttgctgccttgatccctggagagctggcactgtacaagagtgagcaggccttctcactgggcatcgggatctgcttcattgaactgcaaggctgcagtgtccgggagaccaagagtcgaagcttcgatctgctcacaccccatcgctgcttcagcttcacagccgagtctgggggggctcgacagagctgggcagccgctctgcaagaagcagtaaccgagacactgtctgactacgaggtggctgagaaggtctggtccaacccggcaaaccggcattgtgcggactgcagggcctcccggccggattgggctgccgtcaacctgggggtcgtcatctgcaagcagtgtgcaggtcagcacagggccctgggctctgggatctccaaggtgcagagcctgaagctggacacgagtgtctggagtaatgagatagtgcagctgttcattgtcctgggaaatgatcgtgccaattgcttctgggcaggggcacttcccccaggtgaagggctgcatccagattcagcccctggccctcgaggagagttcatctcccgaaagtataagctgggtctcttccggaagccccaccctcggcatccagatcatagccagcttctccaggcactgtgtgcagctatggcaggacccaacctgctcaagaacatggcccagcttctctgtgtcgaaacctctgagggagaggaacccttgtccccttcagccctcaatggcagcttgcttagccttctaccttcagactcccctggagtatacaatgaggtggtagtgcctgccacttacagaggtttcctgtactgtggctccatcagcaacaaggctggagccccaccccttcgcaggggccgggatgctcctccccgcttgtggtgtgtgctgggagctgccctggaaatgtttgcatcagagagcagccctgaacccctcagccttctccagccccaggatattgtatgtctgggtgtaagccccccacctgctgatccaggtgaccttgacaggttccccttttcctttgaactcatcctcactgggggaagaatccagcattttgccactgatggagcagacagtctagaggcctggatcagtgcagtgggcaagtggttctccccgctcagctgccaccagctgctgggccctgggttgctgcggatgggtcgcctgtggctacggtccccctcccacgcaggcctggcccctggtctctggctgtcgggcttcggcctccttcgtggtgatcatctcttcctgtgcccagcgcctggccctggtccccctgctccggaggacatggtgcatttacgacgtctacaggagatcagtgtggtctcggcagctgacactccagacaaaaaggagcatttggtccttgtagagacaggaaggaccctgtatttgcagggggaaggcaggctagactttgcagcgtggaacacggccattggaggtgctgccggagggggtggcacgggcctgcaggagcagcagatgagccggggagacatccctatcattgtggacgcttgcatcagttttgtcacgcagcatgggctccggctggaaggtgtatatcggaaaggaggcgctcgagcccgcagcctgcgactcttggctgagtttaggcgggatgcccggtcagtgaagcttagaccacgggaacactttgtagaagatgttactgacacactcaaacgcttctttcgagagcttgatgaccccgtgacctctgctaggttgctgcctcgatggagagaagctgcagagctttcccagaagaatcagcgcctggagaagtacaaagaagtgattagctgcctgcctcgagtcaaccgcagaacactggccaccctcatcgggcatctgtaccgggtgcagaagtgtgcgtctctaaaccagatgtgcacgcggaacctggccctactgtttgcacctagtgtgttccagacagatgggcggggagagcatgaggttcgggtactgcaggagctcatcgatggctacatctctgtttttgatattgactcggaccaggcagctcagattgacttggaggtcagtctcattaccacctggaaggatgtgcagttgtcccaggctggagacctcatcatggaggtttacatagaacagcagctcccggacaactgtgtcaccctaaaggtatccccaacactgactgctgaggagttgactaaccaggtgctggagatgcgaggggcggcatcggggacagacttgtgggtgacatttgaaattcttgaacacggagagcttgagaggccactgcaccccaaagaaaaggttctagagcaggccttgcagtggtgccagcttccagagccctgctcagcctctctgcttctgagaaaagtctctatggcacacgctggctgcctcttcacaggagtccggcgtgagagcccacgagtggggctgctacggtgtcgtgaggagccacctcgattgctgggaaaccgtttccaggagaggttctttttggtgcgtggccgatgcctgctgctgctcaaggagaagaagagctctaagccagaacgggagtggtctctggaaggtgccaaggtctacctgggaatccgcaagaagttaaaacctccaacactgtggggtttcacattaatattggaaaagatgcacctctgtctgtcctgcatggatgaggaggagatgtgggactggaccacaagcatccttaaagcccagcatgatgaccaacagtccgtggttttacgtcgccgttcctcctctgaccttgctcgtcagaagtttggcactatgcccttgctgcccatccgaggggatgacagtggagccacccttctctctgccaatcagaccctgcggcgactacacaaccggaggaccttatccatgttctttccaatgaagtcaccccagggatctgtggaagagcaagatgagctggaggagcctgtgtatgaagagccagtatatgaggaggtcggggccttccctgagcttaccaaggacacgaccttctcttccacatgggagtggtcagccaagtcagatccatcccttaccagccagaggtcctttgatcaaccccccctctccaaggcaagcatgttgggccacgaagagaggatacctgaccctcctccgggccccccttcaaaaagcagttctcaggcacgagggtccctagaggaacagctgcttcaggaactcaacaacctcatcctgaggaaaggagagcctgcctcgtgcccagaaagctcttcccagcccaccagtccccaagccccaagccccaccagccttccaacaccgacccccagcttacccacccaaccgccctgcacttccaatccaccctccagccagcctctcacatgaccccagggcccgcagttgaggaggtaggtaaccagaggcgaagccaggctctcaccatggcagattactgctgggagctgcttctgccctggatggatgactctggaatccagtatggtaccatggaaggagcactggactgagagccctggagactgtgtgtctcagggaagatcatggcccctctctgggcccagcccatttgtctgtactatgaagtcactaaaagaaggagaggggtgaacaccgaactgtttctgagctaggagccctgatatttcccctcaataagggcagctcctagttgatatatttgatataggggttcagtgagagctttgtggcctaagaatggttttactacattataggaaagtgaaggtttggaagctagagatgggcatgatatctaaatctatgttattccgcttcctatgtactggaactgccttgaggccctagagtggctgattgggattgggagctggggcaaaggggagtcgaagaggaatggatcactattaataaaatttgg

SEQ ID NO: 46 - protein, 1538 aa, Mus musculus
MAAPQDLDIAVWLALVHLEQYADTFRRHGLATAGAAQHLGHEELRHLGISATGHRKRILRLLRAGSAEGFLDSHLDNTMEPTPSPAPDAQPPKPVPKPRTVFGLSNPATAQRPGLSPIFWDPEVSRNSECTQRSSPLLPSSSEQPSVPNTMEMMPNAIYFGLDLRGRAQAAQDVTPDSSQATVPTPAFRPTTGTVHIMDPGCLYYGVQPVGIPGASDRRDGRGVCQERAEHRQDLETREDAGYASLELPGDSILSLPTQDAETSDDLISPYASFSSTADRPVPLLSGWLDKLSPQGNYVFQRRFVQFNGRSLMYFGSDKDPFPKGVIPLTAIEMTRSSKDNKFQVITGQRVFVFRTESEAQRDLWCSTLQSCLKEQRLLGHPRPPHPPRPLRTGTLELRGHKAKVFAALIPGELALYKSEQAFSLGIGICFIELQGCSVRETKSRSFDLLTPHRCFSFTAESGGARQSWAAALQEAVTETLSDYEVAEKVWSNPANRHCADCRASRPDWAAVNLGVVICKQCAGQHRALGSGISKVQSLKLDTSVWSNEIVQLFIVLGNDRANCFWAGALPPGEGLHPDSAPGPRGEFISRKYKLGLFRKPHPRHPDHSQLLQALCAAMAGPNLLKNMAQLLCVETSEGEEPLSPSALNGSLLSLLPSDSPGVYNEVVVPATYRGFLYCGSISNKAGAPPLRRGRDAPPRLWCVLGAALEMFASESSPEPLSLLQPQDIVCLGVSPPPADPGDLDRFPFSFELILTGGRIQHFATDGADSLEAWISAVGKWFSPLSCHQLLGPGLLRMGRLWLRSPSHAGLAPGLWLSGFGLLRGDHLFLCPAPGPGPPAPEDMVHLRRLQEISVVSAADTPDKKEHLVLVETGRTLYLQGEGRLDFAAWNTAIGGAAGGGGTGLQEQQMSRGDIPIIVDACISFVTQHGLRLEGVYRKGGARARSLRLLAEFRRDARSVKLRPREHFVEDVTDTLKRFFRELDDPVTSARLLPRWREAAELSQKNQRLEKYKEVISCLPRVNRRTLATLIGHLYRVQKCASLNQMCTRNLALLFAPSVFQTDGRGEHEVRVLQELIDGYISVFDIDSDQAAQIDLEVSLITTWKDVQLSQAGDLIMEVYIEQQLPDNCVTLKVSPTLTAEELTNQVLEMRGAASGTDLWVTFEILEHGELERPLHPKEKVLEQALQWCQLPEPCSASLLLRKVSMAHAGCLFTGVRRESPRVGLLRCREEPPRLLGNRFQERFFLVRGRCLLLLKEKKSSKPEREWSLEGAKVYLGIRKKLKPPTLWGFTLILEKMHLCLSCMDEEEMWDWTTSILKAQHDDQQSVVLRRRSSSDLARQKFGTMPLLPIRGDDSGATLLSANQTLRRLHNRRTLSMFFPMKSPQGSVEEQDELEEPVYEEPVYEEVGAFPELTKDTTFSSTWEWSAKSDPSLTSQRSFDQPPLSKASMLGHEERIPDPPPGPPSKSSSQARGSLEEQLLQELNNLILRKGEPASCPESSSQPTSPQAPSPTSLPTPTPSLPTQPPCTSNPPSSQPLT

SEQ ID NO: 47 - DNA, 4620 bp, Mus musculus
gctgctccagtaggggaggaggagtgttccccccctcacctcctcacaagcacaagttgtggccccgggagccactttcggtgctgggcgctggagaggccgctccccgcgcaccgggggacctggggacgcctgtcttgggggcggaggccgcgctgcggagccgcccacgccgcgcgccaggaacagagtccacaagatgggtgttaggacatgctgagatcccccgaaataggctgctggcaccctggtcatggaggactgcaacgtgcattcggccgccagcattttggcctcggtgaaggaacaggaggcccgtttcgagcggctgacacgggcactagaacaagaacggcgccatgttgccctgcagctggagcgtgcccagcagcctggcatgagcagtggtggtatggtgggcagtgggcagcccctgccaatggcctggcagcagctggttctgcaggagcagagcccgggtagccaggcatcgctggccacgatgccagaggcacccgaggtactggaggagacagtgactgtggaggaagaccctggcacccccacctctcacgtgtccatcgtcacatcagaagatggtacaacccggcggactgagactaaggtcactaagacggtcaagactgtgaccacaaggacagtacgccaggtgcctttgggcccagatggactccccttgctggacggcggccctccacttggctcttttgctgacgggcccctggaccggcattacctacttcgtggtggtggtggtccagcagccacactctcccgaacctaccacagcagtggaggtggctttcccgatggccccgagtcccgtgatattccaagctatggcagcttgtcccgagggctcggggtacggccaccacgtactggcctcctgggcccaggacctggtgatggctgtttcacactgcctggccgccgagaagccttccccatgggctctgaatccggaccaccaagcggccgctctctgcctgagcatttccaagctgaaccatatggcctggaggatgatacacggagcctggctgcggatgatgagggtggccccgacctggagcctgactatagcacggcaacccggagaagacctgagtacgggcggggccttcgtgccagggcctttgaagacacagcagatgatgctggtgagctgatagaagagcgtcccccatttccagcagcaacagcccctctggcccagcctgagaggggcagcctgggcagcttggaccgagtagtgcggcgctcaccttcagtggatagcacccgcaaggagccacgctggcgggaccccgagctgccagaggtgttggccatgctgcggcaccctgtggaccctgtgaaagccaatgctgcagcctacctgcagcacctctgctttgagaacgagggtattaagcggcgagtgcggcagctgcgtgggctccccctgcttgtggcattactagatcaccctcgggctgaggtgcggcgccgggcctgtggggcactgcgcaacctctcctatggccgggatactgacaacaaggccgccatccgggactgcgggggcgtgccagccctggtgcgcctactgcgggcggcccgtgacaatgaggtccgtgagctggtcactggcacactctggaacctgtcatcctacgagcccctgaagatggtcatcattgaccacggcttacagactctgacccatgaggtcatcgtgccccattccggctgggagcgagagcctaacgaagactcgaagccccgggatgccgagtggacaacagtcttcaagaacacatcaggctgcctgaggaatgtgagctcagatggtgcagaggcccggcggcgactccgtgagtgcgaagggctggtggacgctctcctacatgccctgcagtcagctgtgggcaggaaagacacagataataagtcagtagagaactgtgtgtgcatcatgcggaacctgtcctaccacgtgcacaaagaagttccaggggctgacaggtaccaggaggcagagcctgggatcccgggcagcacaacctcccagcgacggaggaaggatgacgccagctgctttggtggcaagaaagcaaaagaggagtggttccatcaagggaagaaggatgcagagatggaccggaactttgacacactggacctgcctaaacgaacggaggctgcaaaaggcttcgagctgctgtaccagccggaggtggtacgtctctacctctcactccttacggagagccggaacttcaacaccctggaagctgcagccggtgccctgcaaaacctcagtgctggcaactggacgtgggccacgtacatccgtgccacagtgcgcaaggaacgtgggctgccagtactggtggaactgctacagtctgagaccgacaaggtggtgcgcgctgtagccatcgcgctgcgcaacctctcactagaccagcggaacaaagacctcatcgggagctatgccatgacagagctggttcggaatgttcgcaatgcacaggctcccgctcaccccagtgcccacctggaggaggatactgtggttgccgtgctcaacaccatccatgagatcgtgtccgacagcctggacaatgctcgctccctcctgcaggcccgtggtgtgcctgccctggtagcacttgtggcctccagccagtcagtgcgggaggccaaggcagcatcacacgtgctacagactgtatggagctacaaggagctgcgtggagccctgcagagggatggctggacgaagtcacgcttccagtctgctagcactgccaaaggacccaaagggacaccaagttctggcggctttgatgacagcacactgccactggtagacaagagccttgatggggagaagtcaaacacccgggatgtgatccccatggatacccttggtccagatggttacgccacagttgaccggagggagaggaggacactgggcagtgactccacaggggacacctctgagaaagaactattgagacccgatcctggcaggaaggcccctccgcctgggcccagcaggccctcggtcaggctggtggacgccgtgggggacactaagcctcagcctgttgactcctgggtctagcttgcatgcctgggccctggcccagctgtttgttcttagggatcgcatcgaggtagctggaagagggccagagggcccgccatcttgagcagaaccagtcttggagccaggagccccaccctgctgtggcagggtggccaagcctcttgtcctaccttaccctaccctcttctctactcttctgctctaactctccaggtctgagttagctgtttactgacatggtgctgtgtggtaggagaggaggctggggggaggtccccatgcacagccacagaggagcaaatacaagcctggattggaggtcctggagcaggcaatgggacaagtagggggccttggaaaagaacttgggctcccaagggtggctggagtactacactgcatgtaggctgaccacagggagggctgctctaaaagagtccagacagggaagtttaggaggcagccagattgggggtagtggcaagctgtgcttgtcaccagcacccccatccttggattcctggaacaccttccctctgcagcatactcctcctaagctgcctgtggctggggccaccctggctgttgcatctgcctagaacctcaagtaacctcggggcctgactgccggcagcagtggggggaactgctgttcagtgcctgctgtttgtgactttaaaatgaagaaaactgacaaaatgcattaaaaatgaaaccaaaataagactatcaacaaaaattgaaatttttgtaagaaaatttaaagattaaaaaagcagcaaagaactgcctgtcttctgccttggctcaccaggagagggcacagtcctgtgctagctgagccaccactgccccctggtgaagatacagttccctcaagtcccattgcagggagggggtggaaggggtatgggggttgtgctctgcccctggcctcaggcacgtcccactgctgtcactcctggctcctgtgtgccggctgaccaatatgggcatatgtgggagcagacaagatggagctgacctttgtttctagtctaggaaatgggcccctactgaggccttgaggagcctcttgaaagagatgggggctagggtgactcttaagcttgggttggcacttcctcagaatctgggtgcctggcagacatgcctcaatggtgtgaactggagagactgtttatcccagagacatcggggacagcgtggccccatgcctgtttagtcagagatgagtacaaaggctgttctgcgccaagtaagagcagtgtggtagctgaaaagaataactcagtgaatttcttatatccaaatatttagatctttaatttcttttataatataaaagagattatgactttttttttcaaagtatttctatgtagccctggctgtcctggaactcactgtgtagaccaggctggcacagaactcagatccatctgcctctgcctcctggattctgggattaaaggcatgcgccatcatacctg

SEQ ID NO: 48 - protein, 962 aa, Mus musculus
MEDCNVHSAASILASVKEQEARFERLTRALEQERRHVALQLERAQQPGMSSGGMVGSGQPLPMAWQQLVLQEQSPGSQASLATMPEAPEVLEETVTVEEDPGTPTSHVSIVTSEDGTTRRTETKVTKTVKTVTTRTVRQVPLGPDGLPLLDGGPPLGSFADGPLDRHYLLRGGGGPAATLSRTYHSSGGGFPDGPESRDIPSYGSLSRGLGVRPPRTGLLGPGPGDGCFTLPGRREAFPMGSESGPPSGRSLPEHFQAEPYGLEDDTRSLAADDEGGPDLEPDYSTATRRRPEYGRGLRARAFEDTADDAGELIEERPPFPAATAPLAQPERGSLGSLDRVVRRSPSVDSTRKEPRWRDPELPEVLAMLRHPVDPVKANAAAYLQHLCFENEGIKRRVRQLRGLPLLVALLDHPRAEVRRRACGALRNLSYGRDTDNKAAIRDCGGVPALVRLLRAARDNEVRELVTGTLWNLSSYEPLKMVIIDHGLQTLTHEVIVPHSGWEREPNEDSKPRDAEWTTVFKNTSGCLRNVSSDGAEARRRLRECEGLVDALLHALQSAVGRKDTDNKSVENCVCIMRNLSYHVHKEVPGADRYQEAEPGIPGSTTSQRRRKDDASCFGGKKAKEEWFHQGKKDAEMDRNFDTLDLPKRTEAAKGFELLYQPEVVRLYLSLLTESRNFNTLEAAAGALQNLSAGNWTWATYIRATVRKERGLPVLVELLQSETDKVVRAVAIALRNLSLDQRNKDLIGSYAMTELVRNVRNAQAPAHPSAHLEEDTVVAVLNTIHEIVSDSLDNARSLLQARGVPALVALVASSQSVREAKAASHVLQTVWSYKELRGALQRDGWTKSRFQSASTAKGPKGTPSSGGFDDSTLPLVDKSLDGEKSNTRDVIPMDTLGPDGYATVDRRERRTLGSDSTGDTSEKELLRPDPGRKAPPPGPSRPSVRLVDAVGDTKPQPVDSWV

SEQ ID NO: 49 - DNA, 3629 bp, Mus musculus
tcggccgccagcattttggcctcggtgaaggaacaggaggcccgtttcgagcggctgacacgggcactagaacaagaacggcgccatgttgccctgcagctggagcgtgcccagcagcctggcatgagcagtggtggtatggtgggcagtgggcagcccctgccaatggcctggcagcagctggttctgcaggagcagagcccgggtagccaggcatcgctggccacgatgccagaggcacccgaggtactggaggagacagtgactgtggaggaagaccctggcacccccacctctcacgtgtccatcgtcacatcagaagatggtacaacccggcggactgagactaaggtcactaagacggtcaagactgtgaccacaaggacagtacgccaggtgcctttgggcccagatggactccccttgctggacggcggccctccacttggctcttttgctgacgggcccctggaccggcattacctacttcgtggtggtggtggtccagcagccacactctcccgaacctaccacagcagtggaggtggctttcccgatggccccgagtcccgtgatattccaagctatggcagcttgtcccgagggctcggggtacggccaccacgtactggcctcctgggcccaggacctggtgatggctgtttcacactgcctggccgccgagaagccttccccatgggctctgaatccggaccaccaagcggccgctctctgcctgagcatttccaagctgaaccatatggcctggaggatgatacacggagcctggctgcggatgatgagggtggccccgacctggagcctgactatagcacggcaacccggagaagacctgagtacgggcggggccttcgtgccagggcctttgaagacacagcagatgatgctggtgagctgatagaagagcgtcccccatttccagcagcaacagcccctctggcccagcctgagaggggcagcctgggcagcttggaccgagtagtgcggcgctcaccttcagtggatagcacccgcaaggagccacgctggcgggaccccgagctgccagaggtgttggccatgctgcggcaccctgtggaccctgtgaaagccaatgctgcagcctacctgcagcacctctgctttgagaacgagggtattaagcggcgagtgcggcagctgcgtgggctccccctgcttgtggcattactagatcaccctcgggctgaggtgcggcgccgggcctgtggggcactgcgcaacctctcctatggccgggatactgacaacaaggccgccatccgggactgcgggggcgtgccagccctggtgcgcctactgcgggcggcccgtgacaatgaggtccgtgagctggtcactggcacactctggaacctgtcatcctacgagcccctgaagatggtcatcattgaccacggcttacagactctgacccatgaggtcatcgtgccccattccggctgggagcgagagcctaacgaagactcgaagccccgggatgccgagtggacaacagtcttcaagaacacatcaggctgcctgaggaatgtgagctcagatggtgcagaggcccggcggcgactccgtgagtgcgaagggctggtggacgctctcctacatgccctgcagtcagctgtgggcaggaaagacacagataataagtcagtagagaactgtgtgtgcatcatgcggaacctgtcctaccacgtgcacaaagaagttccaggggctgacaggtaccaggaggcagagcctgggatcccgggcagcacaacctcccagcgacggaggaaggatgacgccagctgctttggtggcaagaaagcaaaagggaagaaggatgcagagatggaccggaactttgacacactggacctgcctaaacgaacggaggctgcaaaaggcttcgagctgctgtaccagccggaggtggtacgtctctacctctcactccttacggagagccggaacttcaacaccctggaagctgcagccggtgccctgcaaaacctcagtgctggcaactggacgtgggccacgtacatccgtgccacagtgcgcaaggaacgtgggctgccagtactggtggaactgctacagtctgagaccgacaaggtggtgcgcgctgtagccatcgcgctgcgcaacctctcactagaccagcggaacaaagacctcatcgggagctatgccatgacagagctggttcggaatgttcgcaatgcacaggctcccgctcaccccagtgcccacctggaggaggatactgtggttgccgtgctcaacaccatccatgagatcgtgtccgacagcctggacaatgctcgctccctcctgcaggcccgtggtgtgcctgccctggtagcacttgtggcctccagccagtcagtgcgggaggccaaggcagcatcacacgtgctacagactgtatggagctacaaggagctgcgtggagccctgcagagggatggctggacgaagtcacgcttccagtctgctagcactgccaaaggacccaaagggacaccaagttctggcggctttgatgacagcacactgccactggtagacaagagccttgatggggagaagtcaaacacccgggatgtgatccccatggatacccttggtccagatggttacgccacagttgaccggagggagaggaggacactgggcagtgactccacaggggacacctctgagaaagaactattgagagtgaagagtccgagcaaacggatttgtacctttctcttacatgtgtatgggcaaggtgtctactgtggtcccctggaaaaggcagcatctaccacctgtgtgccagtatcctggcttcacgtaccagcctctggggccctggcccagctgtttgttcttagggatcgcatcgaggtagctggaagagggccagagggcccgccatcttgagcagaaccagtcttggagccaggagccccaccctgctgtggcagggtggccaagcctcttgtcctaccttaccctaccctcttctctactcttctgctctaactctccaggtctgagttagctgtttactgacatggtgctgtgtggtaggagaggaggctggggggaggtccccatgcacagccacagaggagcaaatacaagcctggattggaggtcctggagcaggcaatgggacaagtagggggccttggaaaagaacttgggctcccaagggtggctggagtactacactgcatgtaggctgaccacagggagggctgctctaaaagagtccagacagggaagtttaggaggcagccagattgggggtagtggcaagctgtgcttgtcaccagcacccccatccttggattcctggaacaccttccctctgcagcatactcctcctaagctgcctgtggctggggccaccctggctgttgcatctgcctagaacctcaagtaacctcggggcctgactgccggcagcagtggggggaactgctgttcagtgcctgctgtttgtgactttaaaatgaagaaaactgacaaaatgcattaaaaatgaaaccaaaataagactatcaacaaaaattgaaatttttgtaagaaaatttaaagattaaaaaagcagc

SEQ ID NO: 50 - protein, 983 aa, Mus musculus
SAASILASVKEQEARFERLTRALEQERRHVALQLERAQQPGMSSGGMVGSGQPLPMAWQQLVLQEQSPGSQASLATMPEAPEVLEETVTVEEDPGTPTSHVSIVTSEDGTTRRTETKVTKTVKTVTTRTVRQVPLGPDGLPLLDGGPPLGSFADGPLDRHYLLRGGGGPAATLSRTYHSSGGGFPDGPESRDIPSYGSLSRGLGVRPPRTGLLGPGPGDGCFTLPGRREAFPMGSESGPPSGRSLPEHFQAEPYGLEDDTRSLAADDEGGPDLEPDYSTATRRRPEYGRGLRARAFEDTADDAGELIEERPPFPAATAPLAQPERGSLGSLDRVVRRSPSVDSTRKEPRWRDPELPEVLAMLRHPVDPVKANAAAYLQHLCFENEGIKRRVRQLRGLPLLVALLDHPRAEVRRRACGALRNLSYGRDTDNKAAIRDCGGVPALVRLLRAARDNEVRELVTGTLWNLSSYEPLKMVIIDHGLQTLTHEVIVPHSGWEREPNEDSKPRDAEWTTVFKNTSGCLRNVSSDGAEARRRLRECEGLVDALLHALQSAVGRKDTDNKSVENCVCIMRNLSYHVHKEVPGADRYQEAEPGIPGSTTSQRRRKDDASCFGGKKAKGKKDAEMDRNFDTLDLPKRTEAAKGFELLYQPEVVRLYLSLLTESRNFNTLEAAAGALQNLSAGNWTWATYIRATVRKERGLPVLVELLQSETDKVVRAVAIALRNLSLDQRNKDLIGSYAMTELVRNVRNAQAPAHPSAHLEEDTVVAVLNTIHEIVSDSLDNARSLLQARGVPALVALVASSQSVREAKAASHVLQTVWSYKELRGALQRDGWTKSRFQSASTAKGPKGTPSSGGFDDSTLPLVDKSLDGEKSNTRDVIPMDTLGPDGYATVDRRERRTLGSDSTGDTSEKELLRVKSPSKRICTFLLHVYGQGVYCGPLEKAASTTCVPVSWLHVPASGALAQLFVLRDRIEVAGRGPEGPPS

SEQ ID NO: 51 - DNA, 2123 bp, Mus musculus
accgtggagtgccgccgtgtaaataaaaaggaaaaaaaagtttctcaagtcgcagctgcacgacgtcgggccgcgccgcgccggggcgggggtctgcgctctcggagcggccgcgcgcgggactcggtggtgccgccagccccggccccattgtttgtgttttcttcaaaatatggcaaaggttcaggtgaacaatgtagtggtgctggataacccgtcgcctttctacaacccgttccagttcgagatcaccttcgagtgcatcgaggacctgtctgaagacttggagtggaaaataatctatgtgggctctgcagaaagtgaagaatacgatcaagttttagactctgttttagtgggtcccgttcctgcaggaaggcatatgtttgtgtttcaggctgatgcaccgaatgcaggactcatcccagatgcagatgcagtgggggtaacagttgttctgattacttgcacctaccgaggtcaagaatttattagagttggctactatgtaaataatgaatacactgaaacagaattaagggaaaacccaccagtaaaaccagacttttctaagcttcaaaggaatattttggcatctaatcccagagtcacaagattccacattaactgggaagataatacagaaaaactggaagatgcagagagcagtaacccaaatctacagtcccttctttcaacagatgcattaccgtcagcgtcaaagggatggtccacgtcagaaaactcactcaatgttatgttagaatcccacatggactgcatgtgaccacgtgccatcccattagtacagattaagctattaaaaacagaactatttccctgaagttccgtaagtacatagtcaacgtgaaatgtgaagaatttgtttaaaaacatcctgtagaaagtttataagaaaaaccagtatttgagcaaattgtggattataaatacaactatttttaagtacttttttctctaatgtgttattttatttgttcatgaaactaatctgattaaagcatatatattattttcttctcttttatatgtaattaaagcacttatatcaaattattagaccaggttgtaaaggtgttgttttagcctcttggacaataagatttactagcttttaaaaaaacaaagtttacttcaactaaaatgatttattcctgtgaagatagtgtccttttaatttgaggagaaaacttccattctgtagtaaaaaagatcacattaaaatgggatttgaagtcaattatatgccaccagggtttttctaggccaccccagtgcatcttaccacaacttgtgttacaccagacttctagtttttatataacaaatgcagctgcctttgaagtccctctgactatggtgtatgcttccttacatctaaaactgggaaaccacgaccataaatcattgtccagagatttcaacatggcaagagcaaatacaagttctctaaagtgtaagattacattaaaatggttcagatctgctctttctttcagtttacagaaatgccgaacttacaagggtaatttagaaaggcctggttagctttattctggctagctactttacgaagcatgtcttaccatttgcagttgtattaccccatatcctctggctctcattaacgtgtaagatcagggtattttctgtagttgacataatctacataacttttccagacttctttttttctttctgaagagcagttttagaaaggataaatgggccaaaagtgtattttctttaatgagaagtaaatacttcctcaaagttctgatccattacatttacagtacagtattttcatttgattatggtgatgatgcacaggagagccatgggatgcaggttatgcggtgccttcacatctaagcttttatactgcacttttcaaaacagtctgaggaaaaggaaagggcatttgtctaaacagactcttttaagttgtatatatttcttgctattttaaaaggtaaatttgtgcaaccaagtcttgttaaatgttaaactttgaaatttaagactccaggttattacagtattgaccattacccagttcatagattttaaaaataaaacctgactactaaaacgatttg

SEQ ID NO: 52 - protein, 204 aa, Mus musculus
MAKVQVNNVVVLDNPSPFYNPFQFEITFECIEDLSEDLEWKIIYVGSAESEEYDQVLDSVLVGPVPAGRHMFVFQADAPNAGLIPDADAVGVTVVLITCTYRGQEFIRVGYYVNNEYTETELRENPPVKPDFSKLQRNILASNPRVTRFHINWEDNTEKLEDAESSNPNLQSLLSTDALPSASKGWSTSENSLNVMLESHMDCM

SEQ ID NO: 53 - DNA, 2440 bp, Mus musculus
gccggcggccagggcgagcgcttgctggcaacacgatgcggtccttgctgctgttcactttctcggcgtgcgtgctgctggcccgggtgctgctggctggcggcgcgagcagcggcgccggggacacccggccaggcagcaggcgccgggcgagagaggcgctggcggctcaaaagatcgaggtgcttgttctattgccccgggacgattcgtacttgttctcgctggcccgggtgaggccggccatcgagtacgcgctgcgtagcgtggagggcaatggcaccgggaggaagctgctgccgccaggcactcgcttccaggtggcctacgaagactcggactgcggcaaccgcgcgctcttcagtcttgtggaccgcgtggcggcggcgcgcggcgccaagccggatctcatcctggggcccgtgtgcgagtacgcggcggcgccggtggctcggctggcgtctcactgggacctgccgatgctgtccgcaggagcgctggccgccggtttccagcacaaggacacggaatactcgcacctcacgcgcgtggcgcctgcctacgccaagatgggagagatgatgctcgctctgtttcgccaccaccactggagccgtgcagccctggtctacagcgacgacaaactcgagaggaactgttatttcaccctcgagggggtccacgaggtttttcaggaggaggggttgcacacgtctgcctacaatttcgacgagaccaaagacttggacctggacgacatagtgcgctacatccaaggcagcgagcgagtggtgatcatgtgtgccagtggtgacaccattcggagaatcatgttggcggtgcacagacacggcatgaccagtggagactacgctttcttcaacattgaactcttcaacagttcttcctacggagatggctcgtggaggagaggagacaaacacgactctgaagctaaacaagcatactcgtccctccaaacagtcaccctactgaggaccgtgaaacctgagtttgagaagttttccatggaggtgaaaagttctgttgagaaacaagggctcaatgaggaggattacgtgaacatgtttgttgaagggttccatgacgccatcctcctctacgttctggctttacatgaagtactcagagctggctacagcaagaaggatggggggaaaatcatccagcagacttggaacaggacatttgaaggtatcgccgggcaggtgtccatagatgccaacggggaccggtatggggacttctctgtggttgccatgactgacactgaagcaggcacccaagaggtcattggtgattactttgggaaagaaggccggttccaaatgcgatcgaatgtcaaatatccttggggccctttgaaactgagactagatgagaccagaatcgtggagcataccaacagctctccttgcaaatcatcaggtggcctagaagaatctgcagtgacaggaatcgttgtgggggccctactaggtgctggcttgctaatggccttctactttttcaggaagaaatacagaataaccattgagaggcgaaatcagcaagaggaaagcaacatcgggaagcatcgagagctgcgagaagattccatcagatcacatttttcggtggcttaaaagagatgcccctctcgcttcgtctacttgagattccttaaagagatagatggaaggacagacatcaacggagcagaaagggcgttctcggagaagtcattcttttaagcagtagtcatttcattttacattttctttagaagctcaggaatgattgttaatcactatctgccttctggcctctcatctcatggcaaactaatataatgaaacaacgcaatgctgttaagtgttctggctgctggaggggcatcagaggagatttatgtcttgaaagtctgctgcgtccatatcttgattgctttgggggcagttcacacgaggatagaaaaatgtggcttttctgaaatgaaatgtttcgtagctaggataaaacaatttttacaaggagaatattcttggaaagaatttaacacccaataagaggacaatggaatgaaagaaatctccaggctgggaatgcagtgcccctctctctggaactgggggacaggtttgtggttgatgaaggctgcgtccaacgtccacattcaggtctgaattcatatctcaagaaaggatcctccctgtctcttttagtgtctcatcagagctactctggaaaactgtaaatattagtgagcaaggaggatttatataagaaaattgagtctaaaatgcttcttatacgatgtaaaaaaagtcctacttcacactaacattttatttttaagtattttaatcttatattttggtattagaaatgtgtctattttttcattttgaagattaaatttcacttatattttaagagc

SEQ ID NO: 54 - protein, 536 aa, Mus musculus
MRSLLLFTFSACVLLARVLLAGGASSGAGDTRPGSRRRAREALAAQKIEVLVLLPRDDSYLFSLARVRPAIEYALRSVEGNGTGRKLLPPGTRFQVAYEDSDCGNRALFSLVDRVAAARGAKPDLILGPVCEYAAAPVARLASHWDLPMLSAGALAAGFQHKDTEYSHLTRVAPAYAKMGEMMLALFRHHHWSRAALVYSDDKLERNCYFTLEGVHEVFQEEGLHTSAYNFDETKDLDLDDIVRYIQGSERVVIMCASGDTIRRIMLAVHRHGMTSGDYAFFNIELFNSSSYGDGSWRRGDKHDSEAKQAYSSLQTVTLLRTVKPEFEKFSMEVKSSVEKQGLNEEDYVNMFVEGFHDAILLYVLALHEVLRAGYSKKDGGKIIQQTWNRTFEGIAGQVSIDANGDRYGDFSVVAMTDTEAGTQEVIGDYFGKEGRFQMRSNVKYPWGPLKLRLDETRIVEHTNSSPCKSSGGLEESAVTGIVVGALLGAGLLMAFYFFRKKYRITIERRNQQEESNIGKHRELREDSIRSHFSVA

SEQ ID NO: 55 - DNA, 3647 bp, Mus musculus
tgttgagttcaatcaattcagaacgtcgagatggagcccaactcactccagtgggtcggctcaccgtgtggcttgcacggaccttatattttttataaggcttttcaattccaccttgaaggcaaaccaagaatcttgtcccttggcgactttttctttgtaagatgtacgccaaaggatccgatttgcatagcggagctccagctgttgtgggaagaaaggaccagccggcaacttttatccagctcgaaactttatttcctccccgaagacactccccagggcagaaatagcgaccatggcgaggatgaggtcatcgctgtctctgaaaaggtgattgttaaattagaggaccttgtcaaatgggcgcattctgatttctccaagtggaggtgtgggctccgagccactccagtgaaaactgaggccttcgggagaaacggacagaaggaggctctgctcaggtacaggcagtcaaccctcaacagtgggctcaacttcaaagacgttctcaaggaaaaagctgatctcggggaagatgaggaagaaaccaacgtgattgtgctcagttacccccagtactgtcggtaccggtccatgcttaaacggatccaggataagccatcgtccatcctcacggaccagttcgcattagccctggggggcatcgcagtggtcagcagaaacccccagatcctgtactgccgggatacctttgatcaccccactctgatagaaaacgagagtgtgtgtgatgagttcgcgccaaatcttaaaggcagaccacgcaaaaagaaaacatgtccccagagaagagattccttcagtggctcaaaggaccccaacaataactgtgacggtaaagttatcagcaaggtgaaaggagaggccaggtcagccttgaccaagccgaagaataaccacaataactgtaaaaaaacctcaaatgaagaaaagccaaagctgtctattggcgaagaatgcagggcagatgaacaagccttcttagtggccctgtataaatacatgaaagaaagaaaaacgcccatcgagcgaattccctacttgggtttcaaacagattaacctttggactatgtttcaagctgctcaaaaactgggaggatatgaaacaataacagcccgccgtcagtggaaacatatttatgacgagttaggtggtaatcctgggagcaccagtgcggccacctgtactcgcagacactacgaaaggttaatcctgccatacgaaagatttattaagggagaagaagataagcctctgccgccaatcaaacctcggaaacaggaaaacaatacacaggaaaatgagaataaaacaaaagtctcgggaaacaaacgtatcaaacaggaaatggccaaaaacaagaaagaaaaagagaacacccccaaaccccaagatacatctgaggtttcatcagagcaaaggaaggaagaagagacgttaaaccacaaaagcgcccccgagcctctccctgctcctgaagtaaaggggaaaccagaagggcacaaggatcttggagcgagggccccagtgtccagagcagacccagaaaaggccaatgaaactgaccaaggttccaacagcgagaaagaggccgaggagatgggagataagggccttgcccctctgcttccaagccctcccttgcctcctgaaaaagattcagctcccacccctggggctggcaaacagccccttgcctctcccagcacccagatggactcaaagcaagaagccaaaccctgctgctttacagagagccctgagaaggacctccaaggagcacccttctccagcttctctgccaccaagccaccactgacaagccagaacgaggcagaggaagagcagcttcctgccacggccaactacattgccaactgcactgtgaaggtggaccagctgggcagtgacgacatccacactgctctcaagcagaccccgaaggtccttgtggtccaatcatttgacatgttcaaagacaaagacttgaccggccccatgaatgagaaccacggacttaactacacgcccctgctttactcccggggcaaccctggtatcatgtccccattggctaagaaaaagcttttgtctcaggtgagtggggccagcctctccagcagctatccctatggctccccgccccctttgatcagcaaaaagaaactcattgccagggaagacctgtgctcgggtttgtcccagggccaccacagccaaagctctgaccacacggccgtcagccggccatccgtaatccaacatgttcagagcttcaaaaacaaggcctccgaagacagaaagagcatcaacgacatcttcaagcacgacaaactgagccggtccgatgctcatcgatgtggcttctccaagcaccagctcggctccctggcagactcctacatcctcaaacaagagacacaggagggcaaagataaactgttagagaagagagccgtctcccacgcccatgtgcccagtttcctggccgacttctactcatccccgcatctccatagcctctaccggcacacagagcaccatcttcacaacgaacagtcctccaagtatgccgctagggacgcgtaccaggaatccgaaaacggcgcctttctttctcacaagcacccggagaagatccacgtcaattatctcgcatctctccacctgcaagataagaaggtggcagcggcagaagcctctaccgatgatcaacccacagatctgagccttcccaagaacccacataaactaaccagcaaagtcctgggcctggcccactccacctcggggtcccaggagatcaaaggcgcctcccagttccaggtcgtcagcaaccagagtcgagactgtcatcccaaagcctgccgggtatcgcccatgaccatgtcgggccctaagaaataccctgagtcacttgcaaggtcaggaaagcctcaccaggtgagactggagaacttcaggaaaatggaaggcatggtccatcccatcctgcaccggaagatgagcccgcagaacattggagctgcgcgccccataaagcgcagcctggaggatttagatctggtgatcgccgggaaaaaggccagggctgtgtctcccttggacccagccaaggaggcttctgggaaagaaaaggcctccgaacaggagagcgagggcaacaaaggcgcctacggtgggcattctggggctgcctcagaagggcacaagctccctctctccacccctatcttcccgggtttgtattctgggagcctgtgtaattcaggcctcaactccaggctcccggccgggtactcccattctctgcagtacttgaagaaccagacggtgctttctcctctcatgcaacccctggctttccactcgctcgtgatgcagagaggaatttttacatcgccgacaaattctcagcagctgtacagacacttggccgcagccacccctgtaggaagttcctacggggacctgttgcacaacagcatctacccattagctggtatcaaccctcaggctgccttcccatcttctcagctgtcatccgtacaccccagcacaaaactgtaagcctcgatttgcccagcatccccaaatggtgtggtccattgcaccaactc

SEQ ID NO: 56 - protein, 1188 aa, Mus musculus
MEPNSLQWVGSPCGLHGPYIFYKAFQFHLEGKPRILSLGDFFFVRCTPKDPICIAELQLLWEERTSRQLLSSSKLYFLPEDTPQGRNSDHGEDEVIAVSEKVIVKLEDLVKWAHSDFSKWRCGLRATPVKTEAFGRNGQKEALLRYRQSTLNSGLNFKDVLKEKADLGEDEEETNVIVLSYPQYCRYRSMLKRIQDKPSSILTDQFALALGGIAVVSRNPQILYCRDTFDHPTLIENESVCDEFAPNLKGRPRKKKTCPQRRDSFSGSKDPNNNCDGKVISKVKGEARSALTKPKNNHNNCKKTSNEEKPKLSIGEECRADEQAFLVALYKYMKERKTPIERIPYLGFKQINLWTMFQAAQKLGGYETITARRQWKHIYDELGGNPGSTSAATCTRRHYERLILPYERFIKGEEDKPLPPIKPRKQENNTQENENKTKVSGNKRIKQEMAKNKKEKENTPKPQDTSEVSSEQRKEEETLNHKSAPEPLPAPEVKGKPEGHKDLGARAPVSRADPEKANETDQGSNSEKEAEEMGDKGLAPLLPSPPLPPEKDSAPTPGAGKQPLASPSTQMDSKQEAKPCCFTESPEKDLQGAPFSSFSATKPPLTSQNEAEEEQLPATANYIANCTVKVDQLGSDDIHTALKQTPKVLVVQSFDMFKDKDLTGPMNENHGLNYTPLLYSRGNPGIMSPLAKKKLLSQVSGASLSSSYPYGSPPPLISKKKLIAREDLCSGLSQGHHSQSSDHTAVSRPSVIQHVQSFKNKASEDRKSINDIFKHDKLSRSDAHRCGFSKHQLGSLADSYILKQETQEGKDKLLEKRAVSHAHVPSFLADFYSSPHLHSLYRHTEHHLHNEQSSKYAARDAYQESENGAFLSHKHPEKIHVNYLASLHLQDKKVAAAEASTDDQPTDLSLPKNPHKLTSKVLGLAHSTSGSQEIKGASQFQVVSNQSRDCHPKACRVSPMTMSGPKKYPESLARSGKPHQVRLENFRKMEGMVHPILHRKMSPQNIGAARPIKRSLEDLDLVIAGKKARAVSPLDPAKEASGKEKASEQESEGNKGAYGGHSGAASEGHKLPLSTPIFPGLYSGSLCNSGLNSRLPAGYSHSLQYLKNQTVLSPLMQPLAFHSLVMQRGIFTSPTNSQQLYRHLAAATPVGSSYGDLLHNSIYPLAGINPQAAFPSSQLSSVHPSTKL

SEQ ID NO: 57 - DNA, 3030 bp, Mus musculus
gcgagcagcgctgagcctcctcgcagctaggaagccgatatccacaccaagaccagactcccagggatgcggctggggaaccgtcccctgccggagctttcctgagcacaggcatcgatcaggcagatgtttggcgactggaatggcgccaaatcttaaaggcagaccacgcaaaaagaaaacatgtccccagagaagagattccttcagtggctcaaaggaccccaacaataactgtgacggtaaagttatcagcaaggtgaaaggagaggccaggtcagccttgaccaagccgaagaataaccacaataactgtaaaaaaacctcaaatgaagaaaagccaaagctgtctattggcgaagaatgcagggcagatgaacaagccttcttagtggccctgtataaatacatgaaagaaagaaaaacgcccatcgagcgaattccctacttgggtttcaaacagattaacctttggactatgtttcaagctgctcaaaaactgggaggatatgaaacaataacagcccgccgtcagtggaaacatatttatgacgagttaggtggtaatcctgggagcaccagtgcggccacctgtactcgcagacactacgaaaggttaatcctgccatacgaaagatttattaagggagaagaagataagcctctgccgccaatcaaacctcggaaacaggaaaacaatacacaggaaaatgagaataaaacaaaagtctcgggaaacaaacgtatcaaacaggaaatggccaaaaacaagaaagaaaaagagaacacccccaaaccccaagatacatctgaggtttcatcagagcaaaggaaggaagaagagacgttaaaccacaaaagcgcccccgagcctctccctgctcctgaagtaaaggggaaaccagaagggcacaaggatcttggagcgagggccccagtgtccagagcagacccagaaaaggccaatgaaactgaccaaggttccaacagcgagaaagaggccgaggagatgggagataagggccttgcccctctgcttccaagccctcccttgcctcctgaaaaagattcagctcccacccctggggctggcaaacagccccttgcctctcccagcacccagatggactcaaagcaagaagccaaaccctgctgctttacagagagccctgagaaggacctccaaggagcacccttctccagcttctctgccaccaagccaccactgacaagccagaacgaggcagaggaagagcagcttcctgccacggccaactacattgccaactgcactgtgaaggtggaccagctgggcagtgacgacatccacactgctctcaagcagaccccgaaggtccttgtggtccaatcatttgacatgttcaaagacaaagacttgaccggccccatgaatgagaaccacggacttaactacacgcccctgctttactcccggggcaaccctggtatcatgtccccattggctaagaaaaagcttttgtctcaggtgagtggggccagcctctccagcagctatccctatggctccccgccccctttgatcagcaaaaagaaactcattgccagggaagacctgtgctcgggtttgtcccagggccaccacagccaaagctctgaccacacggccgtcagccggccatccgtaatccaacatgttcagagcttcaaaaacaaggcctccgaagacagaaagagcatcaacgacatcttcaagcacgacaaactgagccggtccgatgctcatcgatgtggcttctccaagcaccagctcggctccctggcagactcctacatcctcaaacaagagacacaggagggcaaagataaactgttagagaagagagccgtctcccacgcccatgtgcccagtttcctggccgacttctactcatccccgcatctccatagcctctaccggcacacagagcaccatcttcacaacgaacagtcctccaagtatgccgctagggacgcgtaccaggaatccgaaaacggcgcctttctttctcacaagcacccggagaagatccacgtcaattatctcgcatctctccacctgcaagataagaaggtggcagcggcagaagcctctaccgatgatcaacccacagatctgagccttcccaagaacccacataaactaaccagcaaagtcctgggcctggcccactccacctcggggtcccaggagatcaaaggcgcctcccagttccaggtcgtcagcaaccagagtcgagactgtcatcccaaagcctgccgggtatcgcccatgaccatgtcgggccctaagaaataccctgagtcacttgcaaggtcaggaaagcctcaccaggtgagactggagaacttcaggaaaatggaaggcatggtccatcccatcctgcaccggaagatgagcccgcagaacattggagctgcgcgccccataaagcgcagcctggaggatttagatctggtgatcgccgggaaaaaggccagggctgtgtctcccttggacccagccaaggaggcttctgggaaagaaaaggcctccgaacaggagagcgagggcaacaaaggcgcctacggtgggcattctggggctgcctcagaagggcacaagctccctctctccacccctatcttcccgggtttgtattctgggagcctgtgtaattcaggcctcaactccaggctcccggccgggtactcccattctctgcagtacttgaagaaccagacggtgctttctcctctcatgcaacccctggctttccactcgctcgtgatgcagagaggaatttttacatcgccgacaaattctcagcagctgtacagacacttggccgcagccacccctgtaggaagttcctacggggacctgttgcacaacagcatctacccattagctggtatcaaccctcaggctgccttcccatcttctcagctgtcatccgtacaccccagcacaaaactgtaagcctcgatttgcccagcatccccaaatggtgtggtccattgcaccaactc

SEQ ID NO: 58 - protein, 992 aa, Mus musculus
RAALSLLAARKPISTPRPDSQGCGWGTVPCRSFPEHRHRSGRCLATGMAPNLKGRPRKKKTCPQRRDSFSGSKDPNNNCDGKVISKVKGEARSALTKPKNNHNNCKKTSNEEKPKLSIGEECRADEQAFLVALYKYMKERKTPIERIPYLGFKQINLWTMFQAAQKLGGYETITARRQWKHIYDELGGNPGSTSAATCTRRHYERLILPYERFIKGEEDKPLPPIKPRKQENNTQENENKTKVSGNKRIKQEMAKNKKEKENTPKPQDTSEVSSEQRKEEETLNHKSAPEPLPAPEVKGKPEGHKDLGARAPVSRADPEKANETDQGSNSEKEAEEMGDKGLAPLLPSPPLPPEKDSAPTPGAGKQPLASPSTQMDSKQEAKPCCFTESPEKDLQGAPFSSFSATKPPLTSQNEAEEEQLPATANYIANCTVKVDQLGSDDIHTALKQTPKVLVVQSFDMFKDKDLTGPMNENHGLNYTPLLYSRGNPGIMSPLAKKKLLSQVSGASLSSSYPYGSPPPLISKKKLIAREDLCSGLSQGHHSQSSDHTAVSRPSVIQHVQSFKNKASEDRKSINDIFKHDKLSRSDAHRCGFSKHQLGSLADSYILKQETQEGKDKLLEKRAVSHAHVPSFLADFYSSPHLHSLYRHTEHHLHNEQSSKYAARDAYQESENGAFLSHKHPEKIHVNYLASLHLQDKKVAAAEASTDDQPTDLSLPKNPHKLTSKVLGLAHSTSGSQEIKGASQFQVVSNQSRDCHPKACRVSPMTMSGPKKYPESLARSGKPHQVRLENFRKMEGMVHPILHRKMSPQNIGAARPIKRSLEDLDLVIAGKKARAVSPLDPAKEASGKEKASEQESEGNKGAYGGHSGAASEGHKLPLSTPIFPGLYSGSLCNSGLNSRLPAGYSHSLQYLKNQTVLSPLMQPLAFHSLVMQRGIFTSPTNSQQLYRHLAAATPVGSSYGDLLHNSIYPLAGINPQAAFPSSQLSSVHPSTKL

SEQ ID NO: 59 - DNA, 4487 bp, Mus musculus
ggcgaaggggagccggcgtgcggggtgtgtatgtgttcgctgggcgccggctcagccccaggaagatggtggcggtggcggcggcggcggcgactgaggcgcggctgagggggagcacgacggcgacagcagcgcctgcgggcaggaagggcaggcagcaccgaccctgcaccgcgacaggggcctggaggccgggaccgcgcgcccggctgtgtctaccgcgggtgctgtcgcgggcgctgcccccgccgccgctgctgccgctgctcttttcgctgctgctgctgccgctgccccgggaggccgaggccgctgcggtggcggcggcggtgtcgggctcggccgcagccgaggccaaggaatgtgaccggccgtgtgtcaacggcggccgctgcaaccctggcaccggccagtgcgtctgccccacgggctgggtgggcgagcaatgccagcactgcgggggccgcttcagactaactggctcttctggatttgtaacagatggacctgggaattataaatataagacgaagtgcacatggctcattgaaggacagccaaatagaataatgagacttcgcttcaaccattttgctacagaatgtagctgggaccatttatatgtttatgatggggactcaatctacgcacctctgattgctgcctttagtggcctcattgttcctgaaagagatggcaatgagacggctcctgaggtcactgtcacttcaggttatgcactgctgcattttttcagtgatgctgcttataatctgactggatttaatatcacttacaattttgacatgtgtccgaataattgctcaggccgaggagagtgtaagagcagtaacagcagcagcgctgttgagtgtgaatgttctgaaaactggaaaggggagtcgtgtgacattcctcactgtacagacaactgtggctttcctcaccgaggcatctgtaatgcaagcgataccagagggtgctcctgctttcctcactggcagggtcctggatgctcaattcctgtgccagctaaccagtctttttggactcgagaagaatattctgatttaaagcttcccagagcctctcataaagctgtggtcaatggaaatataatgtgggttgttggcggatatatgttcaaccattcagattacagcatggttttagcgtatgacctgacttctagggaatggcttccactaaaccattctgtgaacagtgtggttgtaagatatggtcattctttggcattacataaggataaaatctacatgtatggaggaaaaattgattcaacagggaacgtgaccaatgagctgagagtatttcatattcataatgaatcatgggtattgttaactccgaaagctaaggatcagtatgcagtggttggacactcagcacacattgttacactggcatctggccgtgtggtcatgttggtcatcttcggtcattgcccactctatggatatataagcgttgtgcaggaatatgacttggaaaagaacacatggagtatattacatactcagggtgctcttgtgcaagggggttatggccacagtagtgtttatgatgacaggaccaaggctctgtacgttcatggtggctacaaggctttcagcgccaacaaataccggcttgcagatgacctctacagatacgatgtggatactcagatgtggaccattcttaaggacagccgatttttccgttacttgcatacagctgtgatagtgagtggaaccatgctggtgtttggagggaacacacacaatgacacttccatgagccacggtgccaaatgcttctcctcagacttcatggcttatgacattgcttgtgaccgatggtcagtgcttcccagacctgagctccatcatgatgtcaacagatttggccattcagcagtcttgtacaacagcaccatgtatgtgttcggcggcttcaacagcctcctcctcagtgacgtcttggtctttacctcggagcagtgcgatgcacaccgcagtgaagctgcttgtgtggcagcaggacctggtatccggtgtctgtgggacacacagtcgtctcgatgtacctcctgggagttggcaactgaagaacaagcagaaaagttaaaatcagagtgtttttctaaaagaacccttgaccatgacagatgtgaccagcacacagattgttacagctgcacagccaataccaatgactgccactggtgcaatgatcactgtgtccctgtgaaccacagctgcacagaaggccagatctccattgccaagtatgagagttgccccaaggataaccccatgtactactgcaataagaaaaccagctgcaggagctgtgccctagaccagaactgccagtgggagccccggaatcaagagtgcatcgccctgccggaaaatatctgtggcaatggctggcatttggttggaaactcgtgtctgaaaatcactactgctaaggagaattatgacaatgctaaattgtcctgtaggaaccacaatgcctttttggcttccctcacatcccagaagaaggtggagtttgtccttaagcagcttcgattaatgcaatcatctcaaagtatgtccaagctcactctgactccatgggttggtcttcggaagatcaatgtgtcttactggtgctgggaggatatgtctccattcacaaatagtttgctgcagtggatgccatctgagcccagtgatgctggcttctgtgggatcttgtcagagcctagtactcggggattaaaggctgcaacctgcatcaaccctctcaatggcagcgtctgtgaaaggcctgcaaaccacagtgccaagcagtgccggacaccatgtgccctgcggacagcgtgtggcgagtgcactagcagcagctcggagtgcatgtggtgcagtaacatgaagcagtgtgtggactccaatgcctacgtggcctccttcccttttggccagtgtatggaatggtatacgatgagcagctgcccacctgaaaattgctctggctactgtacctgcagccattgcttggagcagccaggctgtggttggtgtactgatcctagcaatactgggaaaggaaaatgtattgagggcagctataaaggacctgtgaagatgccgtcacaggcctctgcaggaaatgtgtatccacagccccttctgaactccagcatgtgtctagaggacagcagatacaactggtctttcattcactgtccagcttgccagtgcaacggacacagcaaatgcatcaaccagagtatctgtgagaagtgtgaggacctgaccacgggcaagcactgcgagacctgcatatctggcttctatggtgacccgactaatggaggcaaatgtcagccatgcaagtgcaatgggcacgcatcactgtgcaacaccaacaccggcaagtgcttctgtaccaccaaaggtgtcaagggggacgagtgccagctatgtgaggtagaaaatcgataccagggaaaccctctcaaaggaacatgctactatacccttctcattgactatcagttcacctttagcctgtcccaggaagacgaccgctactacacagccatcaactttgtggctactcctgatgaacaaaacagggatttggacatgttcatcaatgcctccaaaaacttcaacctcaacatcacctgggccaccagcttcccagccggaacccagactggagaagaggtgcctgttgtttcaaaaaccaacatcaaggaatacaaagatagcttctctaatgagaaatttgattttcgcaaccatccaaacatcactttctttgtttatgtcagtaatttcacttggcccatcaaaattcagattgccttctcccagcacagcaacttcatggacctggtacagttcttcgtgactttcttcagttgtttcctctcgctgcttctggtggctgcagtggtctggaagatcaagcagagctgttgggcatccaggcggagagagcaacttcttcgggagatgcaacagatggccagccgcccctttgcttctgtaaacgttgccttggaaacagatgaagaacctcctgatctcattgggggaagtataaagaccgttcctaagcccattgccctggagccctgctttggtaacaaagccgcagtcctctctgtattcgtgaggctccctcgaggactgggaggaatccctcctcctggtcagtcaggtgagtctcgctgtggccagtgccctggtggacatttctcagcagatgccaatagtgtacaaggagaagtcaggagctgtaagaaaccggaagcagcagccgcctgcacagcctggaacctgcatttgatactggggcaggaattcgccctcacagagggcgtgtggtccacgaagctgtctacaggggaggctgcaggcaggaagcaggcgtggggcagaagactggggacccttgaagcgtccaactcatgtgcatga

SEQ ID NO: 60 - protein, 1473 aa, Mus musculus
MVAVAAAAATEARLRGSTTATAAPAGRKGRQHRPCTATGAWRPGPRARLCLPRVLSRALPPPPLLPLLFSLLLLPLPREAEAAAVAAAVSGSAAAEAKECDRPCVNGGRCNPGTGQCVCPTGWVGEQCQHCGGRFRLTGSSGFVTDGPGNYKYKTKCTWLIEGQPNRIMRLRFNHFATECSWDHLYVYDGDSIYAPLIAAFSGLIVPERDGNETAPEVTVTSGYALLHFFSDAAYNLTGFNITYNFDMCPNNCSGRGECKSSNSSSAVECECSENWKGESCDIPHCTDNCGFPHRGICNASDTRGCSCFPHWQGPGCSIPVPANQSFWTREEYSDLKLPRASHKAVVNGNIMWVVGGYMFNHSDYSMVLAYDLTSREWLPLNHSVNSVVVRYGHSLALHKDKIYMYGGKIDSTGNVTNELRVFHIHNESWVLLTPKAKDQYAVVGHSAHIVTLASGRVVMLVIFGHCPLYGYISVVQEYDLEKNTWSILHTQGALVQGGYGHSSVYDDRTKALYVHGGYKAFSANKYRLADDLYRYDVDTQMWTILKDSRFFRYLHTAVIVSGTMLVFGGNTHNDTSMSHGAKCFSSDFMAYDIACDRWSVLPRPELHHDVNRFGHSAVLYNSTMYVFGGFNSLLLSDVLVFTSEQCDAHRSEAACVAAGPGIRCLWDTQSSRCTSWELATEEQAEKLKSECFSKRTLDHDRCDQHTDCYSCTANTNDCHWCNDHCVPVNHSCTEGQISIAKYESCPKDNPMYYCNKKTSCRSCALDQNCQWEPRNQECIALPENICGNGWHLVGNSCLKITTAKENYDNAKLSCRNHNAFLASLTSQKKVEFVLKQLRLMQSSQSMSKLTLTPWVGLRKINVSYWCWEDMSPFTNSLLQWMPSEPSDAGFCGILSEPSTRGLKAATCINPLNGSVCERPANHSAKQCRTPCALRTACGECTSSSSECMWCSNMKQCVDSNAYVASFPFGQCMEWYTMSSCPPENCSGYCTCSHCLEQPGCGWCTDPSNTGKGKCIEGSYKGPVKMPSQASAGNVYPQPLLNSSMCLEDSRYNWSFIHCPACQCNGHSKCINQSICEKCEDLTTGKHCETCISGFYGDPTNGGKCQPCKCNGHASLCNTNTGKCFCTTKGVKGDECQLCEVENRYQGNPLKGTCYYTLLIDYQFTFSLSQEDDRYYTAINFVATPDEQNRDLDMFINASKNFNLNITWATSFPAGTQTGEEVPVVSKTNIKEYKDSFSNEKFDFRNHPNITFFVYVSNFTWPIKIQIAFSQHSNFMDLVQFFVTFFSCFLSLLLVAAVVWKIKQSCWASRRREQLLREMQQMASRPFASVNVALETDEEPPDLIGGSIKTVPKPIALEPCFGNKAAVLSVFVRLPRGLGGIPPPGQSGESRCGQCPGGHFSADANSVQGEVRSCKKPEAAAACTAWNLHLILGQEFALTEGVWSTKLSTGEAAGRKQAWGRRLGTLEASNSCA

SEQ ID NO: 61 - DNA, 4423 bp, Mus musculus
gactggaatcgggggagctgcagcaacggcggctgcgggagcagggccggccatggcggtgtggacgcgggccaccaaagcggggctggtggagctgcttctaagggagcgctgggtgcgggtggtggccgagctcagtggcgagagcctgagcctgacgggcgacgccgccgcagtcgagcctgagccgccggcggccgccttcaacggtcttccgaacggcggcggcggcgagtctctgcccgggagcccgaaccgtggcctggggccgcccagccctcccgcgccgccccgcggtcccgcgggggaagcgagcgcctcgccgcccgtgcgccgagtgcgagtggtgaagcaagaggcgggcggcctgggcatcagcatcaagggcggccgcgagaaccggatgccgatcctcatctccaagatcttcccggggctggcggccgaccagagccgggcgctgcggctgggcgacgccatcctgtcggtgaacggcaccgacctgcgccaggccacccacgaccaggccgtgcaggcgctgaagcgcgcgggcaaggaggtgctgctggaggtcaaattcatccgagaagtaacaccatatatcaagaaaccatctttagtatcagatctgccatgggaaggtgcctctccccagtctccaagctttagtggcagtgaagactctggctctccaaagcatcagaacaccaccaaggacaggaaggtcatccctctcaaaatgtgctttgctgctcgaaacctgagcatgccagatctggagaacagattgatagagctacattctcctgatagcaggaacaccttgatcttacgctgcaaggatacggccacagcacactcctggttcgtagctatccacaccaacataatggctctcctcccacaggtactggctgagctcaatgccatgcttggtgcaaccagtacagcgggaggcagcaaggaagtcaagcatattgcctggctggcagagcaggcaaagctggatggtggacgacagcagtggaggcctgttctcatggctgtgactgagaaggacttgctactttatgactgcatgccttggacaagagatgcctgggcatcaccgtgtcatagctaccctcttgttgccacaaggttggttcattcaggttctggatgtcggtcaccctcccttggatctgacctgacctttgctaccaggacaggctctcggcagggcattgagatgcatctcttcagggttgaaactcatcgggatttgtcgacctggaccagaatacttgttcagggctgccatgctgctgctgagctgatcaaggaagtctccctaggctgcaccttaagtggccaagaggtaaggttcactgtccactatgaacacgggttcactatcaccagagacaatggaggcgccagcagcatattgtaccgctatccctttgaacggctgaagatgtctgctgatgatggaatcagaaatctctatttggattttggtggccctgagggagaactgactatggacctgcattcttgtccaaagccgattgtatttgtattgcacacgttcttatccgccaaagtcactcgcatgggactgcttgtgtgagcagcaagagtgaagaaagagctttgactgtcacaagaagtatttccacctcaaaagatgaaaagaaagaaaaagcaacaacaaagaagcacaaacagaagcccttgctcctgcctccatcacagtgccttcctgaggacctgcagaccactgctggaccacaacagggttttaggaagggccgacctttcccacacagccttggtcagaaattctagaactgttataagctccaaatgaaagctattgatttaccgtcttatttcataatgtgatctcaagtaatcaggtttcttttccctgttatgaagtctggcactttgggtttctctttggacataaacagatagccaaaaggggctcttcttttctttgtgtaggaatcatttgggtatagccttgagctcttcctgggatgactgtcgctctccggtgctagtgtgcagctgccgtccctcaggcacatcccacacaggtccttgcaccacagtgaccccgccctgtcccaccctccccacctctatctggcaccagctctgccacccataagtgctgcctttaggactcagaacttgcacagtctggttgcctttgccttcactccccttttttgtggtgtccaagttgaaaagcaagttggaaatgctgcccggaaagaggagtgttgctttctttagtttatattgagtttatatttggtaggagccaggggatggtctacagtttattttgaaagatcctcatcttacgctaagccatttcttattgcttaccaaatgtgcctttgggtagggtcagtggagctttattagtgactgtgggatgaccgggtctcactgctgttcctgggatcccagctggctttcaggagttgtccttgaggtcagttccttagtggcatcttttggtggtggttttgtgggtcacgttagctttgtagcacagatgccgttttgagtgacacagagcacgggggctaggagaggtcctggcactggtcttttgtggccccaaagtagtaaggacaagtcgcctccagctcaaggttaacgttggtttcctagcgccccctgggtggctgggacgatgagagcgagaccatggtagtcacctgcattttgttcagcacggccacatgttgtcatgactcagggtaagtgtgacctggaagaccatcctgtttgtttctcctgaaacactctacataaaacctcaagattagcacagctcccgaatctgaacaaaaaggaaatattaatatctgatatcttctagaggttttctaacctctctgaaaacatgtctagaaacagctctcatgttctagatttctctggagtgctacacagggatatggctcttcaaatggggtagagggtgaaagggaagaaaacataagtatttgtgcagagcctgagctgccttgattggcagggtagccagaggaaagagcagacgccaagcagaggtgtcaccctgctgtcctccgctgtcagtgagtcaggcctcctgctctgcagtcagactaacagtacccagaggctggggagaaagtcttaaccctgagataggttccatccctgatacatcttcaactcaaaagaaaaagaagaaatgtcccagctctgagtgcagaaagcagagctatagcagtaagagagctctggctcctgccccactgagctgcgggtgtgaaaggcggagacaccagggagactgacaggagcctctgccccctgttccttagaagagctgtaagtgggtaagctgtgctcttcttctggctgaggcctgtggcccacagggtttttaatactgtcatttgaggcttataaaatgaaggcttatgggtgattttgttgtcattaggagcaccaagagcaaggtcctaagctgcttgttccagaagctgtagcagccccaacccccgcaggtggtcagttaggaattttaaaccacaagtggaatgctttttgtgagtgtgggacaccttgatacaaacctatattatcaattttgtactcaaaagccaaaatatagcaaactattttcaaatgataactaaaaatgggcatctttgataattcacctctttttatagaatcagctatattgtctttaatttttcatcttgaacattattggggatgttgtgggctcctgggtgtgagtgggcaggaaactgtggagcgcctcctgttggatgggccacttcctaggcatctgtgcattccacacagtcccaggtcatcctgcagatgagagctctcctccccataagaaagaggactaaaggaagctcatgttaccaacaagccttgcctagaaattggtatcaaatattttatataaagaaatgcttgtgtgtatatgccatatttattaataattgtaactaaagtcactgacctatagacagtaccaggttaaatattgggatatgtatgggcaatcagaaatgttactttaaatgccatctgcctattttgaggccatgtttggcactttttagactagggtaagtctgataatacctggtggggttttgtcttttttttttttttttgtctgaactctcaaagtttgttactggaaattatttgcatggtaggagagattgaattatttattttttatatgtagaaaaatctctctaaccaacaaatagctcattgttactgatttgtttgttttcctaacttattctcctggacagaacggtagcaaagttttgttcagctgaataaatgcactcagctaataaaccaaaatttattctttcaaaataagaaattatctgttatcacc

SEQ ID NO: 62 - protein, 520 aa, Mus musculus
MAVWTRATKAGLVELLLRERWVRVVAELSGESLSLTGDAAAVEPEPPAAAFNGLPNGGGGESLPGSPNRGLGPPSPPAPPRGPAGEASASPPVRRVRVVKQEAGGLGISIKGGRENRMPILISKIFPGLAADQSRALRLGDAILSVNGTDLRQATHDQAVQALKRAGKEVLLEVKFIREVTPYIKKPSLVSDLPWEGASPQSPSFSGSEDSGSPKHQNTTKDRKVIPLKMCFAARNLSMPDLENRLIELHSPDSRNTLILRCKDTATAHSWFVAIHTNIMALLPQVLAELNAMLGATSTAGGSKEVKHIAWLAEQAKLDGGRQQWRPVLMAVTEKDLLLYDCMPWTRDAWASPCHSYPLVATRLVHSGSGCRSPSLGSDLTFATRTGSRQGIEMHLFRVETHRDLSTWTRILVQGCHAAAELIKEVSLGCTLSGQEVRFTVHYEHGFTITRDNGGASSILYRYPFERLKMSADDGIRNLYLDFGGPEGELTMDLHSCPKPIVFVLHTFLSAKVTRMGLLV

SEQ ID NO: 63 - DNA, 4699 bp, Mus musculus
agggaagcggctgcctcggcaggctgcttccaggaagccccaggccaggccccagcattgttcaggccctgcagccaagagtccagccagccagacaccatgaagtccagcggccctgtggaaaggttgctcagagccctggggaggagggacagcagccgggccaccagcaggccgaggaaagcagaaccacacagcttccgggagaaggttttccggaagaaaactccagtgtgtgcagtgtgtaaggtgaccatcgatgggaccggtgtctcctgccgagtctgcaaggtggccacacacagaaaatgtgaagcaaaggtgacttcatcctgtcaggccttgccccctgcggagctgcggagaagcacagccccggtccggcgcatagaacacctggggtccaccaagtctctgaaccactcaaagcaacgcagtactctacccaggagcttcagcctagatccgctcatggagcgtcgctgggacttggacctcacctatgtaacggagcggatcttggccgcagcttttcctgcacgaccggacgagcagcgacaccgaggccacttgcgcgagctagcccatgtgcttcaatccaagcacagagacaagtacctgctcttcaacctttcagagaaacggcatgacctcacccgcctgaaccccaaggtgcaagactttggttggcctgaactacatgccccacctctggacaagttgtgttccatctgcaaagccatggagacgtggctcagtgccgaccctcagcacgtggttgtgttgtactgcaaggggagcaaaggcaagcttggggtcatcgtctctgcttatatgcactacagcaagatctctgcaggggcagaccaggcgctggcaaccctcaccatgaggaaattctgtgaggacaaggtggccacggaactgcagccctcccagcgccgctatgtcagctacttcagcggactgctgtctggctccatcagaatgaacagcagcccactcttcctgcactatgtgtttgttcctgtgctgccagcctttgagcccaacacaggcttccagcccttcctcaagatctaccagtctatgcagctggtctacacatctggagtctaccgcatagcaggtccagggcctcagcaactttgtatcagcctggagccagcccttctcctcaaaggcgacgtcatggtaacctgctaccacaagggtggccaggggacagaccggaccctcgtgttccgagttcagttccacacatgcaccattcatggatcacggctcaccttcccaaaggaccaactagatgaggcctgggctgatgagcggtttcctttccaagcctcagtggagtttgttttctcctccagccctgagaaggtcaaaggcaacaccccacggaatgatccctctgtctccgtggattacaacacgacagagcctgctgtacgctgggactcctatgaaaacttcaatcagcaccatgaggatagcgtggacggcgccttggcccacacaaggggccccctggatggcagtccttatgcccaggtgcagcgggtcccccgccagacaccaccagcaccttctccagagcttcccccacccccgatgctctctgtcagcagcgactctggccactcatccacgctaaccacagaacacacagcagaatcccccggccggccgcccccaactgctgctgaaagacaggagctggatcgtctgctgggaggttgtggagtggccagtgcgggccgtggtgctgggcgagagaccgccatccttgatgatgaagagcagccctctgtgggtggaggcctgcaccttgggatgtattcaggccacaggcctggactcagtcgacgctgctcctgccgtcagggcttccgggagccttgtggggtccctaatgggagctactaccggcctgagggaaccctagagagacgacgaccaccctatgggggctatgagggacacccccagggctacgcagaagcctctgtggagaagagacgcctctgcaggtcactgtcagaagggccgtacccctatgcacccgagctggggaaaccagccaatggggactttggctaccgtccagcaggctaccgggaggtggtgatcctggaggaccctggggtgcctgctttatgctcatgccctgcctgtgaagagaagctggcactgcccaccgcagccctgtatggactgcgactagagagggaggctgcagaggggtggtccagcgaggtaggcaagcctctcctgcacccagtgaggcctggacacccattgcctctgctggtgcctgcctgtgggcatcatcatgccccaatgcctgactatggctgcctgaagccacccaaggtgggtgaggaagggcatgagggctgctcctatgccgtgtgctctgaaggcaggtatgggcattcagggtaccctgccctggtaacctatggctatggaggagcggttcccagctactgcccagcatatggccgggcacctcacagttgcggatctccaagtgaaggccgagggtaccccagccctggtgcccactcaccacgggctggatctgtgtccccggggagtccaccctacctgcagcccaggaagctgggttatgagatttctgcggaggatgggagagacaagtacccactttctggacacctggcctcaacaggacccttggcttctacagagtcacctgaaccatcctggagggatggctccagtggacacagcacgctacctcggtctccccgagatcctcagtgcagtgcttcttcagagctgtctggtccctccacacccttacacaccagcagcccagttcagggcaaggaaagcaaccgacggcaagacaccaccaggtctccctccttggcacccactcagagactgagtcctggcgaggccttgccctctgttgtacagggagttgctgaaaagactcctgagctgttgacaagcagcaggcctgagcaactggaccctagccccttctcccagacctctgcacccggctcacccaatggctggcctcaggaaaggagcccaggaggccacaccaacagtgctagtcctcggagccctgtgccaaccaccctgcctggacttcgccatgccccgtggcagggccctcggggcacttcagatagcccagatggctcccctcttactcctgtgcctacccagatgccctggcttgtgggcagcccagaaccaccccagagctcacccacccctgccttccccctggctacctcctatgatgccaatggtcccattcagcctccacttcctgaaaaacgacacctgcctgggtctgggcaacagccgtcgccaccagccagaagcaccaatcaacatgtcacctttgcatctcctctcccagatgtcacccaacccccagaacaccctttacaagagaaccaaagcaatgtcaagtttgtccaggatacatcaaagttctggtacaagccacatctttcccgagaccaagccattgccctgctgaaagacaaggatcctggggccttcctgattagagacagccattcattccaaggagcctatgggctagccctcaaggtggctacacctccacccagtgcgcagccctggaaaggggacccctcagaacagctggtccgccatttcctcatcgagactgggcccaaaggcgtgaagatcaagggttgtcccactgagccctattttggaagcctgtctgccctggtctcccagcactccatctctcccatctccctgccctgctgtctgagaattcctagcaaagatcctctagaagaaaccccagaggccccagtgcctaccaacatgagcacagcagcagacctcctgcgtcaaggagcagcctgcagtgtgctctacctgacctcggtggagacagagtcattgactggccctcaggctgtggccaaggccagctctgcagctctgagctgcagcccggtcccagtgccagccattgtccatttcaaggtctcagctcaaggcatcacactgacagacaaccagagaaagctcttctttcgccgccattacccagtgaacagcatcaccttctctagcactgacccccaggaccgcagatggaccaacccagatggagccacctccaagatctttggtttcgtggccaagaagccaggaagtccctgggaaaatgtgtgtcacctctttgcggagcttgacccggaccaaccggcaagtgccattgtcaccttcatcaccaaagttctactgggccagaggaaatgaaggaaagccacaagctccgagtgcacacccacactgcaccctcccagcatccacagcgctcactaccctggcctggcccctgtgaaagagggagtggcagcatctgggccactgctctttcctgcccttgcctgctaagctgagtgagtgggcccctaaggtgacctggcatgtgagcagatggcagagacaggtgtgaggggggtgaggaggtgtcagtagtggagccctggaggggaatgaccctgccagctccacccagctccagggcccatcatggagggatgggagaagcttgaaagcttcctgccttccctccacacagagaccagagtggggtcacataaacagagggaaaaagagagtctatttttgtgtaataataaagaatttctat

SEQ ID NO: 64 - protein, 1400 aa, Mus musculus
MKSSGPVERLLRALGRRDSSRATSRPRKAEPHSFREKVFRKKTPVCAVCKVTIDGTGVSCRVCKVATHRKCEAKVTSSCQALPPAELRRSTAPVRRIEHLGSTKSLNHSKQRSTLPRSFSLDPLMERRWDLDLTYVTERILAAAFPARPDEQRHRGHLRELAHVLQSKHRDKYLLFNLSEKRHDLTRLNPKVQDFGWPELHAPPLDKLCSICKAMETWLSADPQHVVVLYCKGSKGKLGVIVSAYMHYSKISAGADQALATLTMRKFCEDKVATELQPSQRRYVSYFSGLLSGSIRMNSSPLFLHYVFVPVLPAFEPNTGFQPFLKIYQSMQLVYTSGVYRIAGPGPQQLCISLEPALLLKGDVMVTCYHKGGQGTDRTLVFRVQFHTCTIHGSRLTFPKDQLDEAWADERFPFQASVEFVFSSSPEKVKGNTPRNDPSVSVDYNTTEPAVRWDSYENFNQHHEDSVDGALAHTRGPLDGSPYAQVQRVPRQTPPAPSPELPPPPMLSVSSDSGHSSTLTTEHTAESPGRPPPTAAERQELDRLLGGCGVASAGRGAGRETAILDDEEQPSVGGGLHLGMYSGHRPGLSRRCSCRQGFREPCGVPNGSYYRPEGTLERRRPPYGGYEGHPQGYAEASVEKRRLCRSLSEGPYPYAPELGKPANGDFGYRPAGYREVVILEDPGVPALCSCPACEEKLALPTAALYGLRLEREAAEGWSSEVGKPLLHPVRPGHPLPLLVPACGHHHAPMPDYGCLKPPKVGEEGHEGCSYAVCSEGRYGHSGYPALVTYGYGGAVPSYCPAYGRAPHSCGSPSEGRGYPSPGAHSPRAGSVSPGSPPYLQPRKLGYEISAEDGRDKYPLSGHLASTGPLASTESPEPSWRDGSSGHSTLPRSPRDPQCSASSELSGPSTPLHTSSPVQGKESNRRQDTTRSPSLAPTQRLSPGEALPSVVQGVAEKTPELLTSSRPEQLDPSPFSQTSAPGSPNGWPQERSPGGHTNSASPRSPVPTTLPGLRHAPWQGPRGTSDSPDGSPLTPVPTQMPWLVGSPEPPQSSPTPAFPLATSYDANGPIQPPLPEKRHLPGSGQQPSPPARSTNQHVTFASPLPDVTQPPEHPLQENQSNVKFVQDTSKFWYKPHLSRDQAIALLKDKDPGAFLIRDSHSFQGAYGLALKVATPPPSAQPWKGDPSEQLVRHFLIETGPKGVKIKGCPTEPYFGSLSALVSQHSISPISLPCCLRIPSKDPLEETPEAPVPTNMSTAADLLRQGAACSVLYLTSVETESLTGPQAVAKASSAALSCSPVPVPAIVHFKVSAQGITLTDNQRKLFFRRHYPVNSITFSSTDPQDRRWTNPDGATSKIFGFVAKKPGSPWENVCHLFAELDPDQPASAIVTFITKVLLGQRK

SEQ ID NO: 65 - DNA, 2531 bp, Mus musculus
aagagacgcctccccgagagccctgagaggctggaggatttcattgcacagccggctcagctggaaggaggaagatgggctcctgtgcacagggattcatgctgggatgctgcctgctgctggccatcacctggggccccatcctgagccttgtgccacgagttcaggaggaacaacaggagtgggaagagacagaggagctgccatctcctctggatcctgtgacaaggcctgaagaaacacgagagaagtatagccctcgccagggtgaggacctccccacttctcggtgctaccgatgctgtgaccccagcacacctgtataccagacaattcctccaccccagatcaacatcaccatcctgaaaggcgagaaaggtgaccgaggggatcgaggcctccaggggaagtacggcaaaataggttctacaggtcccaggggccatgttggccccaaagggcagaagggatccattggagcccctgggaaccactgcaagagccagtacgcagccttctccgtgggccggaagaaggctttgcacagcaacgactacttccagcccgtggtcttcgacacggagtttgtgaacctctacaaacacttcaatatgttcactgggaagttctactgctatgtgccgggcatctacttcttcagcctcaacgtgcacacttggaaccagaaggagacgtacctgcacatcatgaagaacgaggaggaggtggtgatcctgtatgcgcaggtgagcgaccgcagcatcatgcagagtcagagcctgatgatggagctgcgggaggaggatgaggtctgggtgcgtctcttcaagggcgagcgtgagaacgccattttcagtgacgagttcgacacctacatcaccttcagtggctacctggtcaagccagcctctgagccctagtggacactcctgtggagcttttgtggactgctgacctccttgcctggcaccctgacctatccctgcattctacagacactggagtcctgccccgggctgaccccattttctctctgctccatcctggcttccttggccttggcttccaaagttttggcttttgacaagatgcccttggccactgggaatcccaaaggacggtgcgatcccagatctggctgctactctaagcagagagctgccggcagatgaaatcattgggcggggagcctgtgaggatattggggggcctccagctccttctgtgtacacagccttagacgaccctgtgctgtgttgtcccgtggccacagggtgttccagagcacagcccctgtgtgttcccattcctggacacaagtaagcaaatatcatgggtttcttaggaacgaagtcaagcagaaaagagaaagaaaggtggtgttagttttggctttccagccagctggagggagggatggggagagagagagagcgagagctatttgtattggggaaactgaggcataggaaaaacatgaatggcaacagagtagctgcagtttgtgggtttggaaaccacatctgacttaactctagatcacatatgagctttcctggggacagcaggactgacctccgagctctgttgacatgctatagccttgcccaggggctggtcaatctttctgagccacactagtaaaagggttgggggagaacagcaagtgccccctgtggttggctctgggctggtggcagcatcctgcttgccccaactcacaggatcctgacagcagctgggaacctcagggactcctgcagctttctctgtaagaaataaagctcctactatgtcccagtacctctctgctctgctccacttccccagtcactctggaccccagggtgggagggctctcttgcctgttgggacatcagttccccttcctccttcttggtgaattaaccatggaaggaccagggctcggatttgggttcccaaactgcccttcaccatccctagtgccctgcttccttcccagttcagcatcctgtctgggaacttgatactttaacctgctagagcggatgagtctgatagacctgcccagccctgacacagccctagtcagcttatggacacgtgagagggacttcctttgagacccagagctggggtagagctataaaaatctacctattcccgggtcaaccccaagtggtagaagaggacacaggctatcccgcccctagctcagactcagggaaggcctcaggcctgattctctgattgcagagagcctgtgttctttccccatctcaccccgtgttgatccccagggcctgggccactggatatctgctttgtgccaactaggccttgcttgctgcttcctggtggcccttggttaggatccctctcttttccttctggagctcaatgtacgtatatgccacctccgaaggggcttctgctggtcagactctccaagccacttccatgggtgtgcctacagcagaggctgctgcctcctgtgctctaccctgctctttccagaaaacattaaacttgccatggcgattcacagc

SEQ ID NO: 66 - protein, 281 aa, Mus musculus
MGSCAQGFMLGCCLLLAITWGPILSLVPRVQEEQQEWEETEELPSPLDPVTRPEETREKYSPRQGEDLPTSRCYRCCDPSTPVYQTIPPPQINITILKGEKGDRGDRGLQGKYGKIGSTGPRGHVGPKGQKGSIGAPGNHCKSQYAAFSVGRKKALHSNDYFQPVVFDTEFVNLYKHFNMFTGKFYCYVPGIYFFSLNVHTWNQKETYLHIMKNEEEVVILYAQVSDRSIMQSQSLMMELREEDEVWVRLFKGERENAIFSDEFDTYITFSGYLVKPASEP

SEQ ID NO: 67 - DNA, 4406 bp, Mus musculus
tgagtctggagacaattgtgtatgtatacttttcttaagatattaaaaaacaaatccaaggtcacaggttgcttattgatagaagagaaacaatacggatagaagagaaatcagaaaattgcttatgattgacaagaacagctgcagcagctacctagcttgaacatacagcacatttcatttggactctaataatggataaaaagcatatactatgttttctggttctcttgcctcttaatatggctctcatctcagcagagtcggaagaaggcgtgaaccaaacagacttgggagtcactagaaacaagatcatgacggctcaatatgaatgttaccagaagatcatgcaggaccccattcaacaagcagaaggcctttactgcaataggacctgggacggatggctatgctggaatgacgttgcagcagggacggaatcaatgcagtactgccctgactattttcaggattttgatccttcagagaaggttacaaagatctgtgaccaagatggacactggtttcggcatccggatagtaatagaacatggaccaactacaccctgtgtaataacagcacgcatgagaaagtgaagacagccctgaatctgttctacctaactataattggacatggattatctattgcatctctgatcatctctctcatcatatttttttacttcaagagcctaagttgccaacggatcacattgcataaaaacctgttcttttcatttatttgtaattcgattgtaacaatcatccacctcacggcagtggccaataaccaggccttagtggccacaaatcctgtgagctgcaaagtgtctcagtttatccatctctacctgatgggctgtaactacttctggatgctctgtgaaggcgtttacctgcacacactcatcgtggtggctgtgtttgcggagaagcagcacttgatgtggtattattttctcggctgggggtttcctctgcttcctgcctgcatccacgccattgccagaagcttgtattacaacgacaattgctggatcagctcagacactcatctcctctacattatccatggtccgatttgtgctgctttgttggtaaatctctttttcctattaaatattgtacgtgttctcatcaccaagttgaaagttacacaccaagtggaatccaatctctacatgaaagccgtaagagctactctcatcttggtaccactacttggcattgaatttgtgctttttccgtggcggcctgaaggaaaggttgcagaggaggtgtatgactatgtcatgcacattttgatgcactttcagggtcttttggtggctactattttctgcttctttaatggagaggttcaagcaattctgagaagaaattggaaccagtataaaatccaatttggaaatggcttttcccactctgatgctctccgcagtgcatcctacacagtgtcaacaatcagtgacatgcaagggtacagccatgactgccccactgaacacttaaatggaaaaagcatccaggatattgaaaatgttgccttaaaatcagaaaatatgtatgatctagtgatgtgaaaatatataaaatcacacacttgaacctatgattttatagccaaaagattggatagccagcaaatggatttctggaataccatgaagaaagccctcaaatgaaatgggaattgtatggataaatgtttaacaaccctctctctatgggggagaaaagcctcaatttatattgttggccagtaactactcctaccataactgatttcaagttaccaacctgacatcactgaatgtgtaattggaaagaaaataagcacaaacaactcccaggagctgacatgttctggaacctgcacagcactgcatgccctcagagatggaagtctgtgcacactctcacccacactgaccagaactctgctcttctcatctgaggagacctcactcggacttacagacatgaaaggaaagtttggtttttgttataaaactcctcatccttttgtcatttggtgatagtgaatggtttgtccagaaacactttaaccctctttataacttctcttgtagactagacaaagagttcattatctctgtggtctcatgttactttctttaagaaaagcaactgagcagaattcccatgggcttcttagttgctgctacatattgttgtatcctgtggtatatgcactctgaatcactagggagacatattggtagaagctacaccttgtcagctctctctctctctctctctctctctctctctctctctctcggcaagaataggaggaaatcagttttctggaatctgtaaatagaaactttggcctttccatttctactgtgtagataagtaagtgatcaaccattttacatgaagggaatcaatgaaggatttctttttatcttgggaatctgagagagagagagagagagagagagagagaaagagagagagagagagagagagagagagagaggttgtacaaatgaaactgtaagtactctgtaattttattttattgtttcaattcaaaacacaacctaggtaacttttaaagcagatagatgatgcaacattatatgcaacttagtatctgatactgtgtctgggctgatttattttatagtaaaatagaatcatgaattctatacttggtaaatattttaaggacaaacagataccagcatcagaagtttgagaactaaaaacaaaccccagaaatatcaatgataagatatgaaatatttatttaaaaatgtaaagccataattttacaagcatgatatatttggtgtgctgacatactgcttccaatatgacatattccaatttgatgacaactcattcaaattcagaaattatgaacaactactgtaagaagtgctagtctgctacatttgtgggctttaattcactaaattatagctttactgatttttactaaatgaagatacatgcttttgaaaaagacccaggttattatttttttatgaaccacagaggaattttctctatgtaataacactgtttcagtatttcagtagactactgtggatgataatacaagccacgggaagacttgaacttaccactcattgaggatgaagtgtcagatatttaagtaataattaaattaagacagaagaagattttgcttgtgagtttaagtgacattttaaatggatttagtttttccaatattgcttggtttggagtttctgaagaacaagattgacttcagttagtaaaagtcactctggggacagttacatgagtccatgttttttaaagtgtgtctgtcagtttacagtggatgagaggagtgactcagccctcactcattgtcttaagctatagaagagaataaattaaaaagttgtttgaaactgtcaaggaaaagaattcaaattatcaagcactgatgtattacatgatctgacagacatatttgtaattttcttttttttttttctttcttttttttttatatttgtaattttctgaactttcagctgcttaaaccgtacaaaccttccttttaataccttcagactttaggtattgattattcatatcttcgctgacagtgttcgtgtaattctgcattcttctaaacaaactgtcaagtattaacaataaatggtagtacagaatgccgaattaccagagaacatacttaaaaggtattgtaattttaagttttattatttttttactataccgagtgtagctgagatttttttactgccaatatctactgtggtgtcattctcagccatagcagtctaagattagtcagtattagttttgtaatagtatttttgaagctggatttctctaaagctgaagtgccaattaaaatatttctataatgcttgtagaaaaaaaatccaaaaattttgaaagaaaacttctctggtgcctaaaaattaacttggggagtttttagcttttaaaagttgcatctattatttttctctaatactttgttagagtcatggctgacacttttagaagcgactttgtatttttttgttgataaaccagccttcctggaggttagtgttttttcaaatataacaaactgtgtagggtttaggagtagtcagtgttatacttactgtttagatattttaatgtgaatctattttaatttcctttgtgttttaatttgctcatagaaacattatatgtaaaacatactcaagttcacttaaaagaactcatattttatcgacataaaatctctacttaggttttatgagaatattaaagttgtaagttatcactcactttcacgcatcctccctggactatagagcaattgaattcctcacaaaattcttgcagcaaataaagaaatactttgc

SEQ ID NO: 68 - protein, 463 aa, Mus musculus
MDKKHILCFLVLLPLNMALISAESEEGVNQTDLGVTRNKIMTAQYECYQKIMQDPIQQAEGLYCNRTWDGWLCWNDVAAGTESMQYCPDYFQDFDPSEKVTKICDQDGHWFRHPDSNRTWTNYTLCNNSTHEKVKTALNLFYLTIIGHGLSIASLIISLIIFFYFKSLSCQRITLHKNLFFSFICNSIVTIIHLTAVANNQALVATNPVSCKVSQFIHLYLMGCNYFWMLCEGVYLHTLIVVAVFAEKQHLMWYYFLGWGFPLLPACIHAIARSLYYNDNCWISSDTHLLYIIHGPICAALLVNLFFLLNIVRVLITKLKVTHQVESNLYMKAVRATLILVPLLGIEFVLFPWRPEGKVAEEVYDYVMHILMHFQGLLVATIFCFFNGEVQAILRRNWNQYKIQFGNGFSHSDALRSASYTVSTISDMQGYSHDCPTEHLNGKSIQDIENVALKSENMYDLVM

SEQ ID NO: 69 - DNA, 2784 bp, Mus musculus
cagaacaagccctctcttcgcagcgtgcacttctgccttaggaccggcgggctctgttgcctggacctcacgctgcctgcaggaccacattgcaaagctttccacacctcgcctccgggaaactcttgtgcagtatctcagaaaatcaaactccctcctgagactattcccacagaatttccttaggagctgtgccagggccctatgatgatacagcaacatcttgtgctaccaactgtcaaaactttggatggtctaacactcaggtcatgacccttgtaattaagaaattcttgaagacaatattcaggagaaaatgtgatttgagtctggagacaattgtgtatgtatacttttcttaagatattaaaaaacaaatccaaggtcacaggttgcttattgatagaagagaaacaatacggatagaagagaaatcagaaaattgcttatgattgacaagaacagctgcagcagctacctagcttgaacatacagcacatttcatttggactctaataatggataaaaagcatatactatgttttctggttctcttgcctcttaatatggctctcatctcagcagagtcggaagaaggcgtgaaccaaacagacttgggagtcactagaaacaagatcatgacggctcaatatgaatgttaccagaagatcatgcaggaccccattcaacaagcagaaggcctttactgcaataggacctgggacggatggctatgctggaatgacgttgcagcagggacggaatcaatgcagtactgccctgactattttcaggattttgatccttcagagaaggttacaaagatctgtgaccaagatggacactggtttcggcatccggatagtaatagaacatggaccaactacaccctgtgtaataacagcacgcatgagaaagtgaagacagccctgaatctgttctacctaactataattggacatggattatctattgcatctctgatcatctctctcatcatatttttttacttcaagagcctaagttgccaacggatcacattgcataaaaacctgttcttttcatttatttgtaattcgattgtaacaatcatccacctcacggcagtggccaataaccaggccttagtggccacaaatcctgtgagctgcaaagtgtctcagtttatccatctctacctgatgggctgtaactacttctggatgctctgtgaaggcgtttacctgcacacactcatcgtggtggctgtgtttgcggagaagcagcacttgatgtggtattattttctcggctgggggtttcctctgcttcctgcctgcatccacgccattgccagaagcttgtattacaacgacaattgctggatcagctcagacactcatctcctctacattatccatggtccgatttgtgctgctttgttggtaaatctctttttcctattaaatattgtacgtgttctcatcaccaagttgaaagttacacaccaagtggaatccaatctctacatgaaagccgtaagagctactctcatcttggtaccactacttggcattgaatttgtgctttttccgtggcggcctgaaggaaaggttgcagaggaggtgtatgactatgtcatgcacattttgatgcactttcagggtcttttggtggctactattttctgcttctttaatggagaggttcaagcaattctgagaagaaattggaaccagtataaaatccaatttggaaatggcttttcccactctgatgctctccgcagtgcatcctacacagtgtcaacaatcagtgacatgcaagggtacagccatgactgccccactgaacacttaaatggaaaaagcatccaggatattgaaaatgttgccttaaaatcagaaaatatgtatgatctagtgatgtgaaaatatataaaatcacacacttgaacctatgattttatagccaaaagattggatagccagcaaatggatttctggaataccatgaagaaagccctcaaatgaaatgggaattgtatggataaatgtttaacaaccctctctctatgggggagaaaagcctcaatttatattgttggccagtaactactcctaccataactgatttcaagttaccaacctgacatcactgaatgtgtaattggaaagaaaataagcacaaacaactcccaggagctgacatgttctggaacctgcacagcactgcatgccctcagagatggaagtctgtgcacactctcacccacactgaccagaactctgctcttctcatctgaggagacctcactcggacttacagacatgaaaggaaagtttggtttttgttataaaactcctcatccttttgtcatttggtgatagtgaatggtttgtccagaaacactttaaccctctttataacttctcttgtagactagacaaagagttcattatctctgtggtctcatgttactttctttaagaaaagcaactgagcagaattcccatgggcttcttagttgctgctacatattgttgtatcctgtggtatatgcactctgaatcactagggagacatattggtagaagctacaccttgtcagctctctctctctctctctctctctctctctctctctctctcggcaagaataggaggaaatcagttttctggaatctgtaaatagaaactttggcctttccatttctactgtgtagataagtaagtgatcaaccattttacatgaagggaatcaatgaaggatttctttttatcttgggaatctgagagagagag

SEQ ID NO: 70 - protein, 463 aa, Mus musculus; identical to SEQ ID NO: 68

SEQ ID NO: 71 - DNA, 2538 bp, Mus musculus
ggaagtggtaaccggtacggaaggccagatctcctctcactcacttatctgcaccagacctcctctcattcactcatctgcgaaagtgtgagagcaagaaaccccaggctggagctgcagctcttgggacctacgtgggggtccctgctgggtctccagatctggatacagaatagccaggacaaggctccacaagaccctggggcccagcggctgacaaatgacacccagtcttctgggacagctccagtagaagaagccaaagcccatccatggagggatgccgggagacagaagtgaccaacggctccaacggtggcttggagttcaaccccatgaaggagtacatgatcctgagcagtggccagcagatcgccgtggcggtgctgtgcaccctgatggggctgctgagcgccctggagaacatggccgtgctctatattatcctgtcctcccggcggctccgcagaaagccctcgtacctgttcatcagcagcttggctggagctgacttcctggccagcgtgatcttcgcctgcaactttgtcatcttccacgtcttccacggggtcgactccaacgctatcttcctgctgaagatcggcagtgtgaccatgaccttcacagcctctgtgggcagcctgctgctaaccgctgttgaccgctacctatgtctgtgttacccgcctacctacaaagctctagtcacccgtgggagggcactggtggccctctgtgtcatgtgggtcctctcagcattgatttcttacctgccgctcatggggtggacttgttgccctagtccctgctctgagcttttcccactgatccctaacgactacctactgggctggcttctattcattgccatcctcttttccggcatcatctatacctatgggtatgtcctctggaaagcccaccggcatgtagccaccttggctgagcaccaggacaggcaggtgcctgggatagctcggatgcggctagacgtgaggttggccaagactctgggcctggtgctggctgtgctgctcatatgctggttccctgcactggctctcatgggccacagcctggtcaccacgctgagtgaccaggtcaaggaggccttcgccttctgttccatgctgtgccttgttaactctatggtcaatcctatcatttacgccctgcggagtggagagattcgctctgctgcccagcactgcctgataggctggaagaagtatctacagggcctcggacctgaggggaaagaagaaggcccaaggtcctcggttacagaaacagaggctgatgtgaaaaccacctaggagccaggatccagaactccaggctgctccaactgctgacaccacctgtctttctactggaaacagcccgagtcagaagtccgttcagttcactccctcgaagagagaggggttccagacccggattctttctgaagccagttctagggtaatggaaacagatccccctttttgctaaggaatgctggttggctggaaggtggcctggtcatgcctaccttttccagtctgtggagaggggcctgtaagaatggcaggctctgttcatatcaaatcaggaaagccttctgactccaaagacctagaggccagaggggcctccagagatgatactaaaggattcaggagatctgtgaagacaagggacctgttctcctggaatctagagtaccccagccgtggggccactgccctcaacttcatagatgtccatgtcttccatagtgtggattctagactgtcctgctgaagatagagagaccagctgcttctggttcctgcttcatcctctgtggctgtagagctatgtgaggctctaccttcaggtcacccttgcctcttgggggtcaagaattatgatgccctaaggaccaaggatgttcgcttacatccttcagacagcgtcaggagctgtcagctcagggtatcctgttgttgggaaagggccctcccgacatcctgataagccttgaaagccattatgaccttaggtccttaggggcgcagaggaagctgggttcactggaggtacaaagtcttcagagaactctattccttgtgacattttgctgtgtctcacacagcactatcccagtcttgcctagcttcagtacaaagcaagatattcacacagattctttgggtcctaggctgttcccagtgatgcttgactcagccccactggcctcttccacactctggtcctgaaggataagcagaaggagttgggagggaagacttcctgctgcaaaccaggcatcctaggtccacagccccacgctgtgtctctgggtgcctgcctttgcccttcagtaaaggttgcagtcccaacagatggaggttcaaggcgctgctggtggtaggaggggtaggtggcactggggaccacagacacagtgaaaggaaaactcttaaacatttaatacttttgcttttagaagatccggcccgcagacaggacttccccattgcccaaaggaactaacagggtggtgtccagtgc

SEQ ID NO: 72 - protein, 347 aa, Mus musculus
MEGCRETEVTNGSNGGLEFNPMKEYMILSSGQQIAVAVLCTLMGLLSALENMAVLYIILSSRRLRRKPSYLFISSLAGADFLASVIFACNFVIFHVFHGVDSNAIFLLKIGSVTMTFTASVGSLLLTAVDRYLCLCYPPTYKALVTRGRALVALCVMWVLSALISYLPLMGWTCCPSPCSELFPLIPNDYLLGWLLFIAILFSGIIYTYGYVLWKAHRHVATLAEHQDRQVPGIARMRLDVRLAKTLGLVLAVLLICWFPALALMGHSLVTTLSDQVKEAFAFCSMLCLVNSMVNPIIYALRSGEIRSAAQHCLIGWKKYLQGLGPEGKEEGPRSSVTETEADVKTT

SEQ ID NO: 73 - DNA, 3723 bp, Mus musculus
ggccaagctgtgcctgaatgagcagaggcacaggcaccagccgtggccacccagcaaacatctctgctgactcagactgggcccagtcttctgggacagctccagtagaagaagccaaagcccatccatggagggatgccgggagacagaagtgaccaacggctccaacggtggcttggagttcaaccccatgaaggagtacatgatcctgagcagtggccagcagatcgccgtggcggtgctgtgcaccctgatggggctgctgagcgccctggagaacatggccgtgctctatattatcctgtcctcccggcggctccgcagaaagccctcgtacctgttcatcagcagcttggctggagctgacttcctggccagcgtgatcttcgcctgcaactttgtcatcttccacgtcttccacggggtcgactccaacgctatcttcctgctgaagatcggcagtgtgaccatgaccttcacagcctctgtgggcagcctgctgctaaccgctgttgaccgctacctatgtctgtgttacccgcctacctacaaagctctagtcacccgtgggagggcactggtggccctctgtgtcatgtgggtcctctcagcattgatttcttacctgccgctcatggggtggacttgttgccctagtccctgctctgagcttttcccactgatccctaacgactacctactgggctggcttctattcattgccatcctcttttccggcatcatctatacctatgggtatgtcctctggaaagcccaccggcatgtagccaccttggctgagcaccaggacaggcaggtgcctgggatagctcggatgcggctagacgtgaggttggccaagactctgggcctggtgctggctgtgctgctcatatgctggttccctgcactggctctcatgggccacagcctggtcaccacgctgagtgaccaggtcaaggaggccttcgccttctgttccatgctgtgccttgttaactctatggtcaatcctatcatttacgccctgcggagtggagagattcgctctgctgcccagcactgcctgataggctggaagaagtatctacagggcctcggacctgaggggaaagaagaaggcccaaggtcctcggttacagaaacagaggctgatgtgaaaaccacctaggagccaggatccagaactccaggctgctccaactgctgacaccacctgtctttctactggaaacagcccgagtcagaagtccgttcagttcactccctcgaagagagaggggttccagacccggattctttctgaagccagttctagggtaatggaaacagatccccctttttgctaaggaatgctggttggctggaaggtggcctggtcatgcctaccttttccagtctgtggagaggggcctgtaagaatggcaggctctgttcatatcaaatcaggaaagccttctgactccaaagacctagaggccagaggggcctccagagatgatactaaaggattcaggagatctgtgaagacaagggacctgttctcctggaatctagagtaccccagccgtggggccactgccctcaacttcatagatgtccatgtcttccatagtgtggattctagactgtcctgctgaagatagagagaccagctgcttctggttcctgcttcatcctctgtggctgtagagctatgtgaggctctaccttcaggtcacccttgcctcttgggggtcaagaattatgatgccctaaggaccaaggatgttcgcttacatccttcagacagcgtcaggagctgtcagctcagggtatcctgttgttgggaaagggccctcccgacatcctgataagccttgaaagccattatgaccttaggtccttaggggcgcagaggaagctgggttcactggaggtacaaagtcttcagagaactctattccttgtgacattttgctgtgtctcacacagcactatcccagtcttgcctagcttcagtacaaagcaagatattcacacagattctttgggtcctaggctgttcccagtgatgcttgactcagccccactggcctcttccacactctggtcctgaaggataagcagaaggagttgggagggaagacttcctgctgcaaaccaggcatcctaggtccacagccccacgctgtgtctctgggtgcctgcctttgcccttcagtaaaggttgcagtcccaacagatggaggttcaaggcgctgctggtggtaggaggggtaggtggcactggggaccacagacacagtgaaaggaaaactcttaaacatttaatacttttgcttttagaagatccggcccgcagacaggacttccccattgcccaaaggaactaacagggtggtgtccagtgcaaagaaaaatcagcctccctaataaagcaaggaggtccactcggctctacagcctctcctaagcttctgcaaggtgacagtttgttttctctgtgaaggtcaacggcgtctcattttattcttcccaagacaagttctgtgcatcaaaagctgctgcaaattctaatcgctgtttgggaggatcaggggaagaagtcgattcgcccacgcttagtgatttagactgtatttcaacatcaacttgggggaggaagagacagaaaagacacggtgtttccttattactcctcaaaggaggaagtgcttggttctgtcaacataagccgatctctccaaggtgcctgacagaggaggagggaatacagtttccacagctgtgaattcctgcaccagctttggtccacacttatgtggtcttgatcaacccccgccctttaccttgctttggtttccttctcggtaaattgggaatggtggggaaaacaatgctctccagggccattaaaacctctcattgctctaacatgctgtggttatctctgcaaccatggagacctttgtgccatatggaccatgtgacttctggctcccatacttcctgaagttatgggcacacaccatataccattgggcgtgtgctgactgtagaggaattgggtgactggccatatgagttttagagattttcccagggcaagagggttctcttggctctcaatttttctggtccctcatgcctcagtggtcccctgtgtgtgggtcaggcatgcttgtttagcggtgccagactgaagctccggccttccggtgtaccaagcaagtgttgtactcctgagtcaggttttcttcagttagatgctaactaagctctctgagagaccctcaaagtttttgaggtgtagctcagtcagtagagtgctgcatctgcaagagcaaatctctgggttcaaaggtcagtactacctaaaaccaggaatggcagtgccatcccctacctgtaatcccagcactcctgaggtacaagcaggaagatcaggaatgcaaagttactgtagctgtaagttcgaagccagcctgagctagttgagacccccttacctcaaaataaatttaagttacaattctaaattaaattaaaatgtctagggctggagagatggcttagtggttaagagcacagactgcttttccagaggtcctgagttcaattcccagcaaccacatggtggctcacaaccatctgtaatggaatctgatgccctcttctggtatgtttgaagagagcgatggtgtactcatatacataaaataagtaaataaatcttttttt

SEQ ID NO: 74 - protein, 347 aa, Mus musculus; identical to SEQ ID NO: 72

SEQ ID NO: 75 - DNA, 2159 bp, Mus musculus
gaaggcctgaggtgactcacttccatcacaggaccagttgaattccagaagacccggtgccttggagcaacagccccatgacggtgcccagccatgcaatgttcttggaaggctgtcctcctcctcgccctggcctccattgccatccagtacacagccatccgcactttcaccgccaagtctttccacacttgccctgggctgacagatactggcttggcagagcggctgtgtgaggagggccctaccttctcctacaacctctccaggaagacccacgtcctgatcctggccaccacacgcagtggctcttcctttgtgggccagctcttcaaccagcacatggatgtcttctacctgttcgagccgctctatcacgtccaaaacacgctcatcccccggttcacccagggcaagagccccgcagatcgcagggtcatgctaggtgccagccgggacctgctgaggagcctttatgattgtgatctctactttctggagaactacatcaagccacctccagtcaaccacaccaccaacagggtcttccgcagaggggccagcagggtcctttgctcccgtccagtgtgtgaccctccagggtcctctgacctgatcctggaggagggggactgtgtgcgcatgtgtggcttgctgaacctgaccttggcagccgaggcttgtcgtgagcgcagtcatgtggccatcaagactgtgcgggtgcccgaggtgaatgacttgcgggctctagtggaagaccccaggctgaacctcaaggtcatccagctggtgcgagaccctcgtggcatcttggcttctcgcagtgagaccttccgggacacctaccggctctggcggctttggtacggcacagggaggaagccctacaacctggatgtgacacagctgaccactgtgtgtgaggatttctctagctctgtgtctactggcctcatgcggccctcctggctcaagggcaagtacatgctggtacgttatgaggacctggccagaaatccaatgaagaagacagaagagatctacgaattcctgggtatccccctggacagtcacgtggcacactggatccagaacaatacgaggggcgaccccactttgggcaagcacaaatacagcacagtgcgcaactctgcagccacagctgagaagtggcgcttccgcctctcctatgacatcgtggcctttgcccagaatgcctgccagcaggtgttggctcagctgggctacaagatggccaactcagaggaggaactgaagaatccggccatcagcctagtggaggagcgtgacttccgcccttttttgtgacctgggtgtggtgggggtgggaggcaggtggctctggttttgctgacgcggacctactatgggccgtctttaactgttgccttatctccctcctccctctcccaccctgtctgtgtatccattccagcccctgcccactctcccctttccttcgcctctcccacaccatctgtgtgtccttcttgaccttgcccacttccttttctcctgcctctttttgcccctgaaatttgcactatgtctctggaggggaacactgggcagagggcgtatgatgtggggttactccccccaccccatttagacacaaggatgttgggtctctgtgaggatggggacgatgtttacaggcacccaatcgcacattcattcacacgtgcacacaggcacacgatgagaggcaccccagcacacaactggtagttttgcaattgtcttctcaaggtaagaggatggacacaaaggggccgtacctccccagtttaaggaaagggtccatccccgcccccttcctgctccctcccctggagtagggcacccgtccctcctgcacacccttgcctggtggtgagcagggttttactgtgaggtgaattgggactactttctatttggtttgtggtgagcttgtctgtctgagtcttgtggctacccctagaccagtaatggctaatgaatcttagaagtttctgattgatcttggggtccctctgtgctatttctttgtgccaaaaaaaaaaaaaaaagacaaaaaaaatgtggatcagtttgcagagtgaaaattgaaatgctttatttgtgttttctgtaaataaaaatgtgcagtactg

SEQ ID NO: 76 - protein, 411 aa, Mus musculus
MQCSWKAVLLLALASIAIQYTAIRTFTAKSFHTCPGLTDTGLAERLCEEGPTFSYNLSRKTHVLILATTRSGSSFVGQLFNQHMDVFYLFEPLYHVQNTLIPRFTQGKSPADRRVMLGASRDLLRSLYDCDLYFLENYIKPPPVNHTTNRVFRRGASRVLCSRPVCDPPGSSDLILEEGDCVRMCGLLNLTLAAEACRERSHVAIKTVRVPEVNDLRALVEDPRLNLKVIQLVRDPRGILASRSETFRDTYRLWRLWYGTGRKPYNLDVTQLTTVCEDFSSSVSTGLMRPSWLKGKYMLVRYEDLARNPMKKTEEIYEFLGIPLDSHVAHWIQNNTRGDPTLGKHKYSTVRNSAATAEKWRFRLSYDIVAFAQNACQQVLAQLGYKMANSEEELKNPAISLVEERDFRPFL

SEQ ID NO: 77 - DNA, 3398 bp, Mus musculus
gaggaaaagaggaggaggcggaggagaactgagcggagcatcgagccagaggggagatgagtttgtctgtcctcggctaaggctccggcccggcctgaggaactgggagctcgggttggagcgacacccgtggaagtgggaggtggcggctctgggactttaaccccttgtgggctctgcggcaggggatttaaccctttgtggattcggcccctccgaggcagcgtcatcgggtagttttaaccctttcgggttgggtttaacccattggacttaaacctcctctccttgcgcaccaactcctcgtctgtgggagcactcggcggggaggcgtgaagcccacccctctgcatatttgcatacggtgcctgctgctgaacccccggacctgctagttggccacgcttgtgtgcgcttaaccctttattgactggactccaagttgcgattggagtttgctgacaggacggacggaaggcgtcactgcagaaattactgaccgaagaggactttgttggacatattttgaaaagaaagaaaaacctctttccttaagccagaatttctcaaacttccagaagagaactctactaagccatggccgagccactcttgacagaacatcaacaccagcctcaaactagcaactgtacaggtgctgctgttgtccatgaagagcatacctctgagcgccccccaagcgcggaggaacgggtgcccaaggaggacagtaggtggcaatcgagagcgtccttgcagtccggtagccgtccagggcaggagggagaagggggcctgaagcaccagctgcccccattgcagacgaatgcctgtccagaattgagctccctggagaagggcgagaagggccagaatggggaggacttatccactggcggtgcctccccgtcggcggagggagagccgatgtcagagtccctcgtgcagccaggtcatgactcggaggccaccaagcaggaggctcctgccgccggaggcgaggagccatggggacagcaacagagacagctgggcaagaaaaaacatcggagacgcccctcaaagaagaagcggcattggaagccctactacaagctgacttgggaggagaagaaaaagttcgacgagaagcagagcctgcgagcttcgcgggttcgagccgagatgttcgccaagggccagccagttgcgccctataacaccacgcagttcctcatggatgaccacgatcaggaggagcctgatctcaaaaccggcctttaccccaagcgggcagccgccaaatccgacgacaccagcgatgaggattttgtggaagaagctggtgaggaagacggaggcagcgatggcatgggaggggacggcagcgagtttctgcagcgggacttctcggagacgtacgagcggtaccacgccgagagcctgcagaacatgagcaagcaggagctcatcaaagagtacctggagctggagaagtgcctctcccgcaaggaggacgaaaataaccggctgcggctggaaagcaagcggctgggaggcgtcgacgcgcgagtgcgggagctcgagctagagctggaccggctgcgcgctgagaacctccagctgctgaccgagaacgaactgcaccggcagcaggagcgagcgcctctttccaagttcggcgactagactgaaaacttttggggggagggggcaaaggggactttttacagtgctggaatgtaacattatatacatgtgtatataagacagcggacctttttatgacacataatcagaagagaaaatcgccccggctttggtttggtaaatttagctatgatgttgcttgtgtgctttctcctgttctttaattatgtgaaactgaagggttgcttttcatgttttcctccttagatgttgtttcttaatgtgcaagtaatctgaccaagttataatgcatttttctgttttaaaaaaaaaatcccctccttaagcggagctataaggtggccaaatctgagacccattacattcattctagttataataaatttaatgtttgtaaatgtaacagtttcagtgtgatttctagagattaaaaatcgtgctggtttgtgtgactgcacttttgaggtggggtaccaagattgttaaatttatctatttgcaaaaatacttgaatagaagaaattcagtttgttccctccacccccaccaatgggtttttaaattttcaaaatacagttcaggtaaaatgtactcaatgttgtgcctgcttcctaatgctggggagtagaaagtggctacaggcagcagcttagcttgcgcaccttgatggctgttcaaaagagtgctaacaaaagtataagcctgatttggcaattgttagataacgaaaagcctcatttcatctccacaagtcaatttttcagtaatcctggcttccgtcctaaccaccccacaaaattccaatggagttcctgtttgcctaccttggtaagtaaggctcctggtaaacttgctttcttagtacatccaagagatagccaagataaacttgtgagaaaacatgttagcgatatgttggacttcaaatggctaagtgatctaaggacttagcatcaatgtctgacacttaagtactttttctattgaaaataagaaagaaaagctgccctttccattagaatccaactgaaatttgaaatgcccctttctacaagtaaagctggctcaggagcgggctgaggtctttagatgatgaatacaaaccctgcatgtttccagtactgcagctattctcaatctcctgggctgcctggacagctgcctaggttaggctgctcttgaaaatgcagggaggctctgagaactaggccttatcacagaatcaaaatggtaaactcaacagttctctcatgtcagtatagttaatgcaaccctgtcacctgacctgtgtcagtgtttccttagggcaattatattgctaaaattattagcacaactggctccgtaacttggagtcttaaaaaccatagggggccttgggggtccacaagccccacataattgtgtgaatatatatatatataatatatatatatatatattgaatatattatatatattcaagtgggttcaagaactcaggaggttgtcaaattccttggtggttaaaaaccccttagggcaggggcttctcagccttcctgccagctaaatggtaacagtggagttgactggaacatcaagaacgaatgcagctacaaatcaataatcaagaaaagctgtgccaggaggacggcttgggaccttcaaaaccaagcttgctggttctattctggcaggtggtctcctgcagaaactgtaaaatcaacttttctttgatctaaagattgcattaaatgtctattttg

SEQ ID NO: 78 - protein, 356 aa, Mus musculus
MAEPLLTEHQHQPQTSNCTGAAVVHEEHTSERPPSAEERVPKEDSRWQSRASLQSGSRPGQEGEGGLKHQLPPLQTNACPELSSLEKGEKGQNGEDLSTGGASPSAEGEPMSESLVQPGHDSEATKQEAPAAGGEEPWGQQQRQLGKKKHRRRPSKKKRHWKPYYKLTWEEKKKFDEKQSLRASRVRAEMFAKGQPVAPYNTTQFLMDDHDQEEPDLKTGLYPKRAAAKSDDTSDEDFVEEAGEEDGGSDGMGGDGSEFLQRDFSETYERYHAESLQNMSKQELIKEYLELEKCLSRKEDENNRLRLESKRLGGVDARVRELELELDRLRAENLQLLTENELHRQQERAPLSKFGD

SEQ ID NO: 79 - DNA, 3481 bp, Mus musculus
agtgcctaggaggaggcatcgtgcagaaagactatggcagaggctgaagcggcacagctgaaggaggaggggaaccggcattttcagctccaggattacaaggcggccaccaagagctacagccaggccctgaagctgaccaaggacaaggctctgctagctacactctaccggaatcgggcagcctgcggcctgaaaatggagagctacgcccaggcagcctcggatgcttccagagccattgacatcaactctgctgacatcaaagcattgtatcggcgatgccaggcactggagcatcttggcaagttggaccaggcattcaaggatgtgcagcgctgtgctaccctggagccaaggaaccagaacttccaggagacactgcggaggctcaacaccagcatccaagagcagctccgtgtgcagttttctacagactccagggtacagacgatgtttgaaattcttctgaacgaaaacagcgaggctgataagcgagagaaggctgccaacaacctcattgtcctgggccgtgaagaagcgggtgctgagaggatcttccagagcaatggagtggctctgctgctgcagcttatgaacacccagcggcctgagctgctgctagcggctgtgcggacgctgtctggcatgtgcagtggccacagagctagggccaccgccatcctgcacgcagtccgcatagacagaatctgcagcctcatggccctggagaatgaagagatgtccctggctgtctgcaacctgctccaggccatcattgactccctgtctggagaggacaagagagagcatcgtgggaaggaggaggccttggttctagataccaagaaggacctgaagcagatcaccagccacctgctggacatgctggtcagtaagaaagtgtctgggcagggcagagaccaggcactgaacctgcttaataagaatgtccccaggaaggacctgtccattcatgacaactcacgcaccatctatgttgtagataacggtctgaggaagatcctgaaggtggtggggcaggttccagacctgccctcctgcctacccctgacggacaacacccgcatgctggcctccatcctcatcaacaagctctatgatgacctgcgctgtgacccagagcgcgaccacttccgcaagatctgtgaggagtatatcacgagcaaatttgacccccaggacatggacaagaatgtaaatgccatccagacggtgtccggcatcttgcaggggccctttgacctgggcaatcagctgctgggcatgaaaggtgtgatggagatgatggtggctctgtgtggctcggagcgcgaggcagaccagctggtggctgtggaggctctcatccacgcctccacgaagctcagccgggccaccttcatcatcaccaacggagtgacacttcttaagcagatctacaagaccacaaagaatgagaagatcaagatccgcacgctggtggggctctgtaaacttggctcagctggaggctccgactatggtctcagacagtttgctgaagggtcaacagagaagctagccaagcagtgtcgaaagtggctgtgtaacaccgccatagacacccggacgcggcgctgggcagtggagggcctggcctacctcacgctggacgctgacgtgaaggacgactttgtccaggacatccctgctctgcaggccatgtttgagttggccaaggcaagaaccagtgacaagaccatcctctactcagtggccaacaccctggtaaactgcaccaacagctatgatgtcaaggaggtcgtccctgagctggtgcagctggccaagttctccaagcaacatgtgccagaggagcaccccaaggacaagaaggacttcgttgacttgcgggtgaaacgtcttctgaaggcaggtgtcatatctgcactggcctgcatggtgaaggcagacagtgccatcctcacagaccagaccaaggagctgctggccagggtattcctggcactctgtgacaatccaaaggaccggggcaccattgtagctcaaggtggtggcaaggccctgatccccctggctttggagggcacagatgtgggcaaggtgaaggcagcccatgggctagccaagattgctgctgtctccaacccggacattgccttccctggggagagggtatatgaggtggtgcggcccctcgtgagtctcctggacacacagagggatgggcttcagaactatgaggctctgctgggactgactaacctgtctgggcgcagtgacaaactcaggcagaagatcttcaaggagaaggccttgccagacattgaaaactacatgtttgagaaccatgaccagctacggcaggcagccaccgaatgcatgtgtaacatggtgctcaataaggaggttcaggagaggttcctggccgatgggaatgatcgtctgaagctggtggtgctgctctgtggggaggatgaccacaaactgcagaacgcagcagctggagctctagccatgctgaccgcggcacataagaaactgtgcctcaagatgacggaggtgacaacccagtggctggagatcctacagcggctttgcctgcatgaccagttgtccgtgcagcaccggggcctggtcattgcccacaacctgctatcagcggatgctgagctggcgaggaagctggtggagagcgagctgctggagatcctgactgtggtgggaaagcaggagccagatgagaagagagcggctgtggtccagacagcccgggagtgtcttatcaagtgcatggattatggcttcatcaagccggtgtcatagagagtggtgcacagggatgctggggttggtcctgaactgtgaagagtcgtgagctgggtcctcccaaagtgtcagttctgctaaggatcacagcagtgccaatgatgtctcattacaaagcaaagacttggttgtctcctgatttgtgactcttccttttggtcctaggaaagtttgagtgttcctgcctccctcaatttgtcacatcccagaaatgtgtaggataagttctctctgtgatcagaaagcaggtcagacaattctgcaggccagataacgggctgtagactgatttttgtttgtttgtttgttttgtattaaaaaaaaactgtgtagtggcaaggaaggaattaacaggtgtgtgaccataaagatcaatgctgttgtttaattaagatgcggatgtctattgattttcataacctctcctacacttcaaaactatgtgtctcaactgcatgtgccctgtccaagccccatgcccacccctgccacccgatttcaatggtaacacagtttatgctcacagtgggacgtggcccatttcagaaagtctttcatgtgagatggatatggccactaccaataagatcaactctaagtcccctgagcagaacataaataaagattaatgaatatgtgttagtcaccc

SEQ ID NO: 80 - protein, 931 aa, Mus musculus
MAEAEAAQLKEEGNRHFQLQDYKAATKSYSQALKLTKDKALLATLYRNRAACGLKMESYAQAASDASRAIDINSADIKALYRRCQALEHLGKLDQAFKDVQRCATLEPRNQNFQETLRRLNTSIQEQLRVQFSTDSRVQTMFEILLNENSEADKREKAANNLIVLGREEAGAERIFQSNGVALLLQLMNTQRPELLLAAVRTLSGMCSGHRARATAILHAVRIDRICSLMALENEEMSLAVCNLLQAIIDSLSGEDKREHRGKEEALVLDTKKDLKQITSHLLDMLVSKKVSGQGRDQALNLLNKNVPRKDLSIHDNSRTIYVVDNGLRKILKVVGQVPDLPSCLPLTDNTRMLASILINKLYDDLRCDPERDHFRKICEEYITSKFDPQDMDKNVNAIQTVSGILQGPFDLGNQLLGMKGVMEMMVALCGSEREADQLVAVEALIHASTKLSRATFIITNGVTLLKQIYKTTKNEKIKIRTLVGLCKLGSAGGSDYGLRQFAEGSTEKLAKQCRKWLCNTAIDTRTRRWAVEGLAYLTLDADVKDDFVQDIPALQAMFELAKARTSDKTILYSVANTLVNCTNSYDVKEVVPELVQLAKFSKQHVPEEHPKDKKDFVDLRVKRLLKAGVISALACMVKADSAILTDQTKELLARVFLALCDNPKDRGTIVAQGGGKALIPLALEGTDVGKVKAAHGLAKIAAVSNPDIAFPGERVYEVVRPLVSLLDTQRDGLQNYEALLGLTNLSGRSDKLRQKIFKEKALPDIENYMFENHDQLRQAATECMCNMVLNKEVQERFLADGNDRLKLVVLLCGEDDHKLQNAAAGALAMLTAAHKKLCLKMTEVTTQWLEILQRLCLHDQLSVQHRGLVIAHNLLSADAELARKLVESELLEILTVVGKQEPDEKRAAVVQTARECLIKCMDYGFIKPVS

SEQ ID NO: 81 - DNA, 4148 bp, Mus musculus
gtccctgcggctggcggccgagccgtgtgtctcctcctccgccgccgccatattgtctgtgtgaagctaggggagcgcggctattgccgctgccgcttccaccgcagtgtgaagaaaaagggtctgaaacaaagtcttaccaacgtctgcttttgaacacagtgactgctggatctttaaacatcaagttcagctttgtctgtcaacctgtctgacatgtcgggacccgtgccaagcagggccagagtttacacagatgttaacacacacagaccccgagagtactgggattatgaatcacatgtggtggaatgggggaatcaagatgactatcagcttgttcgaaaattaggtaggggcaaatacagtgaagtgtttgaagccatcaacatcacaaataatgaaaaagttgttgttaaaattctcaagccagtaaaaaagaagaaaattaagcgtgaaataaagattttggagaatttgagaggtgggcccaacatcatcacacttgcagacattgtaaaagaccctgtgtcacgaacccctgccttggtttttgaacatgtaaacaacacagacttcaagcaattgtaccagacgttaacagactatgacattcgattttacatgtatgaaattctgaaagccctggattattgtcacagcatggggattatgcacagagatgtgaaaccccataatgtcatgattgatcatgagcacagaaagcttcggctaatagactggggtttagctgagttttaccatccaggccaagagtataatgtccgagttgcttctcgatatttcaaaggtccagagctacttgtagattatcagatgtacgattatagtttggatatgtggagcttgggttgtatgctggccagtatgatcttccggaaggagccatttttccatggacatgacaattatgatcagttggtgaggatagccaaggttctgggaacagaagatttatatgactatattgacaagtacaacattgaattagatccacgtttcaacgatatcttgggcagacactcccgtaagcgatgggaacgctttgtccacagtgaaaaccagcatcttgtcagccctgaggccttggattttctggacaagctgcttcgatatgaccaccagtcacggctcactgcaagagaggccatggagcacccttacttctacactgttgtgaaggaccaggctcgaatgagttccactagcatggcagggggcagcacacctgtcagcagcgccaatatgatgtcagggatttcttcagtgccaactccttcaccccttggacctctggcaggctcaccagtgattgccgctgccaactcacttgggatacctgttccagctgctgctggcgctcagcagtaatgacccccatctaccttctgatgcctgagcagaggtggggaagtccaccctctcctcgatgcagcttgcgcctgtttgggaggggtgagaacacttcagaagcaccgtgtctgaaccgttgcttgtggatttagtagttgagtcataaaaaaaaattataggctgattttctttctttctttctttctttttttttttttttttttttttttttaaaacgtggacttttcataactcaggggattccctgaaaaaattacctgcaggtggaatatttcatggacaaaattttttctccccttccaaattcagtttatcaccactaaagaacaaagataaactggcctcagtcccagctgctgcgtttgggtggaaatttcatccccttcccacgttgctctttccacattgtacactcttgtggcttatatctcatgttcttctccagagattgtaaactgtagctcatcaggggagggggggggaggggggaggacccagtccatcctacaacactgttctgctggctggccacttcatctcttctctccaggactgcagccctggcttactccggctctggtggaggtgggtctgtcttatttacatcaagatgttaaaagtctacccaatgtgcagacagatccaaagcttttttttctgaacgaatcatgtcttactaacctaaccctaaatgattttaattttagttgagtttctatttgtgatactttccctttctgggctcctactttggtctttcccttttcgtctccagacatgctatgcttcatagctgctaggagagggaaggcaaaatctttttcagttttctttgacttggccattttgaagacagttagttagtgggcataatttattgctttttaaaaaagaaatattgtccatataagtttcatgctagcactcttatgagctaatgggtgatgtggccgcactgggttcattttaagctttgtcctttctcccccctgccttgccctttcttcacatgccatccagtgaggagccctgctctcagaattggaagtgtgttttttgagaggcaggagcagagccactatctccagtgaaccagagatggtagacctgtaattgtgggaaactatcagttctcttgttatggccctgccgttccttgctgtgtgtatatatataatactttgtccttcatatgtgaaagatccagtgttggaattctttggtgtaaataaacgtttggttttatttatcaaggttagatttaagttccctgtgtaaaggtctcgctgggtgggtgtctcattcaaacctgaggggactacagcccagaccatggaagcttcccaaggccctcatttttatacaaccctcatttgacccatggtactgggcagggcagagaggccttaaaaaaagcaccacaagccaaagcgtctctggggattaaggatcctttgccataaaactcattctgtgtctcagcattgcagggattggggataggaaaggcgccagtttttgtgtgtttgtgtgtgtataaagtggactttccactgtaatccagccacctaagtttatcaggtgcttcactgaggaagcctagttttttaagcacaatagcaaaacatcagctctgtattttctcctgttatttcattacagtagctgcctgtggggactaggaaaacaaatcttccaacatattttaaggcctaaaatcttagttccccattctcctacctttttagattcataagcatttctcacctggcatcatagataaaacataattgtttggggagttgaatttaattaacttacctaactttgtaacccatcttggctttagtaactttatcaaggtggtggctttagcgaatgtaatgataaaagtagaggatgctaatgcttttcttaacatttctcaaccatagagagagctaaaaggactgcagagtgagtttcttctttttggccacttgcagtgactatttattgtactcgattcttgtgtgccctagcgtgctatgagggtcaccatgttggatttgtgcagagctgaaagcaccaggtgtgccagagatgcagtttgtgattatgtttgcactggatcgtgatttgaacaagacacttagactgatgaattctttcttttgaggtggaaaggaaagttgtagatcaggactctacaccctgctcacagctcagaagtgtaggtgtgtctgaggctggtgtggaccgctgtggataactgggcctcctcacacatcaaacctgtgcaagagctgagggtaatgcagaggactctggtgtgccaccgaagagccctttaaataaatcgaagcttaaaagaaaaaaaggagtcattgcagaaatgtggagagttttaaaagatctgagtgggtggggggtagggagggtcagggtttacagagtaacaacttctgtgttgtaaattacctcatctgtacaccttgtattgggacactatttctcagcacttcctgtgtctgtattgcttagacggcgggatggatgccaatatgaaacagctgtgttggcagttactctgaaagtattttttaactttgttttgaagtgtgcccttcccccctttaagtttaaagtcagaattcccctccttgatttattggctgtaattgtattgtatttggtatgactaagacataactgtgctgggaagaagttgtgccatgaaggtctttaatttttttttttaaataaaaacattt

SEQ ID NO: 82 - protein, 391 aa, Mus musculus
MSGPVPSRARVYTDVNTHRPREYWDYESHVVEWGNQDDYQLVRKLGRGKYSEVFEAINITNNEKVVVKILKPVKKKKIKREIKILENLRGGPNIITLADIVKDPVSRTPALVFEHVNNTDFKQLYQTLTDYDIRFYMYEILKALDYCHSMGIMHRDVKPHNVMIDHEHRKLRLIDWGLAEFYHPGQEYNVRVASRYFKGPELLVDYQMYDYSLDMWSLGCMLASMIFRKEPFFHGHDNYDQLVRIAKVLGTEDLYDYIDKYNIELDPRFNDILGRHSRKRWERFVHSENQHLVSPEALDFLDKLLRYDHQSRLTAREAMEHPYFYTVVKDQARMSSTSMAGGSTPVSSANMMSGISSVPTPSPLGPLAGSPVIAAANSLGIPVPAAAGAQQ

SEQ ID NO: 83 - DNA, 939 bp, Mus musculus
cccgtgccaagcagggccagagtttacacagatgttaacacacacagaccccgagagtactgggattatgaatcacatgtggtggaatgggggaatcaagatgactatcagcttgttcgaaaattaggtaggggcaaatacagtgaagtgtttgaagccatcaacatcacaaataatgaaaaagttgttgttaaaattctcaagccagtaaaaaagaagaaaattaagcgtgaaataaagattttggagaatttgagaggtgggcccaacatcatcacacttgcagacattgtaaaagaccctgtggtaagtacagtgatgttggtaagacccatcagggcttcagtgctgaaagcacaactgacttggttctctaattttcctttcttgcaggccctggattattgtcacagcatggggattatgcacagagatgtgaaaccccataatgtcatgattgatcatgagcacagaaagcttcggctaatagactggggtttagctgagttttaccatccaggccaagagtataatgtccgagttgcttctcgatatttcaaaggtccagagctacttgtagattatcagatgtacgattatagtttggatatgtggagcttgggttgtatgctggccagtatgatcttccggaaggagccatttttccatggacatgacaattatgatcagttggtgaggatagccaaggttctgggaacagaagatttatatgactatattgacaagtacaacattgaattagatccacgtttcaacgatatcttgggcagacactcccgtaagcgatgggaacgctttgtccacagtgaaaaccagcatcttgtcagccctgaggccttggattttctggacaagctgcttcgatatgaccaccagtcacggctcactgcaagagaggccatggagcacccttacttc

SEQ ID NO: 84 - protein, 313 aa, Mus musculus
PVPSRARVYTDVNTHRPREYWDYESHVVEWGNQDDYQLVRKLGRGKYSEVFEAINITNNEKVVVKILKPVKKKKIKREIKILENLRGGPNIITLADIVKDPVVSTVMLVRPIRASVLKAQLTWFSNFPFLQALDYCHSMGIMHRDVKPHNVMIDHEHRKLRLIDWGLAEFYHPGQEYNVRVASRYFKGPELLVDYQMYDYSLDMWSLGCMLASMIFRKEPFFHGHDNYDQLVRIAKVLGTEDLYDYIDKYNIELDPRFNDILGRHSRKRWERFVHSENQHLVSPEALDFLDKLLRYDHQSRLTAREAMEHPYF

SEQ ID NO: 85 - DNA, 4724 bp, Mus musculus
gcgcggctggcccgcagagcggccgggaggacgaccggagcgcagcgggtcgcgggcaatgttgggtggcccgggaggccgccgggctgggggcggagccaatgaccccgaaggcaccgccccgtcgcgcctccggagccgtcggccgagcacagagccgggagctcagggcagctgcagcgcccgtggctcggaggacgcggccatgcagggccgggcggacgcgggcgaggctgacgaggaggctggggcgggttcggggtcggaggccgaagaggacgcgctgtgggagcggatcgagggcgtccggcaccgactgacgcgcgccctgaatccggccaagctcacgccgtatctgcgccagtgccgcgtcctggacgaacaggacgaggaggaggtgctcagcacctaccgtttcccgtgccgcgctaaccgtaccgggcgcctcatagacattttacgctgccggggcaagaggggcttcgaggccttcctggaagccctggaattctactacccagaacacttcacgctgctcactggccaggaacctgcccaacgctgctccatgatccttgatgaggagggtcccgagggcctgactcagttcttgatgactgaggtccggaggcttcgggaagctcggaagagccaattgcaccgagagcagcaactgcaggcccggggccgggccctggaggaggagcgggcagggctagagcagaggcttcgggagcagcagcaggcacaggagcgctgccagcgactgcgggaggactgggaggctggcagcctggagctgctgcgcctcaaggatgagaactacatgatcgccatgcgcctggctcagctcagcgaggagaagaattcggctgtgctgcgcagccgagacctgcagctggcggtggaccagctcaagctcaaggtcagccggctggaggaagagtgtgcgctgctgaggagggccaggggcccaccgcctggggctgaggagaaggagagggagccagatggcgctgatcttctctctgagcttcgtgcagagaaccagcggctgacggcttcactgcaggagcttcaggaaggtcttcagcaggagatgagccggccaggagctgcaggctctgaacgtatcctactggacatactggagcacgactggagggaggcgcaggacagcaggcaggagctgtgtcagaagcttcatgctgtgcagggcgagctacagtgggcagaggagctgcgggacaagtacctgcaagagatggaggatctgcggctcaaacatcgaacgctgctgaaggactgtgacctctataagcaccgcatggccactgtgttggcccagctggaggagattgagaaagagcgggaccaggcaatccagagccgagaccggatccagctgcagtattctcagagcctcattgagaaggaccagtaccgcaagcaggtgcgggggctggaggcggagcgcgatgagctgctcaccacagtcaccagcctggaggggaccaaggccatgctggaggcacagctgcagcggacacaggggggttcctgtctcaaggcctgtgcctcctcccactccctgtgctccaacctcagcagcacctggagcctcagcgagttcccatcgcccctgggaggcccagaagctacaggagaagccgggggatctgagccccacacctcggaggaagccacagacagcgagaaggagatcaaccggctctctatcctgcctttcccacccagtgctggttccatactccgccggcagcgtgaggaagacccggagccccctaagaggtcttttagcagcatgtcggatatcacagggagtgtgacccttaagccatggtcccctggcctctcttcatcatcctcgtctgacagtgtgtggcctttgggaaagccggaaggcctcctggctcggggctgtggcctggacttcctcaataggtctctggccatccgagtgtccggctggagtccccccgcaggcctggatccccaggataagagtccagatagcatgccgggccttggagacaggtggtctggggcggtggtgcgaagggtgttgtctgggcctgggtcagccaggacagaacagaaagagccgagggcggaaggcactggtctggagggggcaggcctggaagcggaggcccagcagaggaccttgccctggaaccagagctccaccctccccttcctgctggactcaaaggcctgtcattccttccatgaggccctggatgcctgggcaaagggaccgggtgccgagcccttctacattcgagccaacttctccctgcccgagcggtcggatccccatgccctttgtgtgaaagcccaagagatcctgcggttggtggacccagcccacaagcggaggcaggagtggttctgtactcgagtggacaccctcaccttacgggacctggaccggggcaccgtgcccaattatcagagagctcagcagctcctagaagtccaggaaaaatacttgatctccagcagacaccgaagtcctcgaagcaacctgaagaagcgagccctagggttggtgaggcccaagcctgcagggggcactgcaggagactcagcagaacagctccctgcagagccctgctcagagctagaacgaagcctaaaaccctacagcctggtgcgaccgctgttggtgtctgccttgaggcctgtggtcctcctgcctgagtgcctggcgcctcgcctcatccgtaacctgctggatctgccaagctccaggctggatttccaagtgtgcccagcagagagcctctctggggaggaacagtgtacgtcctcagctcccggagcccccaaagcctggccggccactgctgggctaggcagcaggatccgtgccatccaggagtctgtcgggaagaagcactgcctgttggagctgggtgcacggggagtgcgggagttggtgcacagcgaggtctaccccattgtcatccacgtggaggtgactgagaagaatgtccgtgagatcaggggcctgttgggccggccgggctggcgggattcagaactgctccgtcagtgtcggggctcagaacagtggctctggggactgccgtgttcctgggtgcaggtgcctgcgcatgcgtggggccatgcagaggagctggccaaggtggtgcgtggccgaatcttgcaggaacaggctcgccttgtgtgggtggagcgaggcagcagcagagggggcagtggcagcagtagtgaggcctgaggacccatctgatgcccaggctcttccagccactgtctagacctcctccatcagatgcctaggcctcctccatcagatacctgggcctcctccatcagatgtctgggcctcctccatcagatgcctaggcctcctccatcagatgtctgggcctcctccatcagatgcctaggcctcctccatcagatgcctgggcctcctccatcagatgtctgggcctcctccatcagatgtctgggcctcctccatcagatgcttgggcctcctccatcagatgcctgggcctcctccatcagatgtctgggcctcctccatcagatgcctgggcctcctccatcagatgcctgggcctcctccatcagatgtctaggcctcctccatcagatgcctgggcctcctccatcagatgcctaggcctcctccatcagatgtctgggcctcctccatcagatgcctgggcctcctccatcagatgcctgggcctcctccatcagatgtctgggcctcctccatcagatgcctgggcctcctccatcagatgtctgggcctcctccatcagatgcctgggcctcctccatcagatgtctgggcctcctccatcagatgcctgggcctcctccagctggtgcctgggcctcctccatcagatgcctgggcctcctccatcagatgtctgggcctcctccagctggtgcctggacattcaccgtttatacatgggctcacacccgtgtgagcagaggagaccctgtgttttcagtggaatcagatcttcctcagttggggccttccttgtccccccgtggactctccaatgtgggacctcggtcctgggctctcaccggggtctgtcattggctctgcacaggctgcatgaacccacgcacctgtccctgacctgctgctctggtctcctcactagctccaatgttcccatgtttccatttgtgtgtcttatacgtgtatgtgtgccctctccttacatacacaccctggaatagagttctcacaccgttcaattttgcacatatgtcctcatggatccccagttttgtccctccacttgggcacacgaggtctcaggggtcctcaacctgggtctgtgcccccagctgtgcccagcaccacgggacctccacagtccaatggcattgcctgtgtgtgctgtcatgaagataccacggctgttctggtcagctcctacccttacatctctgtgtgtgtcgtccctcatcccgtgtaaatatcaccatccttgtgacactggcactaagcaatgtgtgctctgcccagcacacctggacatgttctctcggctggctttctgttccccgcctgcctccaggaggccagggtggtggtgctgctaggccatcccaatgttaggcttgtgggtgattccccgggccttttcattcaagctgcacacaatgagtcattaaagtttgtcat

SEQ ID NO: 86 - protein, 1021 aa, Mus musculus
MQGRADAGEADEEAGAGSGSEAEEDALWERIEGVRHRLTRALNPAKLTPYLRQCRVLDEQDEEEVLSTYRFPCRANRTGRLIDILRCRGKRGFEAFLEALEFYYPEHFTLLTGQEPAQRCSMILDEEGPEGLTQFLMTEVRRLREARKSQLHREQQLQARGRALEEERAGLEQRLREQQQAQERCQRLREDWEAGSLELLRLKDENYMIAMRLAQLSEEKNSAVLRSRDLQLAVDQLKLKVSRLEEECALLRRARGPPPGAEEKEREPDGADLLSELRAENQRLTASLQELQEGLQQEMSRPGAAGSERILLDILEHDWREAQDSRQELCQKLHAVQGELQWAEELRDKYLQEMEDLRLKHRTLLKDCDLYKHRMATVLAQLEEIEKERDQAIQSRDRIQLQYSQSLIEKDQYRKQVRGLEAERDELLTTVTSLEGTKAMLEAQLQRTQGGSCLKACASSHSLCSNLSSTWSLSEFPSPLGGPEATGEAGGSEPHTSEEATDSEKEINRLSILPFPPSAGSILRRQREEDPEPPKRSFSSMSDITGSVTLKPWSPGLSSSSSSDSVWPLGKPEGLLARGCGLDFLNRSLAIRVSGWSPPAGLDPQDKSPDSMPGLGDRWSGAVVRRVLSGPGSARTEQKEPRAEGTGLEGAGLEAEAQQRTLPWNQSSTLPFLLDSKACHSFHEALDAWAKGPGAEPFYIRANFSLPERSDPHALCVKAQEILRLVDPAHKRRQEWFCTRVDTLTLRDLDRGTVPNYQRAQQLLEVQEKYLISSRHRSPRSNLKKRALGLVRPKPAGGTAGDSAEQLPAEPCSELERSLKPYSLVRPLLVSALRPVVLLPECLAPRLIRNLLDLPSSRLDFQVCPAESLSGEEQCTSSAPGAPKAWPATAGLGSRIRAIQESVGKKHCLLELGARGVRELVHSEVYPIVIHVEVTEKNVREIRGLLGRPGWRDSELLRQCRGSEQWLWGLPCSWVQVPAHAWGHAEELAKVVRGRILQEQARLVWVERGSSRGGSGSSSEA

SEQ ID NO: 87 - DNA, 1930 bp, Mus musculus
cctggcggtcttgcggagcggctagggcagcggaggaaaagaaaagggaacggctcggaatttgctccagcggctgctgcaagacctcggcgccaacctcgcaccggcgagcgcctcacagcccatcggctgtccctctatgtgctgctgagccggtcctggactcgacgagcccgccttcggtgttccgagcagaaatcgcaaagacggaaggactggaaatggcagaccatatgatggccatgaaccacgggcgcttccccgacggcaccaacgggctgcaccaccaccctgcccaccgcatgggcatggggcagttcccgagcccgcatcatcaccagcagcagcagccccagcacgccttcaacgccctcatgggcgagcacatacactacggcgcgggcaacatgaatgccacgagcggcatcaggcacgccatggggccggggactgtgaacggggggcaccccccgagcgctctggccccggccgccaggtttaacaactcccagttcatgggtcccccggtggccagccagggaggctccctgccggccagcatgcagctgcagaagctcaacaaccagtatttcaaccatcacccctacccccacaaccactacatgccggatttgcaccccactgcaggccaccagatgaacgggacaaaccagcacttccgagattgcaaccccaagcacagcggaggcagcagcacccctggcggtgcgggtggcagcggcacccccggcggctccggcggcacctcgggcggcgcgggtggcagcagcgcgggcggcagcggcggtggcagcaccatgcccgcctcggtggctcacgtccccgcggcaatgctgccgcccaatgtcatagacactgatttcatcgacgaggaagtgcttatgtccttagtgatagaaatgggtttggaccgcatcaaggagctgcccgaactctggctgggccaaaatgagtttgattttatgacggacttcgtgtgcaagcagcagcccagcagagtcagctgttgactcggttaacctcgcaggcggaaagaaatcaccctccccaccccacccccacccccaacttcttcggtgtgaattaaaaaaaaaacaaaaaaacaaacattcccttagacgcagtatctcgcttttcagatcctgaaagggttgagaacctggaaacaaagtaaactataaacttgtacaaattggtttaaaaaaaaaaaagattgctgccactttttcctattcttgtttcgttttttgtagccttgacattcacctcccttatgtagttgaaatatctagctaacttggtcttttttgttgtttgtttttactcctttatttcctcactttctcccgtgctcaactgttagatattaagcttggcaaactgcttaatcttgtggattttgtagatggtttcaaatgactgcgctgcgttcagattcatgagtgaaaggaaacattgcatttgttggctgcatgatctttgaagggcagatattactgcacaaactgccatctcgcttcattttttttaactatgcattcgagtacagacttaagttttcaaatatgctaaactggaagattaaacatgtgggccaaaccgttctggatcaggaaaagtcataccgttcactttcaagttggctgtctcccctcccccatatgtacagacaataatagggtgtggaatgtcgtcagtggcaaacatttcacagatttttattttgtttctgtcttcaacatttttgacactgtgctaatagttatattcagtacatgaaaagatactactgtgttgaaagctttttaggaaattttgacagtatttttgtacaaaacatttttttgagaaaatacttgttaatttattctattttaatttgccaatgtcaataaaaagttaagaaata

SEQ ID NO: 88 - protein, 269 aa, Mus musculus
MADHMMAMNHGRFPDGTNGLHHHPAHRMGMGQFPSPHHHQQQQPQHAFNALMGEHIHYGAGNMNATSGIRHAMGPGTVNGGHPPSALAPAARFNNSQFMGPPVASQGGSLPASMQLQKLNNQYFNHHPYPHNHYMPDLHPTAGHQMNGTNQHFRDCNPKHSGGSSTPGGAGGSGTPGGSGGTSGGAGGSSAGGSGGGSTMPASVAHVPAAMLPPNVIDTDFIDEEVLMSLVIEMGLDRIKELPELWLGQNEFDFMTDFVCKQQPSRVSC

SEQ ID NO: 89 - DNA, 663 bp, Mus musculus
atggcagaccatatgatggccatgaaccacgggcgcttccccgacggcaccaacgggctgcaccaccaccctgcccaccgcatgggcatggggcagttcccgagcccgcatcatcaccagcagcagcagccccagcacgccttcaacgccctcatgggcgagcacatacactacggcgcgggcaacatgaatgccacgagcggcatcaggcacgccatggggccggggactgtgaacggggggcaccccccgagcgctctggccccggccgccaggtttaacaactcccagttcatgggtcccccggtggccagccagggaggctccctgccggccagcatgcagctgcagaagctcaacaaccagtatttcaaccatcacccctacccccacaaccactacatgccggatttgcaccccactgcaggccaccagatgaacgggacaaaccagcacttccgagattgcaaccccaagcacagcggaggcagcagcacccctggcgacactgatttcatcgacgaggaagtgcttatgtccttagtgatagaaatgggtttggaccgcatcaaggagctgcccgaactctggctgggccaaaatgagtttgattttatgacggacttcgtgtgcaagcagcagcccagcagagtcagctgttga

SEQ ID NO: 90 - protein, 220 aa, Mus musculus
MADHMMAMNHGRFPDGTNGLHHHPAHRMGMGQFPSPHHHQQQQPQHAFNALMGEHIHYGAGNMNATSGIRHAMGPGTVNGGHPPSALAPAARFNNSQFMGPPVASQGGSLPASMQLQKLNNQYFNHHPYPHNHYMPDLHPTAGHQMNGTNQHFRDCNPKHSGGSSTPGDTDFIDEEVLMSLVIEMGLDRIKELPELWLGQNEFDFMTDFVCKQQPSRVSC

SEQ ID NO: 91 - DNA, 1504 bp, Mus musculus
gcccgttgccaggcgccgccttataaacctcccgctcggccgccgccgcgccgagtccgagccgcgcacgggaccgggacgcagcggagcccgcgggccccgcgttcatgcaccgcctgctggcctgggacgcagcatgcctcccgccgccgcccgccgcctttagacccatggaagtggccaacttctactacgagcccgactgcctggcctacggggccaaggcggcccgcgccgcgccgcgcgcccccgccgccgagccggccattggcgagcacgagcgcgccatcgacttcagcccctacctggagccgctcgcgcccgccgcggacttcgccgcgcccgcgcccgcgcaccacgacttcctctccgacctcttcgccgacgactacggcgccaagccgagcaagaagccggccgactacggttacgtgagcctcggccgcgcgggcgccaaggccgcgccgcccgcctgcttcccgccgccgcctcccgccgcgctcaaggcggagccgggcttcgaacccgcggactgcaagcgcgcggacgacgcgcccgccatggcggccggtttcccgttcgccctgcgcgcctacctgggctaccaggcgacgccgagcggcagcagcggcagcctgtccacgtcgtcgtcgtccagcccgcccggcacgccgagccccgccgacgccaaggccgcgcccgccgcctgcttcgcggggccgccggccgcgcccgccaaggccaaggccaagaagacggtggacaagctgagcgacgagtacaagatgcggcgcgagcgcaacaacatcgcggtgcgcaagagccgcgacaaggccaagatgcgcaacctggagacgcagcacaaggtgctggagctgacggcggagaacgagcggctgcagaagaaggtggagcagctgtcgcgagagctcagcaccctgcggaacttgttcaagcagctgcccgagccgctgctggcctcggcgggccactgctagcgcggcgcgggtggcgtggggggcgccgcggccaccctgggcaccgtgcgccctgccccgcgcgctccggccccgcgcgcgcgcccggaccaccgtgcgtgccctgcgcgcacctgcacctgcaccgaggggacaccgcgggcacaccgcgggcaccgcgcgcacgcacctgcacagcgcaccgggtttcgggacttgatgcaatccggatcaaacgtggctgagcgcgtgtggacacgggactgacgcaacacacgtgtaactgtcagccgggccctgagtaatcacttaaagatgttcctgcggggttgttgatgtttttggttttgtttttgttttttgttttgttttgtttttttttttggtcttattattttttttgtattatataaaaaagttctatttctatgagaaaagaggcgtatgtatattttgagaaccttttccgtttcgagcattaaagtgaagacattttaataaacttttttggagaatgtttaaaagcc

SEQ ID NO: 92 - protein, 296 aa, Mus musculus
MHRLLAWDAACLPPPPAAFRPMEVANFYYEPDCLAYGAKAARAAPRAPAAEPAIGEHERAIDFSPYLEPLAPAADFAAPAPAHHDFLSDLFADDYGAKPSKKPADYGYVSLGRAGAKAAPPACFPPPPPAALKAEPGFEPADCKRADDAPAMAAGFPFALRAYLGYQATPSGSSGSLSTSSSSSPPGTPSPADAKAAPAACFAGPPAAPAKAKAKKTVDKLSDEYKMRRERNNIAVRKSRDKAKMRNLETQHKVLELTAENERLQKKVEQLSRELSTLRNLFKQLPEPLLASAGHC

SEQ ID NO: 93 - DNA, 4421 bp, Mus musculus
gcccatttcagattgctaaaccctggtgtgaagcgggacaggccagggcaggaggtggccaaccacaccccgcagggcgcgcacttggcgggctgcagaccccacgggcagacgccgagatgcgcagtcggaggctcctgagcgcggcccaccttctctgcttgtgcgcggtcgcgctggccgccccagggtcccgctttctggtgacagccccagggatcatcagacccggagcaaatgtgactattggggtggatctcctggaaaatagccccccacaggtccttgtaaaggctcaggtgttcaagatagcttccaacaaatcgagatccatcctggaagcagaaggagtctttcacagaggccatttcaagactctcgttcttccggcactacctctgagcagtgcagataagatttatgagctacacataaacggacaatcagagaatgagatcgtattctccaacaggacacgtttaacatttgagagcaagagtatatctgtcctcattcagacagacaaggcattctacaagccgaagcaggaagtgaagtttcgggtgctcacactctgctcagatctcaagccttataggacatccgtggacattttcattaaggatccgaagtctaatgtgatccaacagtggttttctcagaaaggtgatcttggagtcgtttccaaaacttttcaactatcctctaatccaatatttggtgactggtccattcaggttcaagtgaatgatcagcaatattaccagtcatttcaggtcctagaatatgtgttaccaaagttcgaagtcaccgtgcagaccccgctgtattgttccttgaagtctaaacagttaaatggctccgtcatagcaaagtatacatacgggaagccagtgaagggaagtctgtcacttacatttttacctttgtctttttggggaaagaagaagaatatcacaaaaagttttgagataaatggatttgcaaacttctcttttgataattatgagatgaaaaaggtaatgaatttgaaaccgctaacggatgtctcggaagggagttatgagaatgtggacccgtcctttcctgggccggcagagattatagctactgtgacggaatcactcacaggtatctcaagaatggcaagcaccaatgtgtttttcaagcaacatgattacatcattgagatttttgattatacgactgtcttgaaaccatctctcaacttcacagccactgtgaaggtcagccgctctgatggcaatcaactaactcctgaagaaatagaaaatgatttggtcacagtagtgacccagcggaaaaataaccaccctgagagtcagagagatcaggaaatggattatatccagaccgtaaattatactatcccccaaaatggaatcattaagattgaattcccagtcatgtccatttccggcgagctacaactgaaggcttattttcttgatggtacaagttctgtgacagtccacagtatgttcacctctcctagtaagacgtacatccagcttaaaaccagagatgaatatataaaggtggggtcaccttttgatttgatggttagtggcaacagacaattcaaggacttaagctatatggtaatatcaaagggacagttggtggctgcaggcaaacaaagttcaagaactttctctttaacaccagaggcttcctgggctccaaaggcctgtataatcgcatattatattgcagaggatggggaaattataaatgatattctaaaaatccccgttcagcttgtttttgaaaataaggtaaagctgttttggagtaaacctacagtcaagccatctgataaggtctctctcaggatctctgcgacacagtctgactccctggtggggattgtagctgttgacaaaagtgtaacattgatggaaaactccaacagtattacaatggaaaccatggtccatgaactggaactttataacacagaatattatctaggcatgttcatgaactccttcgctgtatttcaggaatgtggtctctgggtgttgacagatgcaacccttataagagatagcattgatgaagtctacgatactgaagagtattctgaacgctttgcagaggaaaatgaggcaaacctggttgattttgaagatgcttcttcagttaacaatgtacatgtcaggaagaattttccagaaacatggatttggctagacgcctacatgggatctaagatttatgaagaatttgaagttactgtacctgactccatcacttcttgggtggcttcggcttttgtcatctcagaagacctgggttttgggttaacaaccgttccagcagagctgcaagccttccaaccgtttttccttttcctgaatcttccgtactctgttatcagaggtgaagagtttgctttggaagtatccatcgtcaattatttgaaagatacaattaaggttgtgatactcattgaggaaagtgacagctttgatattttaatgacttcaaatgacaccaatggcaccatataccggaagactgttcaagttcccagggataatggggtcactcttgtttttcccatcaagcccacgcacttgggagagattcccatcacagtgacggctgcctcacccactgcctctgatgctgtcacccagacaattgtagtaaagcctgaagggatagaaaagtcgtattcgaaatctgtcttattggatctgacagatagcaacgtagaaagtaagcagcaatctatgagattctcctttcctcctgatacggtcattggcagtgaaagagttcagatcacagcaattggagatatccttggttcctccatcaatggcttatcttcactgatccggatgccttatggatgtggtgaacagaacatgatatattttgctccaaatatttacattttggattatctgactaaacagaaacagctgacagttaatttaaaagaaaaggccctttcatatatgaggcaaggttaccaaagggagcttctctatcagagggaagatggctccttcagtgcttttggggacattgactcttctgggagcacttggtggggtttttttcttctaatcaaacaattccgcatcacagatcaggtgtttattaggctgcatgcacataagaaattcaatggtgaattttgggagccaggaagagtgattcacagtgaacttcaaggtggcaccaaaagcccagtaacacttacggcctatattgtgacttctgtcctgggatacaaaaagtatcagcctaatatcgatgtacaagactcaatcaagtttttggaatttgaattcagcagaggaatttcggacaattataccttagcaattatatcctatgccctgtccacagtcgggagccctaaagcagaggaggctttgaacttgctgatgcagcgatcagaaaaggaaggagacacacagttctggttgtcatcaggacctgcgctctctgggtcctggcagccgcgctccgtggacatcgaaatcgctgcttatgcactgctggcgcacactctgcaccatgtgtctgagggaatcccggttatgaggtggctcatccagcaaagaaacagcctgggaggttttgtatccactcaggatactgttgtggccctgaaggcattatctgaattttcagcccttgtgcacgaaaatacagtatattccaactttgacctgtcacagggccctcggcatccccagaatccatacactatccgaattgacagaaccctctttctccttcaccaggaagagcttcatgcgctagatcccatcaccgttaatgtttctgcgcatggctcgggatttgctatttgccagcttaatgttgactataacgtgaaaggttcaggttcttctaaaagacggagatctaccgaaaatcaagaagtttttgatttagacgtcattgtgaataatgaggacgacattagtcacctgaatctgaatgtgtgcacaagtcacttgggttcagagaggacaggcatggtccttatggaagtgaaccttctcagtggctttagtgcatcttcagattcaattcctctgagtgagaccctgaagaaagtggaatatgataacgggaaactcaacctttatttagattctgtaaatgaatcccagttttgtgttaatattcccactgtgagagactacaaagtttcaaatattcgagatggttcagtatctgtaatggactactatgaaccaaggagacaggcagtgcgaagctacaacacccaggtgaagctgtcctcatgttacctcagtccagacaccaactgcaagtcacacacggacggagccacggactcccttcgacgttcttcgagccttctcgtcttttgctccgtccttctgtactttgtgcaacattga

SEQ ID NO: 94 - protein, 1433 aa, Mus musculus
MRSRRLLSAAHLLCLCAVALAAPGSRFLVTAPGIIRPGANVTIGVDLLENSPPQVLVKAQVFKIASNKSRSILEAEGVFHRGHFKTLVLPALPLSSADKIYELHINGQSENEIVFSNRTRLTFESKSISVLIQTDKAFYKPKQEVKFRVLTLCSDLKPYRTSVDIFIKDPKSNVIQQWFSQKGDLGVVSKTFQLSSNPIFGDWSIQVQVNDQQYYQSFQVLEYVLPKFEVTVQTPLYCSLKSKQLNGSVIAKYTYGKPVKGSLSLTFLPLSFWGKKKNITKSFEINGFANFSFDNYEMKKVMNLKPLTDVSEGSYENVDPSFPGPAEIIATVTESLTGISRMASTNVFFKQHDYIIEIFDYTTVLKPSLNFTATVKVSRSDGNQLTPEEIENDLVTVVTQRKNNHPESQRDQEMDYIQTVNYTIPQNGIIKIEFPVMSISGELQLKAYFLDGTSSVTVHSMFTSPSKTYIQLKTRDEYIKVGSPFDLMVSGNRQFKDLSYMVISKGQLVAAGKQSSRTFSLTPEASWAPKACIIAYYIAEDGEIINDILKIPVQLVFENKVKLFWSKPTVKPSDKVSLRISATQSDSLVGIVAVDKSVTLMENSNSITMETMVHELELYNTEYYLGMFMNSFAVFQECGLWVLTDATLIRDSIDEVYDTEEYSERFAEENEANLVDFEDASSVNNVHVRKNFPETWIWLDAYMGSKIYEEFEVTVPDSITSWVASAFVISEDLGFGLTTVPAELQAFQPFFLFLNLPYSVIRGEEFALEVSIVNYLKDTIKVVILIEESDSFDILMTSNDTNGTIYRKTVQVPRDNGVTLVFPIKPTHLGEIPITVTAASPTASDAVTQTIVVKPEGIEKSYSKSVLLDLTDSNVESKQQSMRFSFPPDTVIGSERVQITAIGDILGSSINGLSSLIRMPYGCGEQNMIYFAPNIYILDYLTKQKQLTVNLKEKALSYMRQGYQRELLYQREDGSFSAFGDIDSSGSTWWGFFLLIKQFRITDQVFIRLHAHKKFNGEFWEPGRVIHSELQGGTKSPVTLTAYIVTSVLGYKKYQPNIDVQDSIKFLEFEFSRGISDNYTLAIISYALSTVGSPKAEEALNLLMQRSEKEGDTQFWLSSGPALSGSWQPRSVDIEIAAYALLAHTLHHVSEGIPVMRWLIQQRNSLGGFVSTQDTVVALKALSEFSALVHENTVYSNFDLSQGPRHPQNPYTIRIDRTLFLLHQEELHALDPITVNVSAHGSGFAICQLNVDYNVKGSGSSKRRRSTENQEVFDLDVIVNNEDDISHLNLNVCTSHLGSERTGMVLMEVNLLSGFSASSDSIPLSETLKKVEYDNGKLNLYLDSVNESQFCVNIPTVRDYKVSNIRDGSVSVMDYYEPRRQAVRSYNTQVKLSSCYLSPDTNCKSHTDGATDSLRRSSSLLVFCSVLLYFVQH

SEQ ID NO: 95 - DNA, 1231 bp, Mus musculus
agcacagtcactggcgatctgaaaagtgtctagagcaggatctagctgactctaagattgcagatttggtagcccagcacaatgagagctcagaggggactcatcttactcctgctgcttctggctgtgttctgttccacagctgttagcctcacatgctaccactgtttccaaccggtggtttcttcatgcaatatgaacagcacttgctctcctgaccaggattcctgtctctatgctgtagccggaatgcaagtgtatcaaaggtgttggaaacaatcagattgtcatggtgagatcattatggaccaattagaagagacaaaattaaaattcagatgctgccagtttaacttgtgtaacaaaagtgacggatccttggggaagacaccattgctggggacctcggttctggtggccattttgaatctttgtttcttaagtcatctctaagtcctagatgcctccctctctctctctctctctctctctctctctcttttcctgctgctgcagtagtctaaagcttttattattttccatctgtattaatttaggaaagaataaagttcacttgaacatcttggacaagagggaggagtttaagcagtgtggaagagcaccatgcacaccaggagagcccacttgcagttgcagagtgaaggcggagggtagaacacctataggttatataatcttcctttgcctgactttaagattcaggttaagtgagttcctggcaaccctcagggatagctctctggttcctgcaatgtagctgaggagtgagatcagacctttaggagtgagtgggccaggaggattctctttaccactctgacacgctcaaaatgctttcataatcttcacaggccctgagctggtgtgtgaatgttccagttgtgagctgtcagttaggggcagtgactgttcacttgcttaaaaaaacaaaagcaaacccaaccaaccaaccaaccaaccaaccaaccagtgctggccatgaagcccagatcttggcttgtaggcgagtgctttacccttaagccccagccccagctcaagcagtgaatgaaccgctgtgctttcagctttagaaaatgtagggaaatgaaacaagctctgaaccccatgtgatggtacttgcttcctttgcttagtatctcagtactcaggaggcagaggcaggaggatggccagaaattgaaggtggtttccaggctcacctaaaact

SEQ ID NO: 96 - protein, 123 aa, Mus musculus
MRAQRGLILLLLLLAVFCSTAVSLTCYHCFQPVVSSCNMNSTCSPDQDSCLYAVAGMQVYQRCWKQSDCHGEIIMDQLEETKLKFRCCQFNLCNKSDGSLGKTPLLGTSVLVAILNLCFLSHL

SEQ ID NO: 97 - DNA, 2980 bp, Mus musculus
gcgtttgttccagacgcgggcgcgcggcgcgccctgggtctgtttccccggcactttcctgttactttccagcggggaggacagttccggggagggccctgctcacgcccgctgcataaaagcccagcccagccggccgccacagccctctatcaaccccagacgctgtccgttccgtgccgcgccaccatgaggggcgtcagatgccccggcctgcttgtggtgtgcattttactgagtctctcaggagctggaacccagaaggcagagaactgtgccaagtggtgccctatcaactcaaaatgtgtcagtaacagaagctgtgtctgcaagcccggcttcagctcggagaaggaattgatcactaaccctgcagagagctgtgaagacatcaacgagtgtttactacctggattttcctgtggagactttgccatgtgtaagaactcagaggggagttacacctgcgtctgtaacctgggatataagctcctttctggtgcagaatcttttgttaacgagagtgagaatacatgtcaagatgtggatgagtgcagctctgggcagcatcaatgtcacaattccaccgtctgcaaaaacaccgtaggctcctacaagtgccactgccgtccaggttggaagccaacttctgggtccctccgtggtccagacaccatatgccaagagccaccgttccctacttggacactgctgcccacagcccacagtcagactctcttgagattctctgttgaagtccagaatctgctccgtgacttcaatccagccacggtcaactacaccatccagaaactcatcgaggctgtggacaagctgctggaagaccccatggagactgaaacccaacaagtagctgcccagttgctctcgaacctggaacaaagccttcggaccttggctcagtttttacccaaaggccccttcacctacacgtccccttcaaatactgaactgtccctgatggtgaaggagcaagacaacaaagatgttaccacagtgcaccacggccaaacttggatggagctggactgggctgtgacagctggagccaaaatctcagaaaatggctcctcggtggcaggcatcctgtccagcccaaacatggaaaagctgctgggcaacaccccgctgaacttggagcagagaagggcctccttggaggacttctatggaagcccgattccgagtgtctcacttaagcttctctcaaacatcaattctgtcttcctgaccaacacgaacactgaaaagctcgcctcgaatgtcacgttcaagttcgactttacttctgtggagtcaattgagccacgtcatgagctgatatgtgccttctggaaagcccacaacgggaatgggtactgggacaccgacggctgctcaatgaatggcactggcttctgccactgcaaccacctgaccagctttgccatcctaatggctcagtaccatgtgcaggacccaaggctggaattgatcaccaaggtggggctgttgttgtccctgatctgcctgctgctgtgcatcctgaccttcctgctggtgaagcccatccagagctctcgaaccatggtgcacctgcacctgtgcatctgcctcttcctgggctcaatcatattcctggtcggcgtggagaatgaagggggtgaggtgggcctgcgctgccgcctggtggccgtgatgctgcatttctgcttcctggccgccttctgctggatggcactggagggcgtggagctctacttcctggtggtgcgtgtgttccagggccaaggcctgagtacatggcaacgctgcctgattggctacggggtgcccctcctcatcgtggccatctcaatggcagttgtcaaaatggatggctatgggcatgcaacatactgctggctggactttaggaagcagggctttctctggagcttttcgggacccgtggccttcatcattttctgcaatgctgccattttcgtgatcactgtctggaagctcacaaagaagttttctgaaatcaacccaaacatgaagaagttaaggaaggcgagggtgctgaccatcacctccatcgcccagctccttgtgctgggctgcacctggggcttcggcctgttcctcttcaacccccatagcacatggctatcctacatctttaccctgctcaactgcctgcagggcctattcctctatgtgatgctctgcctgctcaacaaaaaggtgagggaagagtactggaaatgggcctgcatggtcactgggagcaagtacacagagttcaactcttccacaacaggcactggcaccagccaaacacgggctctcaggtcctcagaatcagggatgtgaaggcgagttccatgaaggacagcagcacatactcacggctgtcattctgccttctgttcctgccacctttcggcctttgaccccacttcatataaagaagggatgcaaacccagcaatgagccctgccacggggcaaggggtcgctggtcctgcttctggttgtctctgcctcaccacagctactgcctaccagagaaacagaatgcagccagcccagacctgcagcccactgcctggtacacgaggcaggcagtcctaggacaaagggaagagcccttgagacctgggctctttgccagggtgctgggttcagtttccttaagctaagactgtggatgccacgtcagccactgaagcccgcctgctgctgaggctcacggtacagaggcctcgctgctccacatccagggcagaaggtctcacagctaaagactaggttttgtaatttttttaacctgtaaacctttcaatgttgacacacaaaattaaatatcatattgataaaaaagatggcacgtttgctggtgagaagtttgctggcttgacccaaccccatgagatgttgaccgaaagggatggggctggagccatgcattcacaataaaagtttattcttacatc

SEQ ID NO: 98 - protein, 722 aa, Mus musculus
MRGVRCPGLLVVCILLSLSGAGTQKAENCAKWCPINSKCVSNRSCVCKPGFSSEKELITNPAESCEDINECLLPGFSCGDFAMCKNSEGSYTCVCNLGYKLLSGAESFVNESENTCQDVDECSSGQHQCHNSTVCKNTVGSYKCHCRPGWKPTSGSLRGPDTICQEPPFPTWTLLPTAHSQTLLRFSVEVQNLLRDFNPATVNYTIQKLIEAVDKLLEDPMETETQQVAAQLLSNLEQSLRTLAQFLPKGPFTYTSPSNTELSLMVKEQDNKDVTTVHHGQTWMELDWAVTAGAKISENGSSVAGILSSPNMEKLLGNTPLNLEQRRASLEDFYGSPIPSVSLKLLSNINSVFLTNTNTEKLASNVTFKFDFTSVESIEPRHELICAFWKAHNGNGYWDTDGCSMNGTGFCHCNHLTSFAILMAQYHVQDPRLELITKVGLLLSLICLLLCILTFLLVKPIQSSRTMVHLHLCICLFLGSIIFLVGVENEGGEVGLRCRLVAVMLHFCFLAAFCWMALEGVELYFLVVRVFQGQGLSTWQRCLIGYGVPLLIVAISMAVVKMDGYGHATYCWLDFRKQGFLWSFSGPVAFIIFCNAAIFVITVWKLTKKFSEINPNMKKLRKARVLTITSIAQLLVLGCTWGFGLFLFNPHSTWLSYIFTLLNCLQGLFLYVMLCLLNKKVREEYWKWACMVTGSKYTEFNSSTTGTGTSQTRALRSSESGM

SEQ ID NO: 99 - DNA, 2861 bp, Mus musculus
caaccccagacgctgtccgttccgtgccgcgccaccatgaggggcgtcagatgccccggcctgcttgtggtgtgcattttactgagtctctcaggagctggaacccagaaggcagagagtaagaactgtgccaagtggtgccctatcaactcaaaatgtgtcagtaacagaagctgtgtctgcaagcccggcttcagctcggagaaggaattgatcactaaccctgcagagagctgtgaagacatcaacgagtgtttactacctggattttcctgtggagactttgccatgtgtaagaactcagaggggagttacacctgcgtctgtaacctgggatataagctcctttctggtgcagaatcttttgttaacgagagtgagaatacatgtcaagatgtgaatgagtgcatctccgggcaaaaccattgccaccaatccacccactgcatcaacaaattgggtggctattcttgcatctgtcgtcaaggctggaaacctgttcctggatcccccaatggccctgtcagcacagtgtgcgaagatgtggatgagtgcagctctgggcagcatcaatgtcacaattccaccgtctgcaaaaacaccgtaggctcctacaagtgccactgccgtccaggttggaagccaacttctgggtccctccgtggtccagacaccatatgccaagagccaccgttccctacttggacactgctgcccacagcccacagtcagactctcttgagattctctgttgaagtccagaatctgctccgtgacttcaatccagccacggtcaactacaccatccagaaactcatcgaggctgtggacaagctgctggaagaccccatggagactgaaacccaacaagtagctgcccagttgctctcgaacctggaacaaagccttcggaccttggctcagtttttacccaaaggccccttcacctacacgtccccttcaaatactgaactgtccctgatggtgaaggagcaagacaacaaagatgttaccacagtgcaccacggccaaacttggatggagctggactgggctgtgacagctggagccaaaatctcagaaaatggctcctcggtggcaggcatcctgtccagcccaaacatggaaaagctgctgggcaacaccccgctgaacttggagcagagaagggcctccttggaggacttctatggaagcccgattccgagtgtctcacttaagcttctctcaaacatcaattctgtcttcctgaccaacacgaacactgaaaagctcgcctcgaatgtcacgttcaagttcgactttacttctgtggagtcaattgagccacgtcatgagctgatatgtgccttctggaaagcccacaacgggaatgggtactgggacaccgacggctgctcaatgaatggcactggcttctgccactgcaaccacctgaccagctttgccatcctaatggctcagtaccatgtgcaggacccaaggctggaattgatcaccaaggtggggctgttgttgtccctgatctgcctgctgctgtgcatcctgaccttcctgctggtgaagcccatccagagctctcgaaccatggtgcacctgcacctgtgcatctgcctcttcctgggctcaatcatattcctggtcggcgtggagaatgaagggggtgaggtgggcctgcgctgccgcctggtggccgtgatgctgcatttctgcttcctggccgccttctgctggatggcactggagggcgtggagctctacttcctggtggtgcgtgtgttccagggccaaggcctgagtacatggcaacgctgcctgattggctacggggtgcccctcctcatcgtggccatctcaatggcagttgtcaaaatggatggctatgggcatgcaacatactgctggctggactttaggaagcagggctttctctggagcttttcgggacccgtggccttcatcattttctgcaatgctgccattttcgtgatcactgtctggaagctcacaaagaagttttctgaaatcaacccaaacatgaagaagttaaggaaggcgagggtgctgaccatcacctccatcgcccagctccttgtgctgggctgcacctggggcttcggcctgttcctcttcaacccccatagcacatggctatcctacatctttaccctgctcaactgcctgcagggcctattcctctatgtgatgctctgcctgctcaacaaaaaggtgagggaagagtactggaaatgggcctgcatggtcactgggagcaagtacacagagttcaactcttccacaacaggcactggcaccagccaaacacgggctctcaggtcctcagaatcagggatgtgaaggcgagttccatgaaggacagcagcacatactcacggctgtcattctgccttctgttcctgccacctttcggcctttgaccccacttcatataaagaagggatgcaaacccagcaatgagccctgccacggggcaaggggtcgctggtcctgcttctggttgtctctgcctcaccacagctactgcctaccagagaaacagaatgcagccagcccagacctgcagcccactgcctggtacacgaggcaggcagtcctaggacaaagggaagagcccttgagacctgggctctttgccagggtgctgggttcagtttccttaagctaagactgtggatgccacgtcagccactgaagcccgcctgctgctgaggctcacggtacagaggcctcgctgctccacatccagggcagaaggtctcacagctaaagactaggttttgtaatttttttaacctgtaaacctttcaatgttgacacacaaaattaaatatcatattgat

SEQ ID NO: 100 - protein, 773 aa, Mus musculus
MRGVRCPGLLVVCILLSLSGAGTQKAESKNCAKWCPINSKCVSNRSCVCKPGFSSEKELITNPAESCEDINECLLPGFSCGDFAMCKNSEGSYTCVCNLGYKLLSGAESFVNESENTCQDVNECISGQNHCHQSTHCINKLGGYSCICRQGWKPVPGSPNGPVSTVCEDVDECSSGQHQCHNSTVCKNTVGSYKCHCRPGWKPTSGSLRGPDTICQEPPFPTWTLLPTAHSQTLLRFSVEVQNLLRDFNPATVNYTIQKLIEAVDKLLEDPMETETQQVAAQLLSNLEQSLRTLAQFLPKGPFTYTSPSNTELSLMVKEQDNKDVTTVHHGQTWMELDWAVTAGAKISENGSSVAGILSSPNMEKLLGNTPLNLEQRRASLEDFYGSPIPSVSLKLLSNINSVFLTNTNTEKLASNVTFKFDFTSVESIEPRHELICAFWKAHNGNGYWDTDGCSMNGTGFCHCNHLTSFAILMAQYHVQDPRLELITKVGLLLSLICLLLCILTFLLVKPIQSSRTMVHLHLCICLFLGSIIFLVGVENEGGEVGLRCRLVAVMLHFCFLAAFCWMALEGVELYFLVVRVFQGQGLSTWQRCLIGYGVPLLIVAISMAVVKMDGYGHATYCWLDFRKQGFLWSFSGPVAFIIFCNAAIFVITVWKLTKKFSEINPNMKKLRKARVLTITSIAQLLVLGCTWGFGLFLFNPHSTWLSYIFTLLNCLQGLFLYVMLCLLNKKVREEYWKWACMVTGSKYTEFNSSTTGTGTSQTRALRSSESGM

SEQ ID NO: 101 - DNA, 2992 bp, Mus musculus
cccagacgctgtccgttccgtgccgcgccaccatgaggggcgtcagatgccccggcctgcttgtggtgtgcattttactgagtctctcaggagctggaacccagaaggcagagagtaagaactgtgccaagtggtgccctatcaactcaaaatgtgtcagtaacagaagctgtgtctgcaagcccggcttcagctcggagaaggaattgatcactaaccctgcagagagctgtgaagacatcaacgagtgtttactacctggattttcctgtggagactttgccatgtgtaagaactcagaggggagttacacctgcgtctgtaacctgggatataagctcctttctggtgcagaatcttttgttaacgagagtgagaatacatgtcaagcatcagtgaacactgggatgacacctgtgccctccaggatccacacagttactactgcgcctggaaatctccccgagcagacaactacagtgcaccagacacagatgggagactcagaagagaggacacccaaggatgtgaatgagtgcatctccgggcaaaaccattgccaccaatccacccactgcatcaacaaattgggtggctattcttgcatctgtcgtcaaggctggaaacctgttcctggatcccccaatggccctgtcagcacagtgtgcgaagatgtggatgagtgcagctctgggcagcatcaatgtcacaattccaccgtctgcaaaaacaccgtaggctcctacaagtgccactgccgtccaggttggaagccaacttctgggtccctccgtggtccagacaccatatgccaagagccaccgttccctacttggacactgctgcccacagcccacagtcagactctcttgagattctctgttgaagtccagaatctgctccgtgacttcaatccagccacggtcaactacaccatccagaaactcatcgaggctgtggacaagctgctggaagaccccatggagactgaaacccaacaagtagctgcccagttgctctcgaacctggaacaaagccttcggaccttggctcagtttttacccaaaggccccttcacctacacgtccccttcaaatactgaactgtccctgatggtgaaggagcaagacaacaaagatgttaccacagtgcaccacggccaaacttggatggagctggactgggctgtgacagctggagccaaaatctcagaaaatggctcctcggtggcaggcatcctgtccagcccaaacatggaaaagctgctgggcaacaccccgctgaacttggagcagagaagggcctccttggaggacttctatggaagcccgattccgagtgtctcacttaagcttctctcaaacatcaattctgtcttcctgaccaacacgaacactgaaaagctcgcctcgaatgtcacgttcaagttcgactttacttctgtggagtcaattgagccacgtcatgagctgatatgtgccttctggaaagcccacaacgggaatgggtactgggacaccgacggctgctcaatgaatggcactggcttctgccactgcaaccacctgaccagctttgccatcctaatggctcagtaccatgtgcaggacccaaggctggaattgatcaccaaggtggggctgttgttgtccctgatctgcctgctgctgtgcatcctgaccttcctgctggtgaagcccatccagagctctcgaaccatggtgcacctgcacctgtgcatctgcctcttcctgggctcaatcatattcctggtcggcgtggagaatgaagggggtgaggtgggcctgcgctgccgcctggtggccgtgatgctgcatttctgcttcctggccgccttctgctggatggcactggagggcgtggagctctacttcctggtggtgcgtgtgttccagggccaaggcctgagtacatggcaacgctgcctgattggctacggggtgcccctcctcatcgtggccatctcaatggcagttgtcaaaatggatggctatgggcatgcaacatactgctggctggactttaggaagcagggctttctctggagcttttcgggacccgtggccttcatcattttctgcaatgctgccattttcgtgatcactgtctggaagctcacaaagaagttttctgaaatcaacccaaacatgaagaagttaaggaaggcgagggtgctgaccatcacctccatcgcccagctccttgtgctgggctgcacctggggcttcggcctgttcctcttcaacccccatagcacatggctatcctacatctttaccctgctcaactgcctgcagggcctattcctctatgtgatgctctgcctgctcaacaaaaaggtgagggaagagtactggaaatgggcctgcatggtcactgggagcaagtacacagagttcaactcttccacaacaggcactggcaccagccaaacacgggctctcaggtcctcagaatcagggatgtgaaggcgagttccatgaaggacagcagcacatactcacggctgtcattctgccttctgttcctgccacctttcggcctttgaccccacttcatataaagaagggatgcaaacccagcaatgagccctgccacggggcaaggggtcgctggtcctgcttctggttgtctctgcctcaccacagctactgcctaccagagaaacagaatgcagccagcccagacctgcagcccactgcctggtacacgaggcaggcagtcctaggacaaagggaagagcccttgagacctgggctctttgccagggtgctgggttcagtttccttaagctaagactgtggatgccacgtcagccactgaagcccgcctgctgctgaggctcacggtacagaggcctcgctgctccacatccagggcagaaggtctcacagctaaagactaggttttgtaatttttttaacctgtaaacctttcaatgttgacacacaaaattaaatatcatattgat

SEQ ID NO: 102 - protein, 818 aa, Mus musculus
MRGVRCPGLLVVCILLSLSGAGTQKAESKNCAKWCPINSKCVSNRSCVCKPGFSSEKELITNPAESCEDINECLLPGFSCGDFAMCKNSEGSYTCVCNLGYKLLSGAESFVNESENTCQASVNTGMTPVPSRIHTVTTAPGNLPEQTTTVHQTQMGDSEERTPKDVNECISGQNHCHQSTHCINKLGGYSCICRQGWKPVPGSPNGPVSTVCEDVDECSSGQHQCHNSTVCKNTVGSYKCHCRPGWKPTSGSLRGPDTICQEPPFPTWTLLPTAHSQTLLRFSVEVQNLLRDFNPATVNYTIQKLIEAVDKLLEDPMETETQQVAAQLLSNLEQSLRTLAQFLPKGPFTYTSPSNTELSLMVKEQDNKDVTTVHHGQTWMELDWAVTAGAKISENGSSVAGILSSPNMEKLLGNTPLNLEQRRASLEDFYGSPIPSVSLKLLSNINSVFLTNTNTEKLASNVTFKFDFTSVESIEPRHELICAFWKAHNGNGYWDTDGCSMNGTGFCHCNHLTSFAILMAQYHVQDPRLELITKVGLLLSLICLLLCILTFLLVKPIQSSRTMVHLHLCICLFLGSIIFLVGVENEGGEVGLRCRLVAVMLHFCFLAAFCWMALEGVELYFLVVRVFQGQGLSTWQRCLIGYGVPLLIVAISMAVVKMDGYGHATYCWLDFRKQGFLWSFSGPVAFIIFCNAAIFVITVWKLTKKFSEINPNMKKLRKARVLTITSIAQLLVLGCTWGFGLFLFNPHSTWLSYIFTLLNCLQGLFLYVMLCLLNKKVREEYWKWACMVTGSKYTEFNSSTTGTGTSQTRALRSSESGM

SEQ ID NO: 103 - DNA, 1478 bp, Mus musculus
gggagccaaggattccccgcaggtagtagctggaaagagccgcagaccttcggtgaagctcactccattcctcacccgtctctgcagcaaattagtgtggagaacagaatgagctactatgtggatcccactgtgggcagcccctccactttctctgcacctcatcctgcagtggcgaggcagggtcctattaacgcttttgaagatcctcgaatgacctgcggcttccagtccaattatcatcagcaaagacctctttatccactctgggatgagacagccactcaggaagttcctactggccttgaacactgcggctcagacatggaatgtgcagatgtcccgctgttaactccgagcagcaaagaaatgatgtcccaagccttgaaagctactttcagtggtttcacaaaagaacagcagcgactgggaatccccaaaggtatacttttgatcgtaggagaaaggaccacgaagactggatccttaggaaaggctcgtttgctctcctgtagcagacaagtttggaaaaaatttattttagagtcacgatgggtgaccatggatgaacccagggagctgtggtgcttattatttatattctgctctctttcatgtactttggcaaactatgcttgtgctttgggtgttccaatctaaaagggttttctgagaatggaaagagtctggagttatcataaagaagtgagctgtgaattgtcagctgtccctagaacatttcctggacagtcatgaataggcaagctgggtcttgtttttattttgctttgttttgtgttgatgttgttgttgttgttaagaaagttgaaggaaaactgtctataaataacacctcgtctgactgtaaataaaagacttccagcgtggccagaccaaagtgttgtttagattcttagaatacatctgcacatttttttttacatcttctgtttacaactttacccaaaacctcggtggaccacagctccaagcatcctttgtggaccagaatgccagagcatagtgacttctgagccctgagtgttcccagcatctcatgcagttacttgtggctcaggcatcatttgagtggacgtagaagcctgctgcctcctgattccttttggtgtcattggcaggtacagctctgtcaaaccttaggtcatgttcatgaagattacatggcttcactgctactcaaagctgtccctgtggtcacaaataatgatacttcaatgacttaccattactaattgctgtgattattataaaacctgagtggctaagataaaaaataattgagtataaaaaaatctcaagtgtattgcagcgttgagagcagaaagaggcatgtgcagtttgtgggaaacactttccattgctattgccattaaagaaggcatagtcccttatctgggggcttttgatattttttaatgagaatcagggtgagagaggagatcaatggaaatcttggc

SEQ ID NO: 104 - protein, 183 aa, Mus musculus
MSYYVDPTVGSPSTFSAPHPAVARQGPINAFEDPRMTCGFQSNYHQQRPLYPLWDETATQEVPTGLEHCGSDMECADVPLLTPSSKEMMSQALKATFSGFTKEQQRLGIPKGILLIVGERTTKTGSLGKARLLSCSRQVWKKFILESRWVTMDEPRELWCLLFIFCSLSCTLANYACALGVPI

SEQ ID NO: 105 - DNA, 3268 bp, Mus musculus
tgcgccagcgccggccagccgtgcgagcgagcaagggagcgagcgccccggacggaggagggagcgagcgcccgggacagaggagcgagcgggcgggcgaggcgcgggcgaggctgggacctaagcgcgctctctgctccgccaagtgccaacttcgcgcggactggctgggcgcgcaccttcccgcggggcggtcagcgggaatttgagattttagggttgcgctctgtccccttccactgggttcaaaaatccccattaaaaagcaaaacaacagttacagcaaacttactctcatcccgccggccccctcaactccgggcaccatgaaggcggccgtcgatctcaagccgactctcaccatcatcaagacagaaaaagtggatctcgagcttttcccttccccggacatggaatgtgcagatgtcccgctgttaactccgagcagcaaagaaatgatgtcccaagccttgaaagctactttcagtggtttcacaaaagaacagcagcgactgggaatccccaaagacccccggcagtggacagaaacccacgtccgggactgggtgatgtgggctgtgaatgagttcagcctgaaaggtgtggacttccagaagttctgtatgagtggagcagcactgtgtgccctgggtaaagaatgcttcctcgagctggctccagactttgttggggatatcctgtgggagcatctagagatcctgcagaaagaggatgtgaaaccatatcaggttaatggagccaaccctacctacccagaatcctgttacacctcggattacttcatcagctacggtatcgagcatgctcagtgtgttcctccctcagagttctcagagcccagcttcatcacagagtcctatcagacgctgcatcctatcagctcggaagaactcctgtccctcaagtatgagaacgactacccttctgtcattctccaggaccctctccagacagacaccttgcagacagactactttgccatcaagcaagaggtgttaactccagacaacatgtgcctggggagagccagtcgtggtaaactcgggggccaggactcttttgagagcgtagagagctacgatagttgtgaccgcctcacccagtcctggagcagccagtcatccttcaacagcctgcagcgggtcccctcctatgacagcttcgactacgaggattatcccgctgccctgcccaaccacaagcccaagggcaccttcaaggactatgtgcgtgaccgtgctgacctcaacaaggacaagcctgtcattcctgctgctgccctggctggctacacaggaagtgggccgatccagctgtggcagtttcttctggaattactcactgataagtcttgtcagtcctttatcagctggacaggagatggctgggaattcaagctttctgacccagatgaggtggccaggagatggggaaagaggaaaaacaaacctaagatgaattatgagaaactgagccgtggccttcgctactattatgacaaaaatatcatccacaagacggcgggcaagcgctacgtataccgctttgtgtgcgacctgcagagcctgctgggatacacccctgaagagctgcacgccatgctggatgtaaagccggatgctgactagtcatggacagacgcgcagaaggaaggggctgggggaaccctgctgagacctttcaaagagcaaccctgttggttggactcttcatttttaattgttattcaatgttttattttccagaactcatttttcacattcaggggtgggagctgagggagcgccgctgtattccattggccattggtgggccggaaagaggaggtcaggacctgcggggtgggcggggcaatagctcctgagcagactttcagaagggagaggtcttctcagaagcctgttggacctggcttgcagaggaaaaaaaaacttaagtgtccgttttttttttttttttttttaaatcaaagaaaaaaaaattcatcttgagttgtggatctactagtgggaggaatgatcacattgagatgaaagagattgatgaaagccagtcagttttgtgggtgggctgaaaacagtttcttcaggggattactaaactcaagaattattaacctttctactttttgaaacaatgatggactttgattgaaggggtccaaaactgtttttatgttgaagtttattttattaaattttgtgccagtatttttttttccttaaaaaaatatcgtcttaagctctaaggtggtctcagtattgcagtattgtgagtttgttgttatttgctggctgaggactcttgtcacagtgaaagacaactgtttatatagaccccattggaaaaatcccagttctgtactgagatcagagaccccaaactcttacagctaaaggaaacgaatgctgatctggggacagggggactgtgcgtgtgacttccacctgcggtttgtaaaaactgttttcctttgattcactgtcaggctttggacttagtgttagttacggggcgttaagtctctgcactgaatgtattctgcagctcttctatggaatcgtcggcatcatagcacagttcaagtcttggaaacgaaatccaaggagcaggattaacctgggttttggttaaaccgctacccgaaacatggaagactcagaataaaagccgtttgcatgggcattaccccgagggtcttaaggcctcaatgcatgccattccaaactaacattctcagttctcctctactttgtcttatgttccccccggcatccctcattgctgcccctccctcatcactgatcagtgaaagtggagtgtaatgcatcctgacacgtgactgaaagtgtagtttcagccatcacaacacaaatccaagagtccagacttgctagggctcggaggccacggcagtggagagggtatttcagtagcatgtgactcggcctcctttgaagacttggtgctcgtcaggtaggatttcaggtgagactgcttgccgggaagtggcagggagcactggcacttgacctgttaccacctcagcagagggcaagcccaggtcaactgcggtgagagggagacggagaaaatacaagggaaggcgcttaggtaaggaaaataaggtggcccgagacagttagatagatgtttagtttcctccaagtttaaactcagacttaattgaggcagccatcatcctgcctgatgggagaggagacctgaaaataagccattgtgggtt

SEQ ID NO: 106 - protein, 440 aa, Mus musculus
MKAAVDLKPTLTIIKTEKVDLELFPSPDMECADVPLLTPSSKEMMSQALKATFSGFTKEQQRLGIPKDPRQWTETHVRDWVMWAVNEFSLKGVDFQKFCMSGAALCALGKECFLELAPDFVGDILWEHLEILQKEDVKPYQVNGANPTYPESCYTSDYFISYGIEHAQCVPPSEFSEPSFITESYQTLHPISSEELLSLKYENDYPSVILQDPLQTDTLQTDYFAIKQEVLTPDNMCLGRASRGKLGGQDSFESVESYDSCDRLTQSWSSQSSFNSLQRVPSYDSFDYEDYPAALPNHKPKGTFKDYVRDRADLNKDKPVIPAAALAGYTGSGPIQLWQFLLELLTDKSCQSFISWTGDGWEFKLSDPDEVARRWGKRKNKPKMNYEKLSRGLRYYYDKNIIHKTAGKRYVYRFVCDLQSLLGYTPEELHAMLDVKPDAD

SEQ ID NO: 107 - DNA, 1619 bp, Mus musculus
aagccgactctcaccatcatcaagacagaaaaagtggatctcgagcttttcccttccccggacatggaatgtgcagatgtcccgctgttaactccgagcagcaaagaaatgatgtcccaagccttgaaagctactttcagtggtttcacaaaagaacagcagcgactgggaatccccaaagacccccggcagtggacagaaacccacgtccgggactgggtgatgtgggctgtgaatgagttcagcctgaaaggtgtggacttccagaagttctgtatgagtggagcagcactgtgtgccctgggtaaagaatgcttcctcgagctggctccagactttgttggggatatcctgtgggagcatctagagatcctgcagaaagaggatgtgaaaccatatcaggttaatggagccaaccctacctacccagaatcctgttacacctcggattacttcatcagctacggtatcgagcatgctcagtgtgttcctccctcagagttctcagagcccagcttcatcacagagtcctatcagacgctgcatcctatcagctcggaagaactcctgtccctcaagtatgagaacgactacccttctgtcattctccaggaccctctccagacagacaccttgcagacagactactttgccatcaagcaagaggtgttaactccagacaacatgtgcctggggagagccagtcgtggaagtgggccgatccagctgtggcagtttcttctggaattactcactgataagtcttgtcagtcctttatcagctggacaggagatggctgggaattcaagctttctgacccagatgaggtggccaggagatggggaaagaggaaaaacaaacctaagatgaattatgagaaactgagccgtggccttcgctactattatgacaaaaatatcatccacaagacggcgggcaagcgctacgtataccgctttgtgtgcgacctgcagagcctgctgggatacacccctgaagagctgcacgccatgctggatgtaaagccggatgctgactagtcatggacagacgcgcagaaggaaggggctgggggaaccctgctgagacctttcaaagagcaaccctgttggttggactcttcatttttaattgttattcaatgttttattttccagaactcatttttcacattcaggggtgggagctgagggagcgccgctgtattccattggccattggtgggccggaaagaggaggtcaggacctgcggggtgggcggggcaatagctcctgagcagactttcagaagggagaggtcttctcagaagcctgttggacctggcttgcagaggaaaaaaaaacttaagtgtccgttttttttttttttttttttaaatcaaagaaaaaaaaattcatcttgagttgtggatctactagtgggaggaatgatcacattgagatgaaagagattgatgaaagccagtcagttttgtgggtgggctgaaaacagtttcttcaggggattactaaactcaagaattattaacctttctactttttgaaacaatgatggactttgattgaaggggtccaaaactgtttttatgttgaagtttattttattaaattttgtgcc

SEQ ID NO: 108 - protein, 346 aa, Mus musculus
KPTLTIIKTEKVDLELFPSPDMECADVPLLTPSSKEMMSQALKATFSGFTKEQQRLGIPKDPRQWTETHVRDWVMWAVNEFSLKGVDFQKFCMSGAALCALGKECFLELAPDFVGDILWEHLEILQKEDVKPYQVNGANPTYPESCYTSDYFISYGIEHAQCVPPSEFSEPSFITESYQTLHPISSEELLSLKYENDYPSVILQDPLQTDTLQTDYFAIKQEVLTPDNMCLGRASRGSGPIQLWQFLLELLTDKSCQSFISWTGDGWEFKLSDPDEVARRWGKRKNKPKMNYEKLSRGLRYYYDKNIIHKTAGKRYVYRFVCDLQSLLGYTPEELHAMLDVKPDAD

SEQ ID NO: 109 - DNA, 1064 bp, Mus musculus
gcagtccactgccaccggtcgccagcgatcccgttcccgggtctccgagcagacccagagtgcgctcgccgaggtgttgggacacttgcggacctgaccctggagatcacccgggtttgcccgcctcccatcatccgcgattccctggcccgcgatcctgagcccagggaactcattgggtgggggtagggtcctcggggacccgggccagctcccggggcgacgatggaagagcagcagcgcgcgcgctcgcacacggtcaccaccactaccagctcctttgcggagaacttctccaccaccagcagcagcttcgcttacgaccgagagttcctccgtaccccgccggggctcctgatcgtagccgagatcgtcttgggactgctggtgtggactctcatcgctggcactgagtattttagagtccctgcttttggctgggtaatgtttgtggctgtcttctactgggtcctcaccgtcttcttcctcattgtctacatcaccctgacttacaccaggattccccaggtgccctggaccacagtgggcctgtgctttaatggcagtgccttcgtcttgtacttctcagctgccatagtggacgcatcttctgtctccccagagaaggaagggcacaacttcaacagctgggcagcctcctcgttctttgccttcctggtcaccatctgctatgctggaaacacgtacttcagtttcatagcctggagatcgaggacggcacagtgactctccctcctcagataacagagaagacgacacaccagaacgaatcccactgttattaaaagaaagaaagaaagaaagaaagaaagaaagaaagaaaggaagaaagaaaaacagttgtagctataatgtatattgccccagaattgtatttaactaatgtttttatatcttagttaaattagctcccagtgtcttgttacaattgagctggatatttacttggggagtgctgcggcttctaatgaaccctgaagtctcctgatgtccttctagcctttatttttcttacacaatgtataaataaattgctaaatgtt

SEQ ID NO: 110 - protein, 173 aa, Mus musculus
MEEQQRARSHTVTTTTSSFAENFSTTSSSFAYDREFLRTPPGLLIVAEIVLGLLVWTLIAGTEYFRVPAFGWVMFVAVFYWVLTVFFLIVYITLTYTRIPQVPWTTVGLCFNGSAFVLYFSAAIVDASSVSPEKEGHNFNSWAASSFFAFLVTICYAGNTYFSFIAWRSRTAQ

SEQ ID NO: 111 - DNA, 806 bp, Mus musculus
gccctgggctgctgctgccgccggatgcctcggctcccaccatggctgaaaccaccaagctccagctctttgtgaaggccagtgaggatggcgagagcgtaggacactgcccttcctgtcagcggctcttcatggtcctactcctcaagggtgtgcccttcacactcaccacagtggacactcgaagggcattggatgtgctgaaggacttcgcaccaggctcacagctgcccatcctgctgtacgatggggatgtcaagacagacacactgcagatcgaggagtttctggaggagacgttggggccacctgacttccctagcctggcacccaggtacagggagtccaacacagcgggcaatgacatcttccacaagttctctgccttcatcaagaacccagtgcctacacaggacaatgccctgtatcagcagctgctccgggccctgaccaggctggacagctacctgcgtgcaccactggaccacgaactggcacaggagccacatcttcgtgagtcccaccgccgctttctcgatggtgaccagttcacgttggctgactgcagtctactacccaagctgcacattgtggataccgtgtgtgcacacttccgccagctgcccatccccgcggaactgtcctgcgttcgtcgctacttggacagtgcgttgcagaagaaggagttcaagtatacgtgtccacacagcgcagagatcctggctgcctaccagcctgctgtgcacccccgttagccccactacttccatacactcatctgcagccccataaagcatctctgcccc

SEQ ID NO: 112 - protein, 237 aa, Mus musculus
MAETTKLQLFVKASEDGESVGHCPSCQRLFMVLLLKGVPFTLTTVDTRRALDVLKDFAPGSQLPILLYDGDVKTDTLQIEEFLEETLGPPDFPSLAPRYRESNTAGNDIFHKFSAFIKNPVPTQDNALYQQLLRALTRLDSYLRAPLDHELAQEPHLRESHRRFLDGDQFTLADCSLLPKLHIVDTVCAHFRQLPIPAELSCVRRYLDSALQKKEFKYTCPHSAEILAAYQPAVHPR

SEQ ID NO: 113 - DNA, 3446 bp, Mus musculus
gccgcagcctctgaagcggggctgggaccggggggcgccgagtttgattagtttaggggggccgtcccccgccggccgccgcaccccaggcagcggcgtctctgcgtgtcggcgcgtcccggaggcttcaccgccgcgcctcggcggtgctgcgaggaaagttggcgtgtaaggggcgacgggcgtgtgaggggtggcgggcgcggccatggagccccgcggcgccgagtacttctgcgcccaagtgctgcagaaggacgtgagcggccggctgcaggcgggcgaggagctgctgctctgcctcggcacgcccggagccatcccggacctggaggacgatccgagccgcctggctaagaccgtggacgcgctcacccgctgggtgggctcgagcaactaccgggtatcgttgttaggattggagattttaagtgcctttgtggatagattgtcaacacgattcaaatcttatgtaacaatggttaccacagctttaatagacagaatgggagatgtcaaagacaaagttcgagaagaagctcagaacctgacactgaagctgatggatgaggtggcgccgcctatgtacatctgggagcagctagcttctggcttcaagcacaagaactttcgatctcgagaaggcgtgtgcctgtgtcttattgagaccttgaacatctttgggactcaaccactggtcatcagcaagttggtgccgcatttatgtgtcttatttggagactctaacagtcaggtgagaaatgctgcactatcagctgtagtggagatttatagacacgtaggagagaagctgaggattgatttgtgtaaaagagacattccccctgctagattagaaatggtacttgccaaatttgatgaagttcagaattctggcggtatgattttgagcgtctgcaaagataaaagctttgatgatgaggaatcagtggatggaaataggccgtcgtcagctgcttcagccttcaaggttcctgcacctaaaacacctgggaatcctgtcagcagtgcaagaaagcctggctcagcaggtggccctaaggttggaggtccttctaaagaaggaggggctggagcagttgatgaagatgactttataaaagcttttacagatgttccttctgttcagatctattctagtcgagaacttgaagagacgttaaataagatcagggaaattttgtcagatgacaaacatgactgggaccagcgtgccaatgcgcttaagaaaatcagatcactgcttgttgctggagccgcacagtatgattgctttttccagcacctacagttgttgaaggagctgtctaatcataatgaacgtatagaagaaagaaaaattgccctgtatgaactcatgaagctaacccaggaagaatctttcagtgtttgggatgaacacttcaaaacaatattattgttattgcttgagacccttggggataaagagcctacaatccgggccttggcattaaaagttttaaaagaaatcttaaggcatcaaccagcaagattcaaaaactatgcagaactaactgtcatgaaaacactggaagcacataaagatcctcacaaagaggtggtgagatctgctgaggaagctgcctccgtattggctacttccattagtccagagcagtgcatcaaagtgctttgtcccatcatacaaaccgctgactaccctattaatctggctgcaatcaaaatgcaaacaaaagtgatagagagagtatccaaggagacccttaacatgctcttaccagagatcatgccgggtctaatacagggttatgataattcagaaagcagtgtccggaaagcttgtgtcttctgcctggtggctgtccatgcagtgattggtgatgaactaaagccacatctcagtcaactcactggtagtaaaatgaagctgctgaacctttacatcaagcgtgcacagacgggctctgcaggcgcggaccccactgctgatgtttctggacagagttagtgctgccgacggcgcctcccagtctctgagaggacaactggctgccctcctcaaggaaaggacactcaagtacagctttgggactcagctgcggtttcccaggtctagcttttcgttttgttctgttttgtattttctgtaacagaggggtgtcctcagtctgcatgtaactttatgatagttattccaagttcaggagaagcagtattaacatcagttgatcagtacaaagtaattttttaatctaattcaccatttcacatgtttgtacttctttgtcttcccattaacctttgccagtgttatgattgtatacatttttaaaaatgctggttaaacaggaatgcttaaagctttaaaagttttaacagtctaaactttgttttgccttcattcaactgcagaagaatatttttattgttacttttgttctgtatcatgtcctatgctagaaatactgacaataatgtgagacaaagcagggctacgtggcactccagccagactctgtggatgtgcgctgatgctcgtcatcagcagcaactcctttgggatgacctcaatgagaaatgtcatggaaccagccagttctgtaagactgacgatagtgtctgtcggttcttgatcttgccacctttatttaaagccgtgtcccttcttttaccccgtaagaaagctgcaccagatcacctgcctaggtttccatgagaattattgacatgggagtcaaccagcacctttttgttgaatggtggaacctggtttcctttgaccatgaaattgtcttctggaaacatgggtcctgatgagagagaagatgctgcaagaggcttctgtccattgggctctcactctacctctcagggctgacattttaactgacccgcttcctggagtgtcttgtcttggaaaactacttcaaaggagatgttttgttaccttttaacatttttttaaatcacctctgctaaagttattttcgtgtgcagccaactttcaaatattaccagtttgggtgaaaggccaaatttggtgatttggaaccaggatactattgatttctcatcttgacttttttttttttttttttttttttttaaatcctaacataagatgaatttgactggaaagcaaatggctgttagggaagcagtttgctattgttacagagttacctatactttgttcagctggaaaaatgtagaaatgtatgtaaagaaagtaagccgagaaaactggatggatgattggtcataggctttttctttcctttgtttttccgttttagcagcaagaagagatattactccacaccctctccctactgtaacagttttgttttctactgttaatgacattgtgtatttatagctctatgcttactgttgtgcatatactggcaataaaactgtacataacattacttgaagacctt

SEQ ID NO: 114 - protein, 600 aa, Mus musculus
MEPRGAEYFCAQVLQKDVSGRLQAGEELLLCLGTPGAIPDLEDDPSRLAKTVDALTRWVGSSNYRVSLLGLEILSAFVDRLSTRFKSYVTMVTTALIDRMGDVKDKVREEAQNLTLKLMDEVAPPMYIWEQLASGFKHKNFRSREGVCLCLIETLNIFGTQPLVISKLVPHLCVLFGDSNSQVRNAALSAVVEIYRHVGEKLRIDLCKRDIPPARLEMVLAKFDEVQNSGGMILSVCKDKSFDDEESVDGNRPSSAASAFKVPAPKTPGNPVSSARKPGSAGGPKVGGPSKEGGAGAVDEDDFIKAFTDVPSVQIYSSRELEETLNKIREILSDDKHDWDQRANALKKIRSLLVAGAAQYDCFFQHLQLLKELSNHNERIEERKIALYELMKLTQEESFSVWDEHFKTILLLLLETLGDKEPTIRALALKVLKEILRHQPARFKNYAELTVMKTLEAHKDPHKEVVRSAEEAASVLATSISPEQCIKVLCPIIQTADYPINLAAIKMQTKVIERVSKETLNMLLPEIMPGLIQGYDNSESSVRKACVFCLVAVHAVIGDELKPHLSQLTGSKMKLLNLYIKRAQTGSAGADPTADVSGQS

SEQ ID NO: 115 - DNA, 1933 bp, Mus musculus
gagtttgattagtttaggggggccgtcccccgccggccgccgcaccccaggcagcggcgtctctgcgtgtcggcgcgtcccggaggcttcaccgccgcgcctcggcggtgctgcgaggaaagttggcgtgtaaggggcgacgggcgtgtgaggggtggcgggcgcggccatggagccccgcggcgccgagtacttctgcgcccaagtgctgcagaaggacgtgagcggccggctgcaggcgggcgaggagctgctgctctgcctcggcacgcccggagccatcccggacctggaggacgatccgagccgcctggctaagaccgtggacgcgctcacccgctgggtgggctcgagcaactaccgggtatcgttgttaggattggagattttaagtgcctttgtggatagattgtcaacacgattcaaatcttatgtaacaatggttaccacagctttaatagacagaatgggagatgtcaaagacaaagttcgagaagaagctcagaacctgacactgaagctgatggatgaggtggcgccgcctatgtacatctgggagcagctagcttctggcttcaagcacaagaactttcgatctcgagaaggcgtgtgcctgtgtcttattgagaccttgaacatctttgggactcaaccactggtcatcagcaagttggtgccgcatttatgtgtcttatttggagactctaacagtcaggtgagaaatgctgcactatcagctgtagtggagatttatagacacgtaggagagaagctgaggattgatttgtgtaaaagagacattccccctgctagattagaaatggtacttgccaaatttgatgaagttcagaattctggcggtatgattttgagcgtctgcaaagataaaagctttgatgatgaggaatcagtggatggaaataggccgtcgtcagctgcttcagccttcaaggttcctgcacctaaaacacctgggaatcctgtcagcagtgcaagaaagcctggctcagcaggtggccctaaggttggaggtccttctaaagaaggaggggctggagcagttgatgaagatgactttataaaagcttttacagatgttccttctgttcagatctattctagtcgagaacttgaagagacgttaaataagatcagggaaattttgtcagatgacaaacatgactgggaccagcgtgccaatgcgtgcatgtcctgcagcctggtagccagtgaggttgagagagctctggcctggcctctgtggagtcacctagctacttatcagcaccattgtcattgcaccctgagtcatgaggacttgccagagaagagattgacttctcctgtgagctcggcatttgttcaacattgacataattttgatgcagggtgtctattcatctgactcttaaatatagtaaatgtggttgacttatttacatttttggtcatccttgagctaggaatggtttatttgcagtacatttcttgaggaaagtattagatgaatgttaaaataatgtttgtgttgacatcagatctatattgtatttcacattctgtgataccaattttgtcagatgacagtgagtgcctcagtatccccaaggccgggaaagggctgatttgaagatgcctgtgctctgaaagcctctagtctggctaatagatattcctgacaaatagttctcttttaatattatgcattacagatggttttccatctatatgtttagaagtctgtatttttgaatgtttaacatattgttcttaacacagaaaatagtgctctgaatttgtttaaatatgattttgtatttacttttaaagttgtacatcacatataagtcacaatttaaaaaataaaacaactttttcattgatgacttacggagaaacatcacagattaaaataaaagacgaacttgaacct

SEQ ID NO: 116 - protein, 400 aa, Mus musculus
MEPRGAEYFCAQVLQKDVSGRLQAGEELLLCLGTPGAIPDLEDDPSRLAKTVDALTRWVGSSNYRVSLLGLEILSAFVDRLSTRFKSYVTMVTTALIDRMGDVKDKVREEAQNLTLKLMDEVAPPMYIWEQLASGFKHKNFRSREGVCLCLIETLNIFGTQPLVISKLVPHLCVLFGDSNSQVRNAALSAVVEIYRHVGEKLRIDLCKRDIPPARLEMVLAKFDEVQNSGGMILSVCKDKSFDDEESVDGNRPSSAASAFKVPAPKTPGNPVSSARKPGSAGGPKVGGPSKEGGAGAVDEDDFIKAFTDVPSVQIYSSRELEETLNKIREILSDDKHDWDQRANACMSCSLVASEVERALAWPLWSHLATYQHHCHCTLSHEDLPEKRLTSPVSSAFVQH

SEQ ID NO: 117 - DNA, 4339 bp, Mus musculus
gaaagaaaaatgccggcacaaacctcagtggtggttctgtggttgtttctatctgtttctgatagaatctttgattagtatcaaatttactgtatttggccatgtgaactattaggagctattctagggtgagggaaattcggaggaatgaggcggctgatttgcaaacggatctgtgattataaaagctttgatgatgaggaatcagtggatggaaataggccgtcgtcagctgcttcagccttcaaggttcctgcacctaaaacacctgggaatcctgtcagcagtgcaagaaagcctggctcagcaggtggccctaaggttggaggtccttctaaagaaggaggggctggagcagttgatgaagatgactttataaaagcttttacagatgttccttctgttcagatctattctagtcgagaacttgaagagacgttaaataagatcagggaaattttgtcagatgacaaacatgactgggaccagcgtgccaatgcgcttaagaaaatcagatcactgcttgttgctggagccgcacagtatgattgctttttccagcacctacgtttgttggatggagcgcttaagctgtcagctaaggacctcagatcccaggtggtcagggaagcttgcatcactgttgctcacctttcaacagtcttgggaaacaaatttgatcacggcgctgaagccatcgtccctacgctttttaatcttgtccccaatagtgccaaagtcatggcgacctctggatgtgcagcaatcagatttattattcggcatacccatgtacctagacttattcctttaataacaagcaactgcacatcaaagtcagttcctgtaaggagacgttcatttgaatttttagatttgctgctgcaagaatggcagactcattcactggaaagacatgcagctgttttggttgaaacgattaagaagggcattcatgatgctgatgctgaggccagagtggaggcaaggaagacatacatgggccttaggaaccactttcctggtgaagctgaaacattgtacaactcccttgagccatcatatcagaaaagtcttcaaacttacttaaagagttctggaagtgtagcttctcttccgcagtcagacaggtcctcatccagctcacaagaaagtctcaatcgtcctttttcttctaaatggtcaacagcaaatccttcaactgtagctggaagagtatctgtgggaggcagcaaagccaacccccttccaggaagcctgcagcgttctcgaagtgacattgatgtgaatgcggcagctggtgccaaggctcatcatgctgctgggcaggcggtgcgaagtgggcgcttaggtgcaggtgccctgaacccaggctcctatgcatcactagaggatacttctgacaagatggatggtcgggtgagagccaagctttctacaccgcttgttgctgtgggaaatgccaagaccgactctagagggagaagccggacaaaaatggtgtctcagtcccagcctggcagccgatctgggtctccaggaagagttctaaccacaacagccctctctactgtgagctctggtgctcaacgagtcctggtcaattcagcttcagcacagaagagaagcaagatcccaaggagccagggctgcagcagagaggccagcccatctcggctctcagtggcccggagcagccgtattcctcggccgagtgtgagtcaaggctgtagccgggaagccagcagagagagcagcagggacacgagtccggtgcgctccttccagccgctgggtccgggatatgggatcagccagtccagccggttgtcgtcctctgtcagtgccatgcgagtcctaaacacaggctccgatgtggaggaggcagtagctgatgccctgaaaaaacctgctcgaagaaggtatgaatcatatggaatgcactcagatgatgatgccaacagcgatgcctctagtgcgtgttcagaacgctcctatagctctcgaaatggtagtattcctacctacatgagacagacagaagacgtggcagaagtcctcaacagatgtgctagctccaattggtcagagaggaaagaaggcctcttgggtctgcagaacttgttaaaaaaccagagaacgctaagtcgagttgaactgaaaagattatgtgaaattttcacaagaatgtttgcagatcctcatggcaaggtgttcagcatgttcttggagactctagtagatttcatacaagtccacaaagatgatcttcaagattggttgtttgttctgctgacacagctgctgaaaaaaatgggtgctgatttgcttggctctgttcaggcaaaagttcagaaagcccttgatattacaagagagtcttttccaaatgatcttcagtttaatatcctaatgagatttacagttgaccagacccaaacgccaagcttgaaggtaaaggtggctatccttaagtacatagaaactctggcaaagcagatggacccaagagattttacaaattccagtgaaactcgcctggcagtgtctcgggtcatcacttggacgacagagcccaaaagctctgatgttcggaaggcagcgcagtcagtgctgatttctttatttgaactcaataccccagagtttacaatgttactaggagctttaccaaaaactttccaggatggtgctactaaacttcttcacaatcacctccggaacactggcaatggcacccagagttccatggggagtcctttgacgagaccaacacctcggtcaccagccaactggtccagtcctcttacttctcctaccaacacgtctcagaatacgttatctccaagtgcatttgattacgatacagagaacatgaattctgaagacatttatagctcccttagaggcgtcactgaggcaatccagaatttcagcttcagaagccaagaagatatgagtgagccagtgaggagggaccctaaaaaggaggatggtgacacaatatgtagtggtcctgggatgtcagatccaagagcaggaggtgatgctgctgacggcagccagccagctctggataataaagcatcgttgctccactcaatgccactccactcctctccacgctcccgtgactataacccatataactactcagatagcatcagtcctttcaacaagtctgccctcaaggaagccatgtttgatgatgacgccgaccaatttcctgatgatctttccttagaccattctgacctagttgcagagttgttgaaggagctgtctaatcataatgaacgtatagaagaaagaaaaattgccctgtatgaactcatgaagctaacccaggaagaatctttcagtgtttgggatgaacacttcaaaacaatattattgttattgcttgagacccttggggataaagagcctacaatccgggccttggcattaaaagttttaaaagaaatcttaaggcatcaaccagcaagattcaaaaactatgcagaactaactgtcatgaaaacactggaagcacataaagatcctcacaaagaggtggtgagatctgctgaggaagctgcctccgtattggctacttccattagtccagagcagtgcatcaaagtgctttgtcccatcatacaaaccgctgactaccctattaatctggctgcaatcaaaatgcaaacaaaagtgatagagagagtatccaaggagacccttaacatgctcttaccagagatcatgccgggtctaatacagggttatgataattcagaaagcagtgtccggaaagcttgtgtcttctgcctggtggctgtccatgcagtgattggtgatgaactaaagccacatctcagtcaactcactggtagtaaaatgaagctgctgaacctttacatcaagcgtgcacagacgggctctgcaggcgcggaccccactgctgatgtttctggacagagttagtgctgccgacggcgcctcccagtctctgagaggacaactggctgccctcctcaaggaaaggacactcaagtacagctttgggactcagctgcggtttcccaggtctagcttttcgttttgttctgttttgtattttctgtaacagaggggtgtcctcagtctgcatgtaactttatgatagttattccaagttcaggagaagcagtattaacatcagttgatcagtacaaagtaattttttaatctaattcaccatttcacatgtttgtacttctttgtcttcccattaacctttgccagtgttatgattgtatacatttttaaaaatgctggttaaacaggaatgcttaaagctttaaaagttttaacagtc

SEQ ID NO: 118 - protein, 1272 aa, Mus musculus
MRRLICKRICDYKSFDDEESVDGNRPSSAASAFKVPAPKTPGNPVSSARKPGSAGGPKVGGPSKEGGAGAVDEDDFIKAFTDVPSVQIYSSRELEETLNKIREILSDDKHDWDQRANALKKIRSLLVAGAAQYDCFFQHLRLLDGALKLSAKDLRSQVVREACITVAHLSTVLGNKFDHGAEAIVPTLFNLVPNSAKVMATSGCAAIRFIIRHTHVPRLIPLITSNCTSKSVPVRRRSFEFLDLLLQEWQTHSLERHAAVLVETIKKGIHDADAEARVEARKTYMGLRNHFPGEAETLYNSLEPSYQKSLQTYLKSSGSVASLPQSDRSSSSSQESLNRPFSSKWSTANPSTVAGRVSVGGSKANPLPGSLQRSRSDIDVNAAAGAKAHHAAGQAVRSGRLGAGALNPGSYASLEDTSDKMDGRVRAKLSTPLVAVGNAKTDSRGRSRTKMVSQSQPGSRSGSPGRVLTTTALSTVSSGAQRVLVNSASAQKRSKIPRSQGCSREASPSRLSVARSSRIPRPSVSQGCSREASRESSRDTSPVRSFQPLGPGYGISQSSRLSSSVSAMRVLNTGSDVEEAVADALKKPARRRYESYGMHSDDDANSDASSACSERSYSSRNGSIPTYMRQTEDVAEVLNRCASSNWSERKEGLLGLQNLLKNQRTLSRVELKRLCEIFTRMFADPHGKVFSMFLETLVDFIQVHKDDLQDWLFVLLTQLLKKMGADLLGSVQAKVQKALDITRESFPNDLQFNILMRFTVDQTQTPSLKVKVAILKYIETLAKQMDPRDFTNSSETRLAVSRVITWTTEPKSSDVRKAAQSVLISLFELNTPEFTMLLGALPKTFQDGATKLLHNHLRNTGNGTQSSMGSPLTRPTPRSPANWSSPLTSPTNTSQNTLSPSAFDYDTENMNSEDIYSSLRGVTEAIQNFSFRSQEDMSEPVRRDPKKEDGDTICSGPGMSDPRAGGDAADGSQPALDNKASLLHSMPLHSSPRSRDYNPYNYSDSISPFNKSALKEAMFDDDADQFPDDLSLDHSDLVAELLKELSNHNERIEERKIALYELMKLTQEESFSVWDEHFKTILLLLLETLGDKEPTIRALALKVLKEILRHQPARFKNYAELTVMKTLEAHKDPHKEVVRSAEEAASVLATSISPEQCIKVLCPIIQTADYPINLAAIKMQTKVIERVSKETLNMLLPEIMPGLIQGYDNSESSVRKACVFCLVAVHAVIGDELKPHLSQLTGSKMKLLNLYIKRAQTGSAGADPTADVSGQS

SEQ ID NO: 119 - DNA, 1268 bp, Mus musculus
aggaaaggcttgggagccgctgccggaggtgacggagcggccgccccgccccgtgcgctgggagacgaggcttccagctccagaaatcttgaggccagagccccgcacctcggcgcagccatgagtgcggaggtgaaggtgacagggcagaaccaagagcagtttctgctccttgccaagtcggctaagggggcggcactggccacactcatccaccaggtgctggaggcccctggtgtctacgtgtttggggaactgctggatatgcctaatgttagagagctggcagaaagcgactttgcctccaccttccggctgctcacagtgtttgcctatgggacctatgcggactacttagctgaagccaggaatctccccccactgactgacgcacagaagaataagcttcgacatctgtcagttgtcactctggctgccaaagtcaagtgtatcccatatgcagtgttgctggaggcccttgcccttcgaaacgtgcgccagctggaagaccttgtgatcgaggctgtgtatgctgatgtccttcgtggctctctggaccagcgcaatcagcggctagaggttgattacagcatcgggcgggacatccagcgccaggacctcagtgccatcgcccagaccctgcaagagtggtgcgtgggctgtgaggttgtgttgtcgggcatcgaagagcaggtcagccgtgccaaccagcacaaggagcagcagctgggcctgaagcagcagatcgaaagtgaggttgccaaccttaagaaaaccattaaagttacgacagcagctgctgctgcagccacctcccaggatcctgagcaacacctgacagagctgagagaaccagcttctggcaccaaccagcgccagcccagcaagaaagcctccaagggcaagggggagaagattaatccccagtccactgtaaagccaagtgccaagtgaaaagaaccagacactttgcagactctgggcctagcagctaggaggcctagaccctggacagattgctccatccctcagcccatggtcagcagtcacgggcacctgctgaacaccgccatgtcctaacaatggagatgcagacaccatcactgactgtcctgcccaaggacctgcagtgtggtctgcttcctgtcacctcagagaatcacaagggaggtgttggtagtgaacttgacttttgacattgaaagcacataaaacgattagatttgttggtctctgtcccttttgtccaaattaaaagagtttccaag

SEQ ID NO: 120 - protein, 277 aa, Mus musculus
MSAEVKVTGQNQEQFLLLAKSAKGAALATLIHQVLEAPGVYVFGELLDMPNVRELAESDFASTFRLLTVFAYGTYADYLAEARNLPPLTDAQKNKLRHLSVVTLAAKVKCIPYAVLLEALALRNVRQLEDLVIEAVYADVLRGSLDQRNQRLEVDYSIGRDIQRQDLSAIAQTLQEWCVGCEVVLSGIEEQVSRANQHKEQQLGLKQQIESEVANLKKTIKVTTAAAAAATSQDPEQHLTELREPASGTNQRQPSKKASKGKGEKINPQSTVKPSAK

SEQ ID NO: 121 - DNA, 1728 bp, Mus musculus
ctggccttgggcgcagaccccggccggtcccggggctgcctctttaagggagggggtggagccgcgagtcaggcgcgaggagctccagaaatcttgaggccagagccccgcacctcggcgcagccatgagtgcggaggtgaaggtgacagggcagaaccaagagcagtttctgctccttgccaagtcggctaagggggcggcactggccacactcatccaccaggtgctggaggcccctggtgtctacgtgtttggggaactgctggatatgcctaatgttagagagctggcagaaagcgactttgcctccaccttccggctgctcacagtgtttgcctatgggacctatgcggactacttagctgaagccaggaatctccccccactgactgacgcacagaagaataagcttcgacatctgtcagttgtcactctggctgccaaagtcaagtgtatcccatatgcagtgttgctggaggcccttgcccttcgaaacgtgcgccagctggaagaccttgtgatcgaggctgtgtatgctgatgtccttcgtggctctctggaccagcgcaatcagcggctagaggttgattacagcatcgggcgggacatccagcgccaggacctcagtgccatcgcccagaccctgcaagagtggtgcgtgggctgtgaggttgtgttgtcgggcatcgaagagcaggtcagccgtgccaaccagcacaaggagcagcagctgggcctgaagcagcagatcgaaagtgaggttgccaaccttaagaaaaccattaaagttacgacagcagctgctgctgcagccacctcccaggatcctgagcaacacctgacagagctgagagaaccagcttctggcaccaaccagcgccagcccagcaagaaagcctccaagggcaagggactccgagggagcgccaagatttggtccaagtcgaactgaaaggacttgtttcttccctgggaatgtggggtcccagctgcctacctgcctaccccttaggagtcctcagagccttcctgtgcccctggccagctgataatgctagttcattacttttcatctcctccacccccaagcataagccacaccctctgtagggaggaggccagtgcaggtcatgttctgttggtacctcttatgtgttccatgctcttccccagcacgcttgctctcatcgtttttccgcactgtgtctgcccattacccctgtcattgagcaggttggcagtcctatggagggtgctggctcttaaccacccacacctacccctgcatgcctaatctgcagttcctcctcctccccttgcctagtgggctgcatctgaaaagccatggggaagggggtctccaccttcattccagccttagagttctggagccagtctgctaccctgggagtcgctggacattttcctcccagaaccccatcacactacaattgtttctttcctctctcatctccttgggcctggggatactgctgcttcagtgaccccagagcctgagaacagctatttttgagatgttaagaaatggttctttgttgctcatcatcttaggaagcccaatggaaatcctggaaggatttatatctcctcctgtggttctggtggggaaggaaatatagattgtatattaaaaataaaaaatatatatgaataggtctatatatattgacacatgacacagaaataaatctatgagaaatctatgt

SEQ ID NO: 122 - protein, 275 aa, Mus musculus
MSAEVKVTGQNQEQFLLLAKSAKGAALATLIHQVLEAPGVYVFGELLDMPNVRELAESDFASTFRLLTVFAYGTYADYLAEARNLPPLTDAQKNKLRHLSVVTLAAKVKCIPYAVLLEALALRNVRQLEDLVIEAVYADVLRGSLDQRNQRLEVDYSIGRDIQRQDLSAIAQTLQEWCVGCEVVLSGIEEQVSRANQHKEQQLGLKQQIESEVANLKKTIKVTTAAAAAATSQDPEQHLTELREPASGTNQRQPSKKASKGKGLRGSAKIWSKSN

SEQ ID NO: 123 - DNA, 3309 bp, Mus musculus
gcctccaccctcaccccttcccgtcggtgcggagctccgctccgagcagcgctcagcccgccgcagcttggatgtgggctcgggacaagtgctccgttcctcagctcgagatggacagccgctacaccagcgccacgggcatcggggacttgaaccagctgagtgcggccatccccgccacacgagtggaggtgtcagtgtcctgcagaaatctccttgatagagatacattttctaagtcggatccaatttgtgtcctatatacacaagcagttgggaataaagaatggagagagtttggaagaactgaagtgatcgataatactttgaatcctgattttgtaagaaagtttatcctggattatttctttgaagaaagagagaatcttcgttttgacttatatgatgttgattctaagagtcccaacttgtccaaacatgactttctgggacaagtgttttgtacattgggggagattgttggttcacagggaagtcgcctggaaaagccaatagtaggaattccaggcaggaaatgtgggacaatcatactgacggcagaggagctaaactgctgcagggatgctgtcttgatgcagttctgtgcaaacaaattggataagaaggatttctttgggaagtcagatcctttcctggtattttatcgaagcaatgaggatggaagctttacaatttgccacaagacagaagtggtcaaaaacactctaaatcctgtgtggcaagcgttcaagatctcagtgcgagcattgtgcaatggggactatgacagaacaatcaaggtagaagtgtacgactgggaccgagacgggagtcatgatttcattggagaattcacaacaagctatcgggagctcgcaagagggcagtcacaattcaacgtctatgaggtggtgaatcccaaaaagaaaggaaaaaagaaaaaatacaccaattcaggaacagtaaccttattgtccttcttggtggaaacagaagtctccttcctggactatattaaaggaggaacgcagatcaacttcacggtggccattgattttacagcatcaaatggaaaccctgcccagccaacttctctccactatatgaacccttaccaactgaatgcctatggaatggcactgaaggctgtaggagaaatcgttcaagattatgacagtgataagatgttcccagccctgggttttggtgcaaagctgcctccagatggaaggatatctcacgagtttgccctgaatggcaaccctcagaatccttactgtgatggcattgaaggtgtcatggaagcttactatagaagtctgaagtctgtccagttgtatgggccaaccaactttgctcccgtaataaaccacgtagcaagatacgcatcctctgtaaaagatggctcccagtactttgtgcttctcattgtgacggacggcgtcatctcagatatggctcaaactaaagaatccatagttaatgcctcaaagcttcccatgtcaataataatagtaggtgtgggacctgcagaatttgatgcaatggttgaattggatggagatgatgtaagagtttcctccagagggaaatatgctgaaagagatattgtacagtttgtgccgttcagggattatattgacagaagtggaaaccacatactcagcatggcgagactggccaaagatgtcttagctgagatcccagagcagttcctttcctacatgagagccagaggaatcaagccatcaccggcgcccccgccgtacacccctcctacacacgtgctgcagacgcaaatatgaccacgcccagatgctgatgtccctcacacgccagtcggaactgcgaagcctgtgctttgatcctggtgctctgctttgaaccagggaatgagacactttctcagtttggtttcagcagtcctggaaaatgtgctttcttggatccaaattacattctcttcctaaaccaaaactgtaaatagggttgttgcatgagcaaccgggaaattgtttaagatgcttgaagcaaagtagagatgtcttctctaatttttgaatatttttgtttttttgttcatgacggaatagtaaatttccaatgtattattgggaaaaagcacaagctacatttttaacacaaatgttgtccttgactgctacatatataggccggcagtctctgtgtcgatgtttacacgttactactttttaaatttcaatacttttataactgttcttaagagtaagttttaaatattgaatcctttgtcttctaaattgcaatagctataatcacaggagcaatatctctttgaatgactgtctggacattcatggtatgaataagggaagagaaggaggtagaatctacttagtgattaatatccattttggtcaaccgtgggagtttcaacttataaacagatgtggccctgtaatatgcatttttttcatggactttgggtttaaatttagactgcagtcaatttatctttcaaatgccaactagaagcaatgaacaggcaaacatcgtgaactgttaatgcacagaatatactttgtataaaaaccaccatccttataacactatgatttagtgtgtaaaaacaagactatataactccaaaccatgtagcaggtgtattgaactttgtattcagttatatcctgtctagatattttgattcaaagggatactggctctcttgctttggaatttatattctcacccttccatcttgccttcacgggttgcacaggctggagtctcttgtgagttctcagttccacgtacacacaaccctgtgacttagcacacaacacgtttgtgaaataaactcattcctgtgccccaacctgcctgtttgtgaaataacccatccctctaccctgacctgcctgctcacaaccaattctaaatagttttcaatgtacagtttttatacgaattacagttttgtgaagttacgtctacatttctttagaacaaatggccttaaattctcacagaattcctggaaatgattgtgaattgccttcaaaatacagaaatgtgtatttgtttgttgttcttttttgtgtcaacagtgtgactgctttctaacctctctgcctccccctctttgctacttggattcttcctattgtgtgtgctcttgccacaacttggatctatggtgacttttataagcatgaagctgttttactggagaatatgcataatcctcatagctaacagagtcacagttacataactgtgacgtgaattgtccatttttaagtacctattaaaacatttaaaagg

SEQ ID NO: 124 - protein, 577 aa, Mus musculus
MWARDKCSVPQLEMDSRYTSATGIGDLNQLSAAIPATRVEVSVSCRNLLDRDTFSKSDPICVLYTQAVGNKEWREFGRTEVIDNTLNPDFVRKFILDYFFEERENLRFDLYDVDSKSPNLSKHDFLGQVFCTLGEIVGSQGSRLEKPIVGIPGRKCGTIILTAEELNCCRDAVLMQFCANKLDKKDFFGKSDPFLVFYRSNEDGSFTICHKTEVVKNTLNPVWQAFKISVRALCNGDYDRTIKVEVYDWDRDGSHDFIGEFTTSYRELARGQSQFNVYEVVNPKKKGKKKKYTNSGTVTLLSFLVETEVSFLDYIKGGTQINFTVAIDFTASNGNPAQPTSLHYMNPYQLNAYGMALKAVGEIVQDYDSDKMFPALGFGAKLPPDGRISHEFALNGNPQNPYCDGIEGVMEAYYRSLKSVQLYGPTNFAPVINHVARYASSVKDGSQYFVLLIVTDGVISDMAQTKESIVNASKLPMSIIIVGVGPAEFDAMVELDGDDVRVSSRGKYAERDIVQFVPFRDYIDRSGNHILSMARLAKDVLAEIPEQFLSYMRARGIKPSPAPPPYTPPTHVLQTQI

SEQ ID NO: 125 - DNA, 399 bp, Mus musculus
gcctccttcctctgcctccaccctcaccccttcccgtcggtgcggagctccgctccgagcagcgctcagcccgccgcagcttggatgtgggctcgggacaagtgctccgttcctcagctcgagatggacagccgctacaccagcgccacgggcatcggggacttgaaccagctgagtgcggccatccccgccacacgagtggaggtgtcagtgtcctgcagaaatctccttgatagagatacattttctaagtcggatccaatttgtgtcctatatacacaagcagttgggaataaagaatggagagaggaggctgctcccctggaagagccattacatcgttgggagaacagcacacagtattacctcgtcagagccctccactcagccctgctgtag

SEQ ID NO: 126 - protein, 104 aa, Mus musculus
MWARDKCSVPQLEMDSRYTSATGIGDLNQLSAAIPATRVEVSVSCRNLLDRDTFSKSDPICVLYTQAVGNKEWREEAAPLEEPLHRWENSTQYYLVRALHSALL

SEQ ID NO: 127 - DNA, 2975 bp, Mus musculus
ctacggtcccctggagctccagaccctcacaggaaggagaaggctgcagcaatgccagactccccggctgaagtgaagacgcagccccggtccacaccccccagcatgccgcccccacctcccacctcatcccagggagccacacgaccaccctccttcacacctcacacactgatgaacggcagcagccactcacccacggccatccacggtgccccatctacacccaatggcttcagcaacggcccagccacctcatccacggcctcgctctccacacagcacctgcccccggcgtgcggggcacggcagctcagcaagcttaagcgtttcctcaccaccctacagcagtttggcagtgacatctcacctgagatcggggagcgcgtgcgcacactggtgctgggcctggtgaactcaactctgacgatcgaagagtttcatgccaagctccaggaagccaccaactttccactgaggccgtttgttatcccttttctgaaggctaatcttccactgctgcagcgtgagctcctgcactgtgcccgcctggccaaacagacacctgcccagtacctggcccagcacgaacagctgctgctggacgccagcgccacctcccctgtcgactcgtctgagctcctgctggaagtcaacgagaacggcaaaaggagaacacctgacaggaccaaagagaatggatcagaccgggaccctctgcaccccgaccacctcagtaagcggtcctgcaccctgagccccgcccagcgctgcagccccagcaatgggctgccccacccgacgccacccccacccccgcactatcgcctggaggacatggccatggcccaccatttccgggactcctaccgccatcctgatccccgagagctacgggaacgccaccggcccctggccatacctgggtctcgacaagaagaagtgattgatcacaggctcacagaacgcgagtgggcagaagaatggaagcacctcaacagtcttctgaactgcatcatggacatggtggagaagacccggcgatccctcaccgtcctgcgccggtgtcaggaggccgaccgtgaggaactcaaccactggatccggtgctacagtgactctgaggaggggaagaagggccctacccccatctctgcccggtccctcaacagctgcagtggccctgaggggtctcagctagatgttcaccgggacttcacgcccaggaccctgtctggctacatgcctgaagagatctggaggaaggctgaagaagctgtgaatgaggtgaagcgccaggccatgtcagaactacagaaagctgtgtctgatgcggagcgcaaagcccatgaactcatcaccacagagcgtgccaagatggaacgagccctggcggaggccaagcgacaggcctcggaggatgccctgactgtcatcaaccagcaagaggactccagcgagagctgctggaactgcgggcgcaaggccagcgagacgtgcagtggctgtaacgccgcccgctactgcgggtccttctgtcagcacaaagactgggagaaacaccatcacgtgtgcggccagagtctgcagggccccgcggctgcagtggctgacccactacctggacagcctgacgccactgccagccccagcgaagccggctcggcagggccctctcgtccctgctctccggggccgccaggcccgctggacgctgctgtgccccgctgacctccagatctgacacccagcccatggacgccatgccctgccaacctcctggccccaccgtggcccaccagttgcctggagccattgctgctactgcttctctccaaaagaaaacacagatccaacagaactgcatccgtgcagccccagctacctgacaaggtctgccgggacctctacagcctctcgtccatcgcaagcaccctcagaaagcatcgcagagcgtcagacagtggcaccagcaggagtgtggccagctccgccgctgtctgtcccctctgtgtccgtctctctgtgtccgtctgtctttctgcgtctgcctctctctgtgtgtctctccgtgtctttgtctcctgccgtttccctgactctccggcgtctctgtctttgtaaagtccacatgatctctctgtcatcagagaaacctagttggtagcttttcttttccatgaagaacttttggagattttgttttgttttgttggcaaacaagctacttagaaatggacaaagaagactgtggggttctccccattcctcatgagtaagggaagaaactgtgatttttctatccagagttgctgtatcgcccagccagccccaggggcatcagcgagcacacagcagagataatgagagcaactgcaatttccaacttaagaagcagcttttgtttcaggttttactcctttaatgtcaaactctttggctttaagtgaaaaaaaaaaaaaggaaaaaaaaatccaaaaagttttttttttttttaagcaaaagaaacacacctgtaaactaccttgccagctagccagccaaggatgccagacacacctcgctccaaaggaagcccaaaaaagcaaactcaagaaattgaaatccaaaatttatttttatcactgccaaagtattttcttcatggtctctccgccctgggttggtttgcatgtcagtctttgatttgggttttgattttgttcagggggtgttgggatgctgggatttggtgggtggggccaagaagaaaccttttgttcctttttgactagtaggcagcatccttgctgggcagagccatcggcagcaaggccacgtgaccctcagcaccgcatccagaagccccagtcagcgtgagcctgagcgttgtgtgccctagggctccgtccatgcgttccctacatgcaagggaggcacctccttccatcggtccccacaccttcctgggacttctcataagtcatttccacttg

SEQ ID NO: 128 - protein, 288 aa, Mus musculus
MPDSPAEVKTQPRSTPPSMPPPPPTSSQGATRPPSFTPHTLMNGSSHSPTAIHGAPSTPNGFSNGPATSSTASLSTQHLPPACGARQLSKLKRFLTTLQQFGSDISPEIGERVRTLVLGLVNSTLTIEEFHAKLQEATNFPLRPFVIPFLKANLPLLQRELLHCARLAKQTPAQYLAQHEQLLLDASATSPVDSSELLLEVNENGKRRTPDRTKENGSDRDPLHPDHLSKRSCTLSPAQRCSPSNGLPHPTPPPPPHYRLEDMAMAHHFRDSYRHPDPRELRERHRPL

SEQ ID NO: 129 - DNA, 2587 bp, Mus musculus
gaaaaggtgcttcagggtgggctctggaggccggccagctccctccagccccaggtaccatcaatctccggctccatctgcagctccatgtcccaggcatccaccaccactctggagagtggggcactcctctcgggaccccggggtcttcagaatggaagcccagctcacaggaaggagaaggctgcagcaatgccagactccccggctgaagtgaagacgcagccccggtccacaccccccagcatgccgcccccacctcccacctcatcccagggagccacacgaccaccctccttcacacctcacacacatggcgaggatggacctgcgacgtctcttccccatggccgtttccacggctgcttaaagtggtccatggtctgtctcttgatgaacggcagcagccactcacccacggccatccacggtgccccatctacacccaatggcttcagcaacggcccagccacctcatccacggcctcgctctccacacagcacctgcccccggcgtgcggggcacggcagctcagcaagcttaagcgtttcctcaccaccctacagcagtttggcagtgacatctcacctgagatcggggagcgcgtgcgcacactggtgctgggcctggtgaactcaactctgacgatcgaagagtttcatgccaagctccaggaagccaccaactttccactgaggccgtttgttatcccttttctgaaggctaatcttccactgctgcagcgtgagctcctgcactgtgcccgcctggccaaacagacacctgcccagtacctggcccagcacgaacagctgctgctggacgccagcgccacctcccctgtcgactcgtctgagctcctgctggaagtcaacgagaacggcaaaaggagaacacctgacaggaccaaagagaatggatcagaccgggaccctctgcaccccgaccacctcagtaagcggtcctgcaccctgagccccgcccagcgctgcagccccagcaatgggctgccccacccgacgccacccccacccccgcactatcgcctggaggacatggccatggcccaccatttccgggactcctaccgccatcctgatccccgagagctacgggaacgccaccggcccctggccatacctgggtctcgacaagaagaagtgattgatcacaggctcacagaacgcgagtgggcagaagaatggaagcacctcaacagtcttctgaactgcatcatggacatggtggagaagacccggcgatccctcaccgtcctgcgccggtgtcaggaggccgaccgtgaggaactcaaccactggatccggtgctacagtgactctgaggaggggaagaagggccctacccccatctctgcccggtccctcaacagctgcagtggccctgaggggtctcagctagatgttcaccgggacttcacgcccaggaccctgtctggctacatgcctgaagagatctggaggaaggctgaagaagctgtgaatgaggtgaagcgccaggccatgtcagaactacagaaagctgtgtctgatgcggagcgcaaagcccatgaactcatcaccacagagcgtgccaagatggaacgagccctggcggaggccaagcgacaggcctcggaggatgccctgactgtcatcaaccagcaagaggactccagcgagagctgctggaactgcgggcgcaaggccagcgagacgtgcagtggctgtaacgccgcccgctactgcgggtccttctgtcagcacaaagactgggagaaacaccatcacgtgtgcggccagagtctgcagggccccgcggctgcagtggctgacccactacctggacagcctgacgccactgccagccccagcgaagccggctcggcagggccctctcgtccctgctctccggggccgccaggcccgctggacgctgctgtgccccgctgacctccagatctgacacccagcccatggacgccatgccctgccaacctcctggccccaccgtggcccaccagttgcctggagccattgctgctactgcttctctccaaaagaaaacacagatccaacagaactgcatccgtgcagccccagctacctgacaaggtctgccgggacctctacagcctctcgtccatcgcaagcaccctcagaaagcatcgcagagcgtcagacagtggcaccagcaggagtgtggccagctccgccgctgtctgtcccctctgtgtccgtctctctgtgtccgtctgtctttctgcgtctgcctctctctgtgtgtctctccgtgtctttgtctcctgccgtttccctgactctccggcgtctctgtctttgtaaagtccacatgatctctctgtcatcagagaaacctagttggtagcttttcttttccatgaagaacttttggagattttgttttgttttgttggcaaacaagctacttagaaatggacaaagaagactgtggggttctccccattcctcatgagtaagggaagaaactgtgatttttctatccagagttgctgtatcgcccagccagccccaggggcatcagcgagcacacagcagagataatgag

SEQ ID NO: 130 - protein, 620 aa, Mus musculus
MSQASTTTLESGALLSGPRGLQNGSPAHRKEKAAAMPDSPAEVKTQPRSTPPSMPPPPPTSSQGATRPPSFTPHTHGEDGPATSLPHGRFHGCLKWSMVCLLMNGSSHSPTAIHGAPSTPNGFSNGPATSSTASLSTQHLPPACGARQLSKLKRFLTTLQQFGSDISPEIGERVRTLVLGLVNSTLTIEEFHAKLQEATNFPLRPFVIPFLKANLPLLQRELLHCARLAKQTPAQYLAQHEQLLLDASATSPVDSSELLLEVNENGKRRTPDRTKENGSDRDPLHPDHLSKRSCTLSPAQRCSPSNGLPHPTPPPPPHYRLEDMAMAHHFRDSYRHPDPRELRERHRPLAIPGSRQEEVIDHRLTEREWAEEWKHLNSLLNCIMDMVEKTRRSLTVLRRCQEADREELNHWIRCYSDSEEGKKGPTPISARSLNSCSGPEGSQLDVHRDFTPRTLSGYMPEEIWRKAEEAVNEVKRQAMSELQKAVSDAERKAHELITTERAKMERALAEAKRQASEDALTVINQQEDSSESCWNCGRKASETCSGCNAARYCGSFCQHKDWEKHHHVCGQSLQGPAAAVADPLPGQPDATASPSEAGSAGPSRPCSPGPPGPLDAAVPR

SEQ ID NO: 131 - DNA, 774 bp, Mus musculus
ctggacaacaaagttctggtttctatctgtgaacagaagctgcagcacttcagtgctgtcttcctgctcatcctctgcttgggaatgatgtcagctgctccatcccctgatccaagtttggataatgagtggaaagaatggaagacaacatttgcaaaagcctacagtctgaatgaagaaagacacagaagactcgtgtgggaggagaataagaagaaaattgaggcacacaatgcagactatgagcggggcaagaccagcttctacatgggcctgaatcaatttagtgacttgactccagaagaattcaggacaaattgctgtggaagctcaatgtgtagaggagaaatggctcctgatttgcctgaatatgaagatttgggaaagaacagctatctgacacctggaagggctcagccagagtaacagttgtggcttgactggtaacaatatcatagtctaggagtgaagcaagcactctgcattgtcttgggagtcttctgtctcctggtatgggaggaatgatgctgtagaggctcaacagcaggaagcagcccatcacagtgtccagcatgtgctgtgtgatatgcaaaactgaactcatataagatcaacactgtggtgtgaactctgaggcacagtcatactgagaaatcattgccaatttttagctctgaagttccttaaatgattctcacaaggatctttagttttcactttaataagatgaatatatgccatgatgtcttcaaattaaagctagatattaaatta

SEQ ID NO: 132 - protein, 139 aa, Mus musculus
LDNKVLVSICEQKLQHFSAVFLLILCLGMMSAAPSPDPSLDNEWKEWKTTFAKAYSLNEERHRRLVWEENKKKIEAHNADYERGKTSFYMGLNQFSDLTPEEFRTNCCGSSMCRGEMAPDLPEYEDLGKNSYLTPGRAQ

SEQ ID NO: 133 - DNA, 664 bp, Mus musculus
cagagaccgtggacaacaaaatgatggtttctatctgtgaacagaagctgcagcacttcagtgctgtcttcctgctcatcctctgcttgggaatgatgtcagctgctccaccccctgatccaagtttggataatgagtggaaagaatggaagacgaaatttgcaaaagcctacaatctgaatgaagaaagacacagaagactcgtgtgggaggagaataagaagaaaattgaggcacacaatgcagactatgagcggggcaagaccagcttctacatgggcctgaatcaatttagtgacttgactccagaagaattcaggacaaattgctgtggaagctcaatgtgtagaggagaaatggctcctgatttgcctgaatatgaagatttgggaaagaacagctatctgacacctggaagggctcagccagagtaacagttgtggcttgactggtaacaatatcatagtctaggagtgaagcaagcactctgcattgtcttgggagtcttctgtctcctggtatgggaggaatgatgctgtagaggctcaacagcaggaagcagcccatcacagtgtccagcatgtgctgtgtgatatgcaaaactgaactcatataagatcaacactgtggtgtgaactctgaggcacagtcatactgagaaatc

SEQ ID NO: 134 - protein, 134 aa, Mus musculus
MVSICEQKLQHFSAVFLLILCLGMMSAAPPPDPSLDNEWKEWKTKFAKAYNLNEERHRRLVWEENKKKIEAHNADYERGKTSFYMGLNQFSDLTPEEFRTNCCGSSMCRGEMAPDLPEYEDLGKNSYLTPGRAQ

SEQ ID NO: 135 - DNA, 1871 bp, Mus musculus
ggtcctgcgagtttagccatggcgctcagctttctctctccaagcctttcccgcctcggcctgtgggcttctgtagtgatcctgatggtaaccgtcctgaagctcctcagcctgctgtttcggaggcagaagctggccagggctttggacagcttcccagggccccccaagcactggctttttggtcatgcccttgagatccagaagacaggaggcctggacaaggtggtaacttggaccgaacagttcccctatgcccacccactctggcttggacaatttattgttttcctgaacatctatgagcctgactatgctaaagctgtatacagccgaggggacccgaaggctgcatatgtgtatgacttcttcctccagtggatcggaaaaggcctactggttctggaagggccaaaatggttccagcaccgcaagctgctcacacctggcttccattatgatgtgctgaagccctatgtggccatatttgctgagtccacacgggtgatgctggacaagtgggagaaaaaggctagtgagaataagagctttgacatcttctgtgacgtgggccacatggcactggacaccctcatgaagtgcacctttggcaaaggagacagcggcctaagccacagtgacaacagctactacctggcagttagtgacctcacactgctgatgcagcagcgcatcgactccttccagtaccataatgacttcatttactggctcacaccacatggccgccgtttcttgcgggcctgccagatagcccatgaccatacagatcatgtcatcaggcagcggaaggcagctctgcaggatgagaaggagcagaaaaagcttcaggagcggagacacctggacttcctcgacattctcctgggtgcccgggatgaaagtgggatcaagttgtcagatgcagacctccgggctgaagtggacacattcatgttcgaaggccacgacaccaccactagtggtatctcttggtttctctactgcatggccctttatcctatgcaccagcagcgatgtagggaggaggtccgtgagatcctaggggaccgggactccttccagtgggatgatctggcccagatgacctacctgaccatgtgcatgaaggagtgcttccgcctctacccacctgtaccccaagtgtaccgccagctcagcaagccagtaacctttgtggatggccgctctctacctgcaggcagcctgatctctctgcacatctatgccctccatcggaacagtgctgtgtggcctgacccagaggtctttgacccactgcgcttttctcctgagaatatgacaggacggcatccctttgccttcatgcctttttctgcagggcccaggaattgcattgggcagcagtttgctatgaacgagatgaaggtggtcacagccctctgtttgctgcgctttgaattctctccagatccctcaaagatccccattaaggtcccccagctgatcttgcgctccaaaaatggcatccacctctacctgaagccactgggccctgggtctggaaagtaggtcttaggagagcaaggatatggagtcattgtggatccctgcctgtggggggtttgtgagataaaagcatgcacattgagagtatcctggaagacattctcttgtaaacatgtgtgtggaatgattcaatgcctgggctttcaaactcattccttcactccacaaatatttgctgaatgtttccctgtcttgagaaacttcatttatttctcataactgcatttatttagccatctcagtgtgcattttggatataatagacataaggaaaattgcttaaactaaatctgtacaaaataaataatactttaaaaagc

SEQ ID NO: 136 - protein, 511 aa, Mus musculus
MALSFLSPSLSRLGLWASVVILMVTVLKLLSLLFRRQKLARALDSFPGPPKHWLFGHALEIQKTGGLDKVVTWTEQFPYAHPLWLGQFIVFLNIYEPDYAKAVYSRGDPKAAYVYDFFLQWIGKGLLVLEGPKWFQHRKLLTPGFHYDVLKPYVAIFAESTRVMLDKWEKKASENKSFDIFCDVGHMALDTLMKCTFGKGDSGLSHSDNSYYLAVSDLTLLMQQRIDSFQYHNDFIYWLTPHGRRFLRACQIAHDHTDHVIRQRKAALQDEKEQKKLQERRHLDFLDILLGARDESGIKLSDADLRAEVDTFMFEGHDTTTSGISWFLYCMALYPMHQQRCREEVREILGDRDSFQWDDLAQMTYLTMCMKECFRLYPPVPQVYRQLSKPVTFVDGRSLPAGSLISLHIYALHRNSAVWPDPEVFDPLRFSPENMTGRHPFAFMPFSAGPRNCIGQQFAMNEMKVVTALCLLRFEFSPDPSKIPIKVPQLILRSKNGIHLYLKPLGPGSGK

SEQ ID NO: 137 - DNA, 6312 bp, Mus musculus
cgtcggggctgggcggcggcagcggcggctaagagggcccggcttgtgggagccaaggtgggagccggcctcggcgcgcggccaccatgtccgcgccgtcggaggaggaggagtatgcgcgtctggtgatggaggcgcagccggagtggctgcgcgccgaggtgaagcggctgtcccacgagctggccgagaccacgcgtgagaagatccaggcggccgagtatggactggcggtgctggaggagaagcaccagctcaagctgcagttcgaggagctcgaggtggactatgaggccatccgcagcgagatggagcagctcaaagaggcatttggccaggcacatacaaaccacaagaaggtggctgctgatggtgagagccgggaggagagcctgatccaggagtcggcctccaaggagcagtactacgtgcggaaggtgctggagctgcagacagagctgaaacagctgcgcaacgtcctcaccaacacccagtctgagaatgagcgcctcacgtctgtggcccaggagctaaaagagatcaaccagaatgtggagatccagcgtggtcgcctgcgggatgacatcaaggagtacaagttccgggaggcccgtctacttcaggactactcagagctggaggaggagaacatcagcctgcagaaacaagtgtctgtgctcaggcagaaccaggcgagtgagtttgagggcctcaagcatgaaatcaagcgcctggaggaggagacagagtacctcaacagccagctagaggatgccatccggcttaaggagatctctgaacggcagttggaggaggcgctggagacactgaagacagagcgggagcagaagaacaacctgcgcaaggagttgtcgcactacatgagcatcaacgattccttctataccagccacctgcaggtctccttagatggcctcaagttcagtgatgatactgtcaccgcagagcccaacaatgacgccgaagccctggtcaatggctttgagcacagtggcttggtcaaatcatccttggacaacaagacatccacacccaggaaggatggcctagctccaccctcccccagcctcgtctctgacctgctcagtgagctccacatatctgagatccagaagctgaaacagcagctggtgcagatggagcgggagaaggtgggcctgctggcaacactgcaggacacacagaagcagctggagcaggctcggggaaccctctctgagcagcatgagaaggtgaatcgtctcacagagaaccttagtgccctccggcgcctgcaggctggcaaggagcgacagacctcgttggataatgagaaggaccgtgacagccacgaagacggtgactactatgaggtggacatcaatgggcctgagatcctggcctgcaagtaccacgtggctgtggctgaggctggcgagctccgggagcagctcaaggcgttgcgcagcacacacgaagctcgcgaagcccagcacgcagaagaaaagggccggtatgaggctgagggccaggcactcactgagaagatctctctgctggagaaggctagccaccaggaccgagagctgctggcccatctggaaaaggagctgaagaaggtgagcgatgtggctggtgagacccagggcagcctgaatgtggctcaggatgagctggtgaccttcagcgaggagctggccaacctctaccaccatgtgtgcatgtgcaacaacgagacgcccaaccgtgtcatgctcgactattatcgtgagggccagggcaaggctggccgcaccagcccagagggccgcgggcgccggtcacctgtcctcttgcccaaggggctgttggccacagaggtgggccgagcagatggtgggactggggacaacagtccttcacccagttcttcactgccgtcacctctgagtgacccccgccgggaacctatgaacatctacaacctgatcgccatcatccgagaccagatcaagcacctgcaggcagccgtggaccgtacgaccgagctgtcccggcagcggattgcctcgcaggagctgggccctgctgtggacaaggacaaggaagcactcatggaggagatcctcaagctgaagtccctgctgagtaccaagcgggagcagatcaccacactgcgcaccgtgctcaaggccaacaagcagacagctgaggtggccctggccaacctgaagagcaagtatgagaacgagaaggccatggtgaccgagaccatgatgaagctacggaacgagctcaaggccctcaaggaagacgcagccaccttctcctccctgcgtgccatgtttgccaccaggtgtgacgaatacatcacacagctggatgagatgcagcggcagctggcagctgccgaggacgagaagaagacccttaactctctgttgcgcatggccatccagcagaagctggcgctcacccagcggctggagctgctggagctggaccatgaacagacccgcaggggccgcagcaaggccgcctccaaggccaagccagcctcaccgagcgtaagtcacacctgcgcctgcgccagcgagagggcggagggcgccgggctggccaaccaggtgttctgcagcgagaagcacagcatttactgtgattagggctgtggggcgccgcacacctaacgtccgcttcacctcaactaacccagctgcagcagcgggacagcagtgctaggccgctcctaacgtgactaacgcacagagggcggcactctaggcaagtggcagcgttggggtacatctgtaaccaggacactttgagctttgtgctgcttttcatgccacagccccgcccccaggatataccatgtcagttgctgtcctttgggatgctggtatcaaaagtaggggtgaagctgcacacctttgtggaagacagcggagtgaaagttttccagggcctccaggcactgttagggaacccaagggtgagttcttccctggacactcacaggggcagaacctgagttgaaacttgcatgttgctcgcatgtgtctaatatcagcacttgaaagcagttttgtgaggctctagcctgcatcataggactagcctaggttagctcgctgtggctggcatagtttcatgaagagtttccttgtagtttgtgcagcatctcactgctaaccacatccaggatggcagtcccagagggaatggaccatctctggttgcagcctgtgttctgcagtgagcccccacacctcagacacgataaccatagcccaggcagacagcgcagctgctccatctcaaagatccgcatgctgctgtgtcctgaaaggtgacaaattagcagggcctgaggtcctaggttttctttcttgacgagagtgttccaagtgcctggtcagaccttggtccttggttcagagcctattatttggtcctttgagatctgcagcttgtgcttgggtcttttcctagaagttgtcagacccaaagaagcagtgttttgagaactactagtgctctaccaaactgcacggcacagtagagcccagctgtgtgctaggggactttttgtgggcccggagctgtgctcaaaactggcaggtaagagttgtgtggttctcggtgcagtttgtggatactacagaaggaagaaaggcctccgagggctctccttttccagatgctctgtcagtgcggagctgtggcatcagatcaggtgtgtgctttagtgagttgtaaaacaggactctgctcagtatttctctccctgtccccatggggcatctagtcttgagactccatctcccataatagctgcttggctgtctctccctgtggaaaggcatctttcatgatgtggaacaattactatccaatatggccctgtagtctctcaaacagctttctctttctctcccctggatcctggggtaccccagtctgctcagattcttggcagcacatggtcgtacactgggggcagaacaggccacacgtgtcccttgcatgtccatcctgggaatggctgcccgcatgcccacccaaccttctgcctttctttctctttgggccagaacgcagcttctcttacactgtatggggctttgtggacacttggagccccatcccctaacacacatgcaggcctcctctgccaactaatgtgctcgcgcactcccagaacaagagctttagctgtcagtgagcagggagtggctctcgactgatttctaatgctgtcttgttttctcctgttttcagctgtagagtagctgctgggaggaggcggccacccggccctgtcacacagcagcccctccccctcccctcctgtggcccatgcagaggaaggaagggcagcctaaagtccacttagaaatgtttggatatgccactgtaattcttttcaaaatagcattccccaagtttttaatgggagaaaaaaaaaaaaaaagctttactattgagaatgctgcaatctgctgcttgggaaggtctctgtgtggccgaagaacctgcttccacagccgccgcgctgccaggctctctaggggcctgctggacgcctgccacaggctctccttattacacatgctccttttttatccgatcaacctgtgcacttttgatattttgatattatatttgcttccttaattccttgcatagagacggtctccagtgccgtggtctgtgttcatggtcctgtagctgtccgtcctggctctgatgtgttgacctgcgtcaactcaaggtagagctgtgctccatggtgtgtagctagacttcgggtgaggctccgacccggcaaggagctggccagtgtatccacgctgtggttcagcagcctttagaggacacggcattgtggttcatgtttgaaattacagattttaaatgccatgttcattaagaaatccagggtattccaattctggggtttttcatattgtattattattattattcttaggaatagttcaatgtaacaagaagaaaacttgacctttgctctggttaaaacagtaataggcacttgaaagcataaattattgaatgagtagtattacctacaaattccagagttttctgggttttaggacattgtgaagcatgactgactaacagaattttatacaactgcaccagtgaaattccaaattggaattgttttgttattctggttgtcgtgccaaattgtggtacacttagaaaattctacagccgtcgattttcaggtgttcaatttcaacacctttttgttagtaaccattgccagtagtgccttcatcagttcagggaggtgtcccagccaggtcaggtctccaggacgggcagcagtggagagctagttgggaatgctgaaggccattgtggaccagcaggtacctgcctcactctgtacttgggcatcttcattgagggagagagaacagtgattgtgcaaaattctgttagtcagtgattcttcaatgcaaattcaggggcttagaaacaagacagcacacaaacctggactgtgctttgggaaccaaatggacttcatgggacaagctaagcaagctgtacagacatcacgtttgtgaagagctgagggcgtcaggagagccggcgaagtcggcatgcgagtggggaagagggttagccatagtattctttgcaaatgtgaaagtcagacattatatcttctcttgcttggtgtaactaatcactgttaatttcaggaaacagaagtcagtaaaactccttagtaaactccttgctaagtgaggttcagggtgtggtcaaattggtactagtggagggagggaaattgtcctccagcctaaaaagggacaaattataataatataaattgttaagaattgaagaattctgtttcctggaatgagcatttcttattcctagttgttgggactctttgccttctgttacagtgttgattcatacaaaatattgttacatttaagataacatcatctgtatggggtatttatttgcaatgatgtctaagtactgtattttttctgtgtgttaccttagtgtcagaatgttggtctttattttaaaagtcatatgcatgttctcctgccaaggcaccttacacagacccaaaacaaaacaatgagcagatgccttcagcttctgagaaaatgaggccaagtgaggagaaggcataggaaggtgagactagctgagacttctgtcatggctgatggcggaccgtctccacagccagcacacataggaaaactgggcctgggtgaagagtcgcattggtaggaccaataaagaataataaaacaattg

SEQ ID NO: 138 - protein, 821 aa, Mus musculus
MSAPSEEEEYARLVMEAQPEWLRAEVKRLSHELAETTREKIQAAEYGLAVLEEKHQLKLQFEELEVDYEAIRSEMEQLKEAFGQAHTNHKKVAADGESREESLIQESASKEQYYVRKVLELQTELKQLRNVLTNTQSENERLTSVAQELKEINQNVEIQRGRLRDDIKEYKFREARLLQDYSELEEENISLQKQVSVLRQNQASEFEGLKHEIKRLEEETEYLNSQLEDAIRLKEISERQLEEALETLKTEREQKNNLRKELSHYMSINDSFYTSHLQVSLDGLKFSDDTVTAEPNNDAEALVNGFEHSGLVKSSLDNKTSTPRKDGLAPPSPSLVSDLLSELHISEIQKLKQQLVQMEREKVGLLATLQDTQKQLEQARGTLSEQHEKVNRLTENLSALRRLQAGKERQTSLDNEKDRDSHEDGDYYEVDINGPEILACKYHVAVAEAGELREQLKALRSTHEAREAQHAEEKGRYEAEGQALTEKISLLEKASHQDRELLAHLEKELKKVSDVAGETQGSLNVAQDELVTFSEELANLYHHVCMCNNETPNRVMLDYYREGQGKAGRTSPEGRGRRSPVLLPKGLLATEVGRADGGTGDNSPSPSSSLPSPLSDPRREPMNIYNLIAIIRDQIKHLQAAVDRTTELSRQRIASQELGPAVDKDKEALMEEILKLKSLLSTKREQITTLRTVLKANKQTAEVALANLKSKYENEKAMVTETMMKLRNELKALKEDAATFSSLRAMFATRCDEYITQLDEMQRQLAAAEDEKKTLNSLLRMAIQQKLALTQRLELLELDHEQTRRGRSKAASKAKPASPSV

SEQ ID NO: 139 - DNA, 2717 bp, Mus musculus
ggcggcggcagcggcggctaagagggcccggcttgtgggagccaaggtgggagccggcctcggcgcgcggccaccatgtccgcgccgtcggaggaggaggagtatgcgcgtctggtgatggaggcgcagccggagtggctgcgcgccgaggtgaagcggctgtcccacgagctggccgagaccacgcgtgagaagatccaggcggccgagtatggactggcggtgctggaggagaagcaccagctcaagctgcagttcgaggagctcgaggtggactatgaggccatccgcagcgagatggagcagctcaaagagggcatttggccaggcacatacaaaccacaagaaggtggctgctgatggtgagagccgggaggagagcctgatccaggagtcggcctccaaggagcagtactacgtgcggaaggtgctggagctgcagacagagctgaaacagctgcgcaacgtcctcaccaacacccagtctgagaatgagcgcctcacgtctgtggcccaggagctaaaagaggatcaaccagaatgtggagatccagcgtggtcgcctgcgggatgacatcaaggagtacaagttccgggaggcccgtctacttcaggactactcagagctggaggaggagaacatcagcctgcagaaacaagtgtctgtgctcaggcagaaccaggcgagtggagtttgagggcctcaagcatgaaatcaagcgcctggaggaggagacagagtacctcaacagccagctagaggatgccatccggcttaaggagatctctgaacggcagttggaggaggcgctggagacactgaagacagagcgggagcagaagaacaacctgcgcaaggagttgtcgcactacatgagcatcaacgattccttctataccagccacctgcaggtctccttagatggcctcaagttcagtgatgatactgtcaccgcagagcccaacaatgacgccgaagccctggtcaatggctttgagcacagtggcttggtcaaatcatccttggacaacaagacatccacacccaggaaggatggcctagctccaccctcccccagcctcgtctctgacctgctcagtgagctccacatatctgagatccagaagctgaaacagcagctggtgcagatggagcgggagaaggtgggcctgctggcaacactgcaggacacacagaagcagctggagcaggctcggggaaccctctctgagcagcatgagaaggtgaatcgtctcacagagaaccttagtgccctccggcgcctgcaggctggcaaggagcgacagacctcgttggataatgagaaggaccgtgacagccacgaagacggtgactactatgaggtggacatcaatgggcctgagatcctggcctgcaagtaccacgtggctgtggctgaggctggcgagctccgggagcagctcaaggcgttgcgcagcacacacgaagctcgcgaagcccagcacgcagaagaaaagggccggtatgaggctgagggccaggcactcactgagaagatctctctgctggagaaggctagccaccaggaccgagagctgctggcccatctggaaaaggagctgaagaaggtgagcgatgtggctggtgagacccagggcagcctgaatgtggctcaggatgagctggtgaccttcagcgaggagctggccaacctctaccaccatgtgtgcatgtgcaacaacgagacgcccaaccgtgtcatgctcgactattatcgtgagggccagggcaaggctggccgcaccagcccagagggccgcgggcgccggtcacctgtcctcttgcccaaggggctgttggccacagaggtgggccgagcagatggtgggactggggacaacagtccttcacccagttcttcactgccgtcacctctgagtgacccccgccgggaacctatgaacatctacaacctgatcgccatcatccgagaccagatcaagcacctgcaggcagccgtggaccgtacgaccgagctgtcccggcagcggattgcctcgcaggagctgggccctgctgtggacaaggacaaggaagcactcatggaggagatcctcaagctgaagtccctgctgagtaccaagcgggagcagatcaccacactgcgcaccgtgctcaaggccaacaagcagacagctgaggtggccctggccaacctgaagagcaagtatgagaacgagaaggccatggtgaccgagaccatgatgaagctacggaacgagctcaaggccctcaaggaagacgcagccaccttctcctccctgcgtgccatgtttgccaccaggtgtgacgaatacatcacacagctggatgagatgcagcggcagctggcagctgccgaggacgagaagaagacccttaactctctgttgcgcatggccatccagcagaagctggcgctcacccagcggctggagctgctggagctggaccatgaacagacccgcaggggccgcagcaaggccgcctccaaggccaagccagcctcaccgagcctgtagagtagctgctgggaggaggcggccacccggccctgtcacacagcagcccctccccctcccctcctgtggcccatgcagaggaaggaagggcagcctaaagtccacttagaaatgtttggatatgccactgtaattcttttcaaaatagcattccccaagtttttaatgggaga

SEQ ID NO: 140 - protein, 667 aa, Mus musculus
MWRSSVVACGMTSRSTSSGRPVYFRTTQSWRRRTSACRNKCLCSGRTRRVEFEGLKHEIKRLEEETEYLNSQLEDAIRLKEISERQLEEALETLKTEREQKNNLRKELSHYMSINDSFYTSHLQVSLDGLKFSDDTVTAEPNNDAEALVNGFEHSGLVKSSLDNKTSTPRKDGLAPPSPSLVSDLLSELHISEIQKLKQQLVQMEREKVGLLATLQDTQKQLEQARGTLSEQHEKVNRLTENLSALRRLQAGKERQTSLDNEKDRDSHEDGDYYEVDINGPEILACKYHVAVAEAGELREQLKALRSTHEAREAQHAEEKGRYEAEGQALTEKISLLEKASHQDRELLAHLEKELKKVSDVAGETQGSLNVAQDELVTFSEELANLYHHVCMCNNETPNRVMLDYYREGQGKAGRTSPEGRGRRSPVLLPKGLLATEVGRADGGTGDNSPSPSSSLPSPLSDPRREPMNIYNLIAIIRDQIKHLQAAVDRTTELSRQRIASQELGPAVDKDKEALMEEILKLKSLLSTKREQITTLRTVLKANKQTAEVALANLKSKYENEKAMVTETMMKLRNELKALKEDAATFSSLRAMFATRCDEYITQLDEMQRQLAAAEDEKKTLNSLLRMAIQQKLALTQRLELLELDHEQTRRGRSKAASKAKPASPSL

SEQ ID NO: 141 - DNA, 7704 bp, Mus musculus
gttattgccagctttcgaggcaccgtcccgtacggcctgtcattggagatcggagacactgttcagatcctggagaagtgcgacggctggtacagaggatttgccttaaaaaatcccaacatcaagggtatatttccttccagctatgttcacttgaaaaatgcctgtgtaaagaacaaaggacaatttgaaatggttattcccactgaagattctgttatcaccgagatgacatcaactttaagggactggggaaccatgtggaaacagctctatgtcagaaatgaaggggatctcttccatcgcctgtggcacatcatgaatgaaatcctcgatctgcgacggcaggtgctagttggccatctcacccatgacaggatgaaggatgtgaagcgccacattactgcccgactggattggggaaatgaacaactgggactagacctggtgcctaggaaggagtacgcaatggtagacccagaggacatcagcatcactgagctgtaccgactggtagaacattcttttgagaaaaaaaaaagaaataaagatttagttattgatactaagggtgtaaattacatagattttttttttaaattaatcattctattttcatttacatcttcttcccaatttttaattagtgagagatttttcttgagactgaatagaaatgggcttcccaaagccccggataagcctgaaagacactgttctctctttgtggacttgggtagcagtgaactcaggaaggacatctacattaccgtgcacattatccgaattggtcgaatgggagcaggagagaaaaagaatgcctgcagtgttcagtaccggcgaccttttggctgtgcagtccttagcattgcagatctcctcaccggagagacaaaggatgacctggtcctgaaagtgtacatgtgtaatacagagagcgagtggtaccagatccacgagaacatcatcaagaagctgaatgcgcgctataatttgactggctccaatgcaggattagcagtttccctccaactgttacacggagacattgaacagatcagaagagaatactcctcagtgttctctcacggagtgtccataacgcggaagctgggtttttctgacattatcatgcctggtgaaatgaggaatgatttatatatcaccgtagaaaggggggaatttgagaaaggaggcaagagtgtggccagaaatgtggaagttacaatgttcattgtagacagtaatggtcagcccttaaaggattttatctcctttggctctggagagccaccggctagtgagtaccactcctttgtgctctatcataacaacagtcccaggtggtcagagctgctgaaacttcctattcctgtggacaaattccggggctcccacatccgctttgagttccggcattgttccacaaaggagaaaggagaaaagaagttgttcggtttctctttcgtgcccctgatgcaagaagacggaaggactctcccagatggcacacacgagctcatcgtgcataagtgtgaagaaaacacaaaccttcaggatactacccgctacctcaagctcccattttccaaggtcatcttccttgggaacaataatcaaaccatgaaggccacaaaggaatccttttggataacatcatttctctgttccacaaaactcactcaaaatggtgatatgcttgatcttttgaaatggagaacccacccagacaagatcacaggctgtctctctaagttaaaagaaatcgatggctcagagatagtaaagtttctccaagacacactggataccttgtttggaatattagatgaaaattcccaaaaatatgggtctaaagtgtttgattctttggtccacataataaatttgctacaagatagcaagttccatcattttaagcctgtcatggacacttacattgagagtcactttgctggggcacttgcatacagagatctcatcaaagtgctcaagtggtacgtggacaggataacggaagcagagcgccaggagcatatccaggaagtgttgaaggcacaagagtacatttttaagtatatagttcaatcccgaaggctgttttcccttgccaccggagggcagaatgaagaggaattccgctgctgcatccaggagctccttatgtccgtccgcttcttcctctcacaagagagcaaagggactggagctttatctcagtcgcaggctgtgttcttgagctcctttccagctgtgtactcagaactgttgaagctctttgatgtccgggaagtggccaacttggtccaggacaccctgggcagcctacctaccatcatgcatgtggacgattctctgcaggcaattaagcttcagtgcattggcaaaactgtcgagagccagctctataccaacccagactcgcggtacattctcctgcctgtcgtactgcatcacctccacatccacttgcaagaacagaaggacttgatcatgtgtgcacgtatccttagcaacgtgttctgtctcatcaagaaaaatagctcagaaaagtctgtgctggaggaaatagacgtgatagtggccagcttgctggatatcctgctcaggaccatattggagatcactagtcggcctcaagcatccagctccgccatgaggctgcagttccaggatgtcactggggaatttgttgcctgtctcctttccctattacgacaaatgacagatagacattatcagcaacttctgaatagtttcagtactaaagaggagctgagggatttcttgctgcagatttttaccgttttccgaatattgatacgcccagagatgtttcccaaggactggactgtcatgcgcctggttgctaacaatgttatcatcacaacagttctgtacctctccgatgcactccgtaagaacttcttaaatgaaaactttgattataagatctgggattcctacttttacctcgctgtcatttttataaaccagttgtgtctgcagctggagatgttcacaccttctaaaaagaaaaaggtgctagaaaagtatggtgatatgcgcgtcaccatgggttgtgaaatttttagcatgtggcaaaacctaggagaacacaaacttcatttcatccctgccctgattgggccctttctggaagtaaccttgataccccagccagatctccggaatgtcatgattcctatttttcacgatatgatggactgggagcaaagaaggagtggcaactttaaacaggtggaggccaagctaattgacaaattggacagcctgatgtcggagggcaaaggtgatgaaacgtaccgtgagctcttcaacagtataattccactatttggtccctaccctagtctactaaagaaaattgagcgggaaacatggagggaaagtggcgtttcattaattgccactgtcactcggctgatggagaggttgttagactacagggactgcatgaagataggagaggtggatggcaagaagattggctgcacagttagccttttgaacttctataagacggagctgaacaaggaggagatgtatatccgctacatccacaaactctacgatctgcatctcaaggcgcagaacttcacagaggctgcctacactctcctgttgtatgacgagctgctggagtggtctgatcggcccctcagggagttcctgacctaccccatgcagaccgaatggcagcgcaaggagcacctgcacctcaccatcatccagaacttcgaccgaggcaaatgttgggagaatggcattatcttgtgccggaagattgcagagcaatatgagagttactatgactacaggaacctgagcaagatgaggatgatggaagcctccttgtatgacaaaatcatggaccagcagcgcctggaacctgaattcttcagagttggattttatgggaaaaagtttccatttttcttaagaaataaggagtttgtatgtcgagggcatgactatgaaagactggaggccttccaacagcgaatgctgaacgagttcccccatgccatcgccatgcagcatgccaaccagcccgacgagaccatcttccaggcagaggctcagtatttacagatatatgctgtgactcccattccagagagccaggaggtactgcagagagagggggtcccagacaacatcaaaagcttctataaagtgaaccacatttggaagttccgctacgacaggccattccacaaaggcgcaaaagacaaggagaacgaattcaagagtctctgggtggaaaggacatcgctgtacttggtccagagcttacccggcatctcccgctggttcgaagtggaaaagcgagaagtggtagagatgagtcctctggaaaacgccatcgaagtgttagaaaacaagaaccagcagctgaagaccctgatcagccagtgtcagacgaggcagatgcagaatatcaaccccttgaccatgtgcctcaatggagtcatagatgctgcagtgaacggtggggtctccaggtatcaagaggcattctttgtcaaagactatattttaagtcatcctgaagatggggagaagattgcacggttaagagaactgatgcttgagcaggcacagattctggaatttgggctggccgtgcacgagaagtttgtacctcaagatatgagaccccttcacaaaaaactggtggaccagttctttgtgatgaaatcgagctttgggatacaggagttccctgcttgtatccaggccagccctgtccattttcccaatggaagccctcgtgtgtgtagaaactcagcccctgcttccatgagtccagatggtaccagggtaatccctagacgcagcccattaagttacccagctgtcaaccggtattcctcgtcctcgctgtcctcacaggcctctgctgaagtaagcaatattacagggcaatcagaaagctctgatgaagtctttaacatgcagcccagtccgtctacctcaagcctgagttccactcactctgcttcacctaatgtgaccagttctgctccgtcgagtgccagagcttcgcctttgttgtctgacaaacacaaacattccagagaaaactcttgcctgtccccaagagatagaccgtgcagtgccatttacccaacacccgtggagccttctcagaggatgctgtttaatcatattggagatggggccttgcctcgaagtgaccccaacctttctgcacctgagaaagctgtgaatcccacccctagcagctggagcctggacagtgggaaagaagccaagaacatgtcggacagtgggaaacttatctctccccctgtccctccaaggcccacacagactgcttcgccagcaagacacaccacatcagtgtccccctcgcctgctggacgttctccattgaagggctccgtacagtccttcaccccatctccagtggagtacaactccccaggactgagttcaaattccccagtcttgtccggcagctacagcagtgggatttcctcgcttagccggtgtagcacgtcggaaacctcgggctttgaaaaccaagccaatgaacagtcagtgcctgtgccggtgccggtgccggtgccggtgcccgtgcccagcttcagcgggtcggaggaacctgtacgcaaggagagcaaaaccccacccccctacagtgtctacgagcggactctgcggcgccctgtcccgctacctcacagcctctccatccctgtcacctctgagccacctgctctgccccccaagcccttggctgcgcggtccagccacctggagaatgggacccgtaggactgagcctggccctaggcccaggcccctgccccgtaaggtgtctcagctataagtcacttttctatgtacctgcgatgaattctttgccgtttacaagataagtctgatgagaagacatttagtgtaggcactttaaatctcttactcagacctttctttaaatgaatggagttaaatttgcttattaatataatgttgcacaatattaaaagttactgatctaaaacgccagatgttacatgaaatatggggctgagtctcattaaaacgtttctcatttgaaagtggtaaattgtgaaaaagactccttttgtacctttttatgttcaccttttttatgtagtttaatcttaaaaccaatacgatattgtcaagcaatagaatgcgtgataatgttgtataccttttattctgaatacttgatactctgagaaagctgatcatgtctgggcacatactaacacaacggccatttcttgagacttcaggaaagaaggtgaagacctcagctctccccttgagcagaatgttgagctcctatcttcagatttaaaggctaaagcaggctggttggttggagtagatacttaagggtttcaaggattgggaacggaagttgttttgttctttaaacaaaatacttctttgacatctgacagctgtctccatccttaactctgctttgtgaacggttgctgaatctttaagcatcctgacaccatgctatctactgcattacttttcaaggtgcaatttgctttcggagttccaatcagctagattaagcaagagaccccaggagaagtgtttacttgaattttgtgcttccttacttgataacttcctacacaaaacgtgtcactgataaagagcaggtgttcaaggtttaaataggcacaaattactgtgtcccattaactaggattcgggaatcaatacaggacagtattaaatcaatagtgtgaaggaagacaaaaccttagtgaaaatatattaacatgattgaatggtgaaaggactttgaaaaggtgagggcattaactttgaatcctgcataaaataaagaattcttcaaactctcccttcttcccaggagagctgagtgtctctgctcgcttgtcctgtggtcctttttctggggaagaggattgtggaccattctagcatggatacagcagcatagcattaggtggaggtagagtagacatgatggcacagttgtaggagggtgaaaaagcaccttgtatgtagtaatgtatttttttaatctttgtcttttccttttactgactgtttataacactcaattgacaatagatatgaactgtattttaaaccatgctgttaaatattttccctcttttgttgggaagctcatcttagtttagttgtgtttgtttttgttgctagcttacctggaaggcagtgaccacttttttatattctcttaatgaaaccattcagcaggtatatgctgttgaggctggttatagaggttttctataataaatgttcaagtatttttgtacataactggttaattttaataagagataccattatgtgtaaaaaaaaaagtaaaaagcaaacagttgtggatgcagtatgattgttataattatgccaaatactttatgtatggaaaatatttgtacatatgtgcttttaacaataattctgccatattgactttacaattttgaatgtcagaaaattaatatatgtaaaaatatttatgtttagtgaaagtattcataattgaggaaaggaacctatgaattttagctttgtatcttgcaggttttgcagttagaaatttcttgaactagcgcttgcatttgataataacactttgtgtttgtaatcacaccct

SEQ ID NO: 142 - protein, 1960 aa, Mus musculus
VIASFRGTVPYGLSLEIGDTVQILEKCDGWYRGFALKNPNIKGIFPSSYVHLKNACVKNKGQFEMVIPTEDSVITEMTSTLRDWGTMWKQLYVRNEGDLFHRLWHIMNEILDLRRQVLVGHLTHDRMKDVKRHITARLDWGNEQLGLDLVPRKEYAMVDPEDISITELYRLVEHSFEKKKRNKDLVIDTKGVNYIDFFFKLIILFSFTSSSQFLISERFFLRLNRNGLPKAPDKPERHCSLFVDLGSSELRKDIYITVHIIRIGRMGAGEKKNACSVQYRRPFGCAVLSIADLLTGETKDDLVLKVYMCNTESEWYQIHENIIKKLNARYNLTGSNAGLAVSLQLLHGDIEQIRREYSSVFSHGVSITRKLGFSDIIMPGEMRNDLYITVERGEFEKGGKSVARNVEVTMFIVDSNGQPLKDFISFGSGEPPASEYHSFVLYHNNSPRWSELLKLPIPVDKFRGSHIRFEFRHCSTKEKGEKKLFGFSFVPLMQEDGRTLPDGTHELIVHKCEENTNLQDTTRYLKLPFSKVIFLGNNNQTMKATKESFWITSFLCSTKLTQNGDMLDLLKWRTHPDKITGCLSKLKEIDGSEIVKFLQDTLDTLFGILDENSQKYGSKVFDSLVHIINLLQDSKFHHFKPVMDTYIESHFAGALAYRDLIKVLKWYVDRITEAERQEHIQEVLKAQEYIFKYIVQSRRLFSLATGGQNEEEFRCCIQELLMSVRFFLSQESKGTGALSQSQAVFLSSFPAVYSELLKLFDVREVANLVQDTLGSLPTIMHVDDSLQAIKLQCIGKTVESQLYTNPDSRYILLPVVLHHLHIHLQEQKDLIMCARILSNVFCLIKKNSSEKSVLEEIDVIVASLLDILLRTILEITSRPQASSSAMRLQFQDVTGEFVACLLSLLRQMTDRHYQQLLNSFSTKEELRDFLLQIFTVFRILIRPEMFPKDWTVMRLVANNVIITTVLYLSDALRKNFLNENFDYKIWDSYFYLAVIFINQLCLQLEMFTPSKKKKVLEKYGDMRVTMGCEIFSMWQNLGEHKLHFIPALIGPFLEVTLIPQPDLRNVMIPIFHDMMDWEQRRSGNFKQVEAKLIDKLDSLMSEGKGDETYRELFNSIIPLFGPYPSLLKKIERETWRESGVSLIATVTRLMERLLDYRDCMKIGEVDGKKIGCTVSLLNFYKTELNKEEMYIRYIHKLYDLHLKAQNFTEAAYTLLLYDELLEWSDRPLREFLTYPMQTEWQRKEHLHLTIIQNFDRGKCWENGIILCRKIAEQYESYYDYRNLSKMRMMEASLYDKIMDQQRLEPEFFRVGFYGKKFPFFLRNKEFVCRGHDYERLEAFQQRMLNEFPHAIAMQHANQPDETIFQAEAQYLQIYAVTPIPESQEVLQREGVPDNIKSFYKVNHIWKFRYDRPFHKGAKDKENEFKSLWVERTSLYLVQSLPGISRWFEVEKREVVEMSPLENAIEVLENKNQQLKTLISQCQTRQMQNINPLTMCLNGVIDAAVNGGVSRYQEAFFVKDYILSHPEDGEKIARLRELMLEQAQILEFGLAVHEKFVPQDMRPLHKKLVDQFFVMKSSFGIQEFPACIQASPVHFPNGSPRVCRNSAPASMSPDGTRVIPRRSPLSYPAVNRYSSSSLSSQASAEVSNITGQSESSDEVFNMQPSPSTSSLSSTHSASPNVTSSAPSSARASPLLSDKHKHSRENSCLSPRDRPCSAIYPTPVEPSQRMLFNHIGDGALPRSDPNLSAPEKAVNPTPSSWSLDSGKEAKNMSDSGKLISPPVPPRPTQTASPARHTTSVSPSPAGRSPLKGSVQSFTPSPVEYNSPGLSSNSPVLSGSYSSGISSLSRCSTSETSGFENQANEQSVPVPVPVPVPVPVPSFSGSEEPVRKESKTPPPYSVYERTLRRPVPLPHSLSIPVTSEPPALPPKPLAARSSHLENGTRRTEPGPRPRPLPRKVSQL

SEQ ID NO: 143 - DNA, 1327 bp, Mus musculus
agctcctcggcagccgcacttagcagcgtgcgccccggtgcaaccctggctttcttcccgctggacgcccgtgcccccttcgtggtccgcaaccagaagcccagcgcagcccccggagcagcccctgcaccgcctccgctccccggaccgcgacccaggccgccccgagatgatcgcgaccggagccctcctgcgcgtcctcttgctcctgctggctttcggccacagcacctatggggctgaatgcgacccaccctgtgacccccagtatggattctgcgaggctgacaatgtctgcaggtgccatgttggctgggagggtcccctctgtgacaagtgtgtaactgcccctggctgtgtcaatggagtctgcaaggaaccatggcagtgcatctgcaaggatggctgggacgggaaattctgcgaaatagacgttcgggcttgcacctcaaccccctgcgccaacaatggaacttgcgtggacctggagaaaggccagtacgaatgctcctgcacacctgggttctctggaaaggactgccagcacaaggctgggccctgcgtgatcaatggttctccctgccagcacggaggcgcctgcgtggatgatgagggccaggcctcgcatgcttcctgcctgtgcccccctggcttctcaggcaacttctgtgagatcgtagccgcaaccaacagctgtacccctaacccatgcgagaacgatggcgtctgcaccgacatcgggggtgacttccgttgccgctgcccagctggattcgtcgacaagacctgcagccgcccggtgagcaactgcgccagtggcccgtgccagaacgggggcacctgcctccagcacacccaggtgagcttcgagtgtctgtgcaagcccccgttcatgggtcccacgtgcgcgaagaagcgcggggctagccccgtgcaggtcacccacctgcccagcggctatgggctcacctaccgcctgacccccggggtgcacgagctgcctgttcagcagcccgagcaacacatcctgaaggtgtccatgaaagagctcaacaagagtacccctctcctcaccgagggacaggccatctgcttcaccatcctgggcgtgctcaccagcctggtggtgctgggcaccgtggccatcgtctttctcaacaagtgcgaaacctgggtgtccaacctgcgctacaaccacatgcttcgcaagaagaagaacctcctgttgcagtataacagcggcgaggagctggcggtcaatatcatcttccccgagaagattgacatgaccactttcaacaaggaggctggtgatgaggagatctaa

SEQ ID NO: 144 - protein, 385 aa, Mus musculus
MIATGALLRVLLLLLAFGHSTYGAECDPPCDPQYGFCEADNVCRCHVGWEGPLCDKCVTAPGCVNGVCKEPWQCICKDGWDGKFCEIDVRACTSTPCANNGTCVDLEKGQYECSCTPGFSGKDCQHKAGPCVINGSPCQHGGACVDDEGQASHASCLCPPGFSGNFCEIVAATNSCTPNPCENDGVCTDIGGDFRCRCPAGFVDKTCSRPVSNCASGPCQNGGTCLQHTQVSFECLCKPPFMGPTCAKKRGASPVQVTHLPSGYGLTYRLTPGVHELPVQQPEQHILKVSMKELNKSTPLLTEGQAICFTILGVLTSLVVLGTVAIVFLNKCETWVSNLRYNHMLRKKKNLLLQYNSGEELAVNIIFPEKIDMTTFNKEAGDEEI

SEQ ID NO: 145 - DNA, 1158 bp, Mus musculus
cacttagcagcgtgcgccccggtgcaaccctggctttcttcccgctggacgcccgtgcccccttcgtggtccgcaaccagaagcccagcgcagcccccggagcagcccctgcaccgcctccgctccccggaccgcgacccaggccgccccgagatgatcgcgaccggagccctcctgcgcgtcctcttgctcctgctggctttcggccacagcacctatggggctgaatgcgacccaccctgtgacccccagtatggattctgcgaggctgacaatgtctgcaggtgccatgttggctgggagggtcccctctgtgacaagtgtgtaactgcccctggctgtgtcaatggagtctgcaaggaaccatggcagtgcatctgcaaggatggctgggacgggaaattctgcgaaatagacgttcgggcttgcacctcaaccccctgcgccaacaatggaacttgcgtggacctggagaaaggccagtacgaatgctcctgcacacctgggttctctggaaaggactgccagcacaaggctgggccctgcgtgatcaatggttctccctgccagcacggaggcgcctgcgtggatgatgagggccaggcctcgcatgcttcctgcctgtgcccccctggcttctcaggcaacttctgtgagatcgtagccgcaaccaacagctgtacccctaacccatgcgagaacgatggcgtctgcaccgacatcgggggtgacttccgttgccgctgcccagctggattcgtcgacaagacctgcagccgcccggtgagcaactgcgccagtggcccgtgccagaacgggggcacctgcctccagcacacccagcccgagcaacacatcctgaaggtgtccatgaaagagctcaacaagagtacccctctcctcaccgagggacaggccatctgcttcaccatcctgggcgtgctcaccagcctggtggtgctgggcaccgtggccatcgtctttctcaacaagtgcgaaacctgggtgtccaacctgcgctacaaccacatgcttcgcaagaagaagaacctcctgttgcagtataacagcggcgaggagctggcggtcaatatcatcttccccgagaagattgacatgaccactttcaacaaggaggctggtgatgaggagatctaa

SEQ ID NO: 146 - protein, 334 aa, Mus musculus
MIATGALLRVLLLLLAFGHSTYGAECDPPCDPQYGFCEADNVCRCHVGWEGPLCDKCVTAPGCVNGVCKEPWQCICKDGWDGKFCEIDVRACTSTPCANNGTCVDLEKGQYECSCTPGFSGKDCQHKAGPCVINGSPCQHGGACVDDEGQASHASCLCPPGFSGNFCEIVAATNSCTPNPCENDGVCTDIGGDFRCRCPAGFVDKTCSRPVSNCASGPCQNGGTCLQHTQPEQHILKVSMKELNKSTPLLTEGQAICFTILGVLTSLVVLGTVAIVFLNKCETWVSNLRYNHMLRKKKNLLLQYNSGEELAVNIIFPEKIDMTTFNKEAGDEEI

SEQ ID NO: 147 - DNA, 1245 bp, Mus musculus
ctcttttccggtcggcgtgtttctggatcggagcgtcttccgcagcccggccttcaccatgagcgtcccggccttcatcgatatcagcgaggaagaccaggctgctgaacttcgagcttatctgaaatcaaaaggagctgagctctcagaagaaaactcggaaggtggacttcatgtagatttagctcagattattgaagcctgtgatgtgtgtctgaaggaagatgataaagatgttgaaagtgtgatgaacagtgtggtgtccctcctgttgatcctggaaccagacaagcaagaagcattgattgaaagtctgtgtgaaaagctggtcaagtttcgggaaggcgaacgcccatctctgagactacagttgctcagcaaccttttccatgggatggacaagaatactcctgtgaggtacacagtgtactgcagcctcatcaaagtggcggcatcatgtggggccatccagtacatcccaacggagctggatcaagtgagaaagtggatctctgactggaagctcaccactgaaaagaagcacaccctcctcagactgctctacgaggcgctcgtggattgtaagaaaagtgatgctgcatcaaaggtcatggtggaattgctcgggagttacacagaggacaatgcttcccaggctcgagttgatgcccacaggtgtattgtgcgggcactaaaggatccaaatgcctttctttttgaccatcttcttactctaaagccagtcaaatttttggaaggcgagcttatccatgatttattaaccatttttgtgagtgctaaattggcatcgtatgtcaagttctatcagaataacaaagacttcatagattcacttggcttgttacatgagcaaaatatggcgaaaatgagactcctcacctttatgggaatggcagtggaaaacaaagagatttcttttgacacaatgcagcaagagctacagattggagctgatgatgttgaagcatttgttattgatgctgtaagaactaaaatggtctactgcaaaattgatcagacccaaagaaaagtagttgtcagtcacagcacacatcggacatttggaaaacagcagtggcaacaactgtatgacactcttaatgcctggaaacagaacttgaacaaagtgaaaaatagccttttgagtctttcagatacctgaatttttatgaaaatgattttgttcgttgagaaaaaaagttctaagtaaaacattatcaactg

SEQ ID NO: 148 - protein, 374 aa, Mus musculus
MSVPAFIDISEEDQAAELRAYLKSKGAELSEENSEGGLHVDLAQIIEACDVCLKEDDKDVESVMNSVVSLLLILEPDKQEALIESLCEKLVKFREGERPSLRLQLLSNLFHGMDKNTPVRYTVYCSLIKVAASCGAIQYIPTELDQVRKWISDWKLTTEKKHTLLRLLYEALVDCKKSDAASKVMVELLGSYTEDNASQARVDAHRCIVRALKDPNAFLFDHLLTLKPVKFLEGELIHDLLTIFVSAKLASYVKFYQNNKDFIDSLGLLHEQNMAKMRLLTFMGMAVENKEISFDTMQQELQIGADDVEAFVIDAVRTKMVYCKIDQTQRKVVVSHSTHRTFGKQQWQQLYDTLNAWKQNLNKVKNSLLSLSDT

SEQ ID NO: 149 - DNA, 2993 bp, Mus musculus
aagagagcactggccctccgcgcagcgcatcactgcttcgctggcagggcttagtggccccgtgtgaaccaagggacaactcctaaccgcaccagtgggagtgcgcttgctgggacctccgctcgcctcagctctccagagtccggtggaggggttgggggagactctgatcaccagtcacaaaccccgcggacctggaaaagagggacttgagtggtgcaaaggttgagagctaaagcacaggagaggacagaggagcagaggagccgggggaaacaagagaaaagaaaggaagaaaaagaaaaagaagcagcagctggggagaaccctgtgcgcggttaagggaggattccatcaccgcggaaaatcgtgcaaaagcgcaaaggtgctgaacaccaaacgaagccggcagggcgatctgcagggctgggtctaacagcaccttgggtcacgcctccttggcgagaaggcgtctggcctttgattgcttccagggactgcagaacttcctgcccgtcagaggagcgggtctcgctggggtcgcgtttgctccaggcttgaggcttgagactaagttcttaagagtcccgagtgtctgatccaggaagggttgggggaactgtgtctgtgaggagcccacgcgccccacgtgaggggttgagtgtcggcgggcgtcctcactcccctggcattcccatcttttcagggctccacccaactccgggaaccccttacccggagatggccgcgctgatgcgggtcaaggattcatcccgctgccttctcctactggccgcggtgctgatggtggagagctcacagctaggcagctcgcgggccaaactcaactccatcaagtcctctctaggaggggagactcctgctcagtcagccaaccgatctgcaggcatgaaccaaggactggctttcggcggcagtaagaagggcaaaagcctggggcaggcctacccttgcagcagtgataaggaatgtgaagttggaagatactgccacagtccccaccaaggatcatcagcctgcatgctctgtaggaggaaaaagaaacgatgccacagagatgggatgtgttgccctggtacccgctgcaataatggaatctgcatcccagtcactgagagcatcctcaccccacatatcccagctctggatggcacccggcatagagatcgcaaccatggtcactattccaaccatgacctgggatggcagaatctaggaaggccacactccaagatgcctcatataaaaggacatgaaggagacccatgcctacggtcatcagactgcattgatgggttttgttgtgctcgccacttctggaccaaaatctgcaaaccagtgctccatcagggggaagtctgtaccaaacaacgcaagaagggttcgcacgggctggagattttccagaggtgtgactgtgcaaagggcctgtcctgcaaagtgtggaaagatgccacctactcttccaaagccagactccatgtatgccagaagatctgataaacactggaagagtcatcactagcagactgtgaatttgtgtatttaatgcattatggcatgatggaaacctggattggaatgcggaagaatgagggatgtggtaagaatgtggagcagaagagggcaggactgaatcaagtagagtcgacaacaaccaaagtactaccagtgcttccgttatgtgcctcatctatgtaaataatgtacacatttgtgaaaatgctattattaaaagaaagcacaccatggaaattactgacgaataccatgtgattttccaagagtttggctagagctgtagggggcatttccttcagattggcaatggctttaaaaataacttaaagctacatttctactcaaagctacagtttaataaattactctcactctctcttaacctaagaggatctctaaaacatggggaacgctgaagaacagggaatgaaaatgttcagcatcattaatcatcttacaaaaatcacctttgccttttctcaaataaaggccttggtagacaagaggaaaaggcagtcagtattttccaaatcacttcaagatactggtatgtcatttaggcataagaacagggtaaacaatcagtagtcctggccaagttgttaaggcaatgggctagaaaaggataaatgtgtctctttaggccactcatttctatttcaaaaacctaatttcacctgaattaataaggttagatgtaagacaaaagcagaatctgtattgtgaaggaatggcattgccaatgtcattcccgctcgagctggagccattaatcatgtgcaatacaagcacagggcagaattgtctcagattgcaaaaccactgaagttgtctgacacatgaggagaactgaatgacgggatgagcacataccctatctgtgatatactgataaatacctttatccttgcatagctgggggccagtagggtgatgcaggcactagagatgtgagtgatatctgtacttcgtggagcacagcagggaagtaggtggaaccttgtcatttgtgcaggctttaaggtcacatgtctgaagcacaggctggattgtcatgactgccatcagaggctccagaagcaaagttcaagctctccatgaaatttgctctcatgcaggtaagctgggtgcaatgcagcctgccctccccatcatgcttttgaggctgtaagataatctcaatatgaggggattttacaaagtgggttcccttgggccaggtgatatgagaggaaccaatctctctaagctttagagtgatgatgtcatcagaagtttatatactaacctctcgatggagtatgtcattactaaagacatagttcctattttctgaaactattgaaaatgaaaaagtaataacatatctctaatctatagaaattccctgaaatcgtttcactattttctgattaaacacatttctgaatactacatctagagcatagagg

SEQ ID NO: 150 - protein, 259 aa, Mus musculus
MAALMRVKDSSRCLLLLAAVLMVESSQLGSSRAKLNSIKSSLGGETPAQSANRSAGMNQGLAFGGSKKGKSLGQAYPCSSDKECEVGRYCHSPHQGSSACMLCRRKKKRCHRDGMCCPGTRCNNGICIPVTESILTPHIPALDGTRHRDRNHGHYSNHDLGWQNLGRPHSKMPHIKGHEGDPCLRSSDCIDGFCCARHFWTKICKPVLHQGEVCTKQRKKGSHGLEIFQRCDCAKGLSCKVWKDATYSSKARLHVCQKI

SEQ ID NO: 151 - DNA, 3385 bp, Mus musculus
gcgaggccggccgggagggaacagcctgctttctccggagtcctgagcagccaaggactgagctgagcaagcggagcgcggtgcctgcgggaagccgggacagcagcagcctcaccgtgccatgcgggcctcaggattgtgccaatgaggacctaaggtgcctgcccgccaaccatcccagcctgcagtgaccatggccctccgcaagaggagtcctcatggcctgggcttcctttgctgctttggaggcagtgaccttcccgagatcgacctccgggacagccacccactgcagtatctggagttctccggtcccatcccgaatcctgaggagctcaatgtccgctttgcagagctggtggatgaattggacctcacagataaaaaccgagaggctgtgtttgcactaccacccgagaagaaatggcagatctactgcagcaagaggaaggagcaggaggatcccaacaagctggcaaccagttggcctgagtactacattgatcgtatcaatgccatggccgccatgcagaatctgtatgaaactgaagatgaggagacagacaagaggaaccaagttgtagaagacctgaagacagccctccggacacaacccatgaggtttgtgacccgcttcatcgatctggaaggcctgacctgtctgctgaatttcctccggggcatggaccacaccacctgtgaaagccgcatccacacatctctcattggctgcatcaaggctctgatgaacaactctcagggccgggcacacgtcctggcacaacctgaggccatcagcatcatcgctcagagcctgcgcacagagaacagcaagaccaaagttgcagtgctggagatcctgggtgcagtgtgccttgtacccggaggccacaagaaggttctacaggccatgctacactatcaggcgtatgcagccgagcgcactcgtttccagactttgctgaatgaactggatcgaagcttaggccgctaccgggatgaggtaaacctgaagacagccatcatgtccttcatcaatgctgtcctcaatgctggcgctggagaggataacctggaattccgcctgcatctccggtatgagttcctgatgctggggatccagccagtgattgataaactccggcaacacgagaatgccatcctggacaagcatttagacttctttgagatggtccggaatgaggatgacctggagctagccaggaggtttgacatggtccacattgacacaaaaagtgcctcccagatgtttgagctgatccacaagaagctgaagcacacggaagcctatccctgcctgctctctgtcctgcaccactgcctgcagatgccctacaagcggaatggtggctacttccagcagtggcagctcctggaccgaatccttcaacagattgtcctccaggatgagcgaggggtggaccctgacctggccccactggaaaactttaatgtcaagaacatcgttaacatgctcatcaatgagaatgaggtgaagcagtggagggaccaggcagagaagtttcggaaagaacacatggaactcatgagccggctggagagaaaagagcgggaatgtgagacaaagacactggagaaggaggagatgatgcggacgctcaacaagatgaaggacaaactggcccgcgagtcccaggagctgcgccaagctaggggacaagtggcagagctggtagcccgacataatgagagctcaaccggcccggtgtcctccccacctccccctggaggtccactcaccttgtcttcctccaggacaaccaatgatctgcctccacccccaccacctctcccctttgatagctgcccacccccacccgcaccacccctccctcccggagggcctcccatccccccaggtgccccaccctgcttcagctcaggcccacccccatctcatgaccccttctccagcaatgaagccccactcaggaaaaagcgcattccccagccttcacacccactgaagtccttcaactgggtcaagctgaatgaggagcgtgtttctggcaccgtgtggaatgaaattgatgactcgcaggtatttcggattctggacctggaagactttgaaaaaatgttctcggcatatcagaggcaccagaaagaactgggctccacggaggacatctacataacctcccgcaaggttaaagagctgtcagtcatcgatggccggagggcccagaactgtatcattcttctctccaagctgaagctttctaatgatgaaatacggcaggccatcttgcggatggatgaacaagaagacctcgctaaggacatgctggagcagcttctcaagttcatccccgagaagagcgacattgatctcctagaagagcacaaacatgagattgagaggatggcgcgtgcagatcgcttcctctatgaaatgagcaggatcgaccattaccagcaacggctacaggccctgttcttcaagaagaagttccaggaacgcctggctgaggccaagcccaaagtagaagccatcctgctggcctcccgggagctgactctcagccagcgcctgaagcaaatgctggaggtggtcctagccatcggcaacttcatgaacaaggggcagcgtggcggtgcctatggcttccgggtagccagtctcaacaagatcgctgacaccaagtccagcattgacaggactcaaggccatggtgcttcatggtgctctttctctgaaccatcccatggcccctcacttccagagctgatactgcccctccctgtctcccacagcctggcagagctggagaaggaggtgagcattctcaggagaggcctccgagcagtggaagtggagttggaatatcagagacaccaggcacgagaccccaatgacaagttcgtccctgtcatgagtgacttcatcacagtgtctagcttcagcttctcagagctggaggaccagctgaatgaggccagggacaagtttgccaaggcactgacacatttcggagagcaggagagtaagatgcaaccggatgaattctttggcatcttcgacaccttcctgcaggccttcttggaggcccggcaggacctggaggccatgcggaggaggaaggaggaagatgagcggagagcacgtatggaattcatgttgaaggaacagcgtgagaaagagagatggcagacgcagaagaaggtcttggctggcggcgccctggatgatatcggcgagtttgatgacctagtgtcagccctgcgctctggagaagttttcgataaggacttaagcaagttcaagcgcaaccggaagcggcccgggagccaggttccggaggtcacccgcgagcgggccataaacaggctaaattattga

SEQ ID NO: 152 - protein, 1063 aa, Mus musculus
MALRKRSPHGLGFLCCFGGSDLPEIDLRDSHPLQYLEFSGPIPNPEELNVRFAELVDELDLTDKNREAVFALPPEKKWQIYCSKRKEQEDPNKLATSWPEYYIDRINAMAAMQNLYETEDEETDKRNQVVEDLKTALRTQPMRFVTRFIDLEGLTCLLNFLRGMDHTTCESRIHTSLIGCIKALMNNSQGRAHVLAQPEAISIIAQSLRTENSKTKVAVLEILGAVCLVPGGHKKVLQAMLHYQAYAAERTRFQTLLNELDRSLGRYRDEVNLKTAIMSFINAVLNAGAGEDNLEFRLHLRYEFLMLGIQPVIDKLRQHENAILDKHLDFFEMVRNEDDLELARRFDMVHIDTKSASQMFELIHKKLKHTEAYPCLLSVLHHCLQMPYKRNGGYFQQWQLLDRILQQIVLQDERGVDPDLAPLENFNVKNIVNMLINENEVKQWRDQAEKFRKEHMELMSRLERKERECETKTLEKEEMMRTLNKMKDKLARESQELRQARGQVAELVARHNESSTGPVSSPPPPGGPLTLSSSRTTNDLPPPPPPLPFDSCPPPPAPPLPPGGPPIPPGAPPCFSSGPPPSHDPFSSNEAPLRKKRIPQPSHPLKSFNWVKLNEERVSGTVWNEIDDSQVFRILDLEDFEKMFSAYQRHQKELGSTEDIYITSRKVKELSVIDGRRAQNCIILLSKLKLSNDEIRQAILRMDEQEDLAKDMLEQLLKFIPEKSDIDLLEEHKHEIERMARADRFLYEMSRIDHYQQRLQALFFKKKFQERLAEAKPKVEAILLASRELTLSQRLKQMLEVVLAIGNFMNKGQRGGAYGFRVASLNKIADTKSSIDRTQGHGASWCSFSEPSHGPSLPELILPLPVSHSLAELEKEVSILRRGLRAVEVELEYQRHQARDPNDKFVPVMSDFITVSSFSFSELEDQLNEARDKFAKALTHFGEQESKMQPDEFFGIFDTFLQAFLEARQDLEAMRRRKEEDERRARMEFMLKEQREKERWQTQKKVLAGGALDDIGEFDDLVSALRSGEVFDKDLSKFKRNRKRPGSQVPEVTRERAINRLNY

SEQ ID NO: 153 - DNA, 3478 bp, Mus musculus
attgacttgtctcttatgattgcagattctcacaaacacaaagataaacacaaagatcgagaacaccggcataaggagcacaagaaggataaggataaggaccgggaaaagtctaagcatagcaacagtgaacataaagattctgaaaagaaacacaaagagaaagagaaaaccaaacacaaagatggcagctcagaaaaacataaagacaaacataaagacagagacaaggaaagacgaaaggaggaaaagattagagctgctggggatgcaaaaataaagaaggaaaaggaaaatggcttctctagtccgccacgaattaaagatgaacctgaggatgatggctattttgctcctccaaaagaggatattaagccattgaagaggcttcgagatgaagatgatgctgattataaacctaagaaaattaagacagaagatatcaagaaggagaagaaaagaaaatcagaagaggaagaggatggtaaacttaaaaagcccaagaataaagataaagataaaaaagttgctgagccagataataagaaaaagaagccgaaaaaggaagaggaacagaagtggaaatggtgggaagaagaacgttatccagaaggcatcaaatggaaattcctagagcataaagggcctgtcttcgctccaccatatgagcctctgccagagagtgtcaagttttactatgatggtaaagttatgaagctgagtcctaaagcagaagaagtagctacattctttgcaaaaatgcttgaccacgaatatactactaaggaaatattcaggaaaaatttctttaaagattggagaaaggaaatgactaatgacgaaaaaaatacgattaccaacctaagcaaatgcgactttacacagatgagccagtatttcaaagcgcagtcagaagctcggaaacagatgagcaaggaagaaaaattgaaaatcaaagaagaaaatgaaaagttattgaaagaatacggcttttgtgtaatggataatcatagagagcggattgccaacttcaagatagagcctccggggcttttccgaggccgagggaaccaccccaagatgggtatgctgaagagaaggatcatgcctgaggacatcatcatcaactgtagcaaagacgcaaaggttccttctccccctcctggacataaatggaaggaagtccgacatgataacaaggttacttggctggtctcctggacagagaatatccaaggttctatcaaatatatcatgctgaatcccagttcacgaatcaagggtgagaaagactggcagaagtatgagactgcgcggcgtctgaagaagtgtgtggacaagatccgaaatcagtatcgggaagactggaagtccaaagagatgaaagttcgtcagagagctgtagcactgtacttcattgataagcttgctctgagagcaggcaatgagaaggaagaaggagagacggcagacactgtgggctgctgttcacttagagtggaacacatcaatttacacccagaattggatggtcaggagtatgtggtggaatttgactttcctgggaaggactcaatcagatactataacaaagtcccagttgagaaacgagtttttaaaaacttacaactgtttatggagaacaagcagcctgaggacgatctttttgatcgacttaatactggtattctaaataaacatcttcaggatctcatggagggcttgactgccaaggtgttccgtacctacaatgcctccatcacactacagcagcagcttaaagagctcacagcccctgatgagaatgtaccagcgaagattctatcttataaccgtgccaatcgagctgttgcaattctttgtaaccaccagagggcgccaccaaagacctttgagaagtcaatgatgaacttgcagtctaagattgatgccaagaaagatcagttagcagatgctcgaagggacctgaaaagtgctaaggctgatgccaaagtcatgaaggatgcaaagaccaagaaggtagtagagtcaaaaaagaaggctgtacagagactagaagagcagttgatgaagctggaagttcaagccacagatcgagaggagaacaaacaaattgccttggggacctccaaactcaattatctggaccctaggatcacagtggcttggtgcaaaaagtggggggtcccaattgagaagatttacaacaaaacccagagggagaagtttgcttgggccattgatatgactgatgaggactacgagttttgaccagtctcggcaggggttctgtgaaaaggaacagtgtggtttggggaagatggataaactgagcctcacttgccctcacacccgagggagaggccacaagtcttaacaaaccaacatctttgcaaaaagatagacctggagatactataagggagagctgagccagttgtcctatggacaacttatttaaaaatatttcagatatcaaaattctagctgtatgatttgttttgaattttgtttttactttcaagagagcaagtggatgggaatttgtcagcatcctgccaggcaaattcagttttgctgcaatgtttggattctctcagctactgtatgtgaagtctgattatattggtgcgtttttacagttagggttttgcaataacttctatattttaatagaaacaaattcctaaactccctcctctcccctatttcaggaatttaaaattaagtagaacaaaacaaaaacccagcgcacctattacagctgtcattctatcgtcatgggaatcagttttcattaaacttgaagcagttgtgacattggcagtgttttggttcagacacctattcacagaaaagcatgatgggaaaatatttcctgacttgagtgttcctttttaaatgtgaatttttatttcgttttaattattttaaaatatttaagccttcttcttgatcttaaagatcgtgtagcttggggttggggagggatgaagggcgagtgagtctaaggataatgtaataatcagtgactgaaaccattttcccatcatcctttgttctgaccattctttgtaccctttaagagatccatctttttctttggaaaccccagtctttcatttgaaagatgttattgtataaaaacttccacaggtcaataaatttagaggaaaatgagcatttggtccaagaaaaacaaaaaccaaaacaaaacaaaaaaggaaaaataatcaagattttagggcttttattttttcttttgtaattgtgtaaaaaatggaaaaaaaaacataaaaaggaaaattttaatgtgaagactttttttttgctataatcattagttttagaggcattgttagttagtgtgtgtgcagagtccattcccacatctttcctcaagtatcttctatttttatcatgaattcccttttaatcaactgtaggttatttaaaataaactcctacaacttaacgg

SEQ ID NO: 154 - protein, 756 aa, Mus musculus
IDLSLMIADSHKHKDKHKDREHRHKEHKKDKDKDREKSKHSNSEHKDSEKKHKEKEKTKHKDGSSEKHKDKHKDRDKERRKEEKIRAAGDAKIKKEKENGFSSPPRIKDEPEDDGYFAPPKEDIKPLKRLRDEDDADYKPKKIKTEDIKKEKKRKSEEEEDGKLKKPKNKDKDKKVAEPDNKKKKPKKEEEQKWKWWEEERYPEGIKWKFLEHKGPVFAPPYEPLPESVKFYYDGKVMKLSPKAEEVATFFAKMLDHEYTTKEIFRKNFFKDWRKEMTNDEKNTITNLSKCDFTQMSQYFKAQSEARKQMSKEEKLKIKEENEKLLKEYGFCVMDNHRERIANFKIEPPGLFRGRGNHPKMGMLKRRIMPEDIIINCSKDAKVPSPPPGHKWKEVRHDNKVTWLVSWTENIQGSIKYIMLNPSSRIKGEKDWQKYETARRLKKCVDKIRNQYREDWKSKEMKVRQRAVALYFIDKLALRAGNEKEEGETADTVGCCSLRVEHINLHPELDGQEYVVEFDFPGKDSIRYYNKVPVEKRVFKNLQLFMENKQPEDDLFDRLNTGILNKHLQDLMEGLTAKVFRTYNASITLQQQLKELTAPDENVPAKILSYNRANRAVAILCNHQRAPPKTFEKSMMNLQSKIDAKKDQLADARRDLKSAKADAKVMKDAKTKKVVESKKKAVQRLEEQLMKLEVQATDREENKQIALGTSKLNYLDPRITVAWCKKWGVPIEKIYNKTQREKFAWAIDMTDEDYEF

SEQ ID NO: 155 - DNA, 1758 bp, Mus musculus
caggtgggaagaaacgagcaagagcagtgtgaagtggaggcagctggagcacaagggcccgtacttcaccccagcctacgagccccttcctgacggagtgcacttcctctacgatggcaaaccgctgaagctgagcttggcagcggaggaggtcgctaccttctatgggaaaatgctgcatcttgagtgtacgagcaaggaagtctttcggaggaacttcttcagtgactggcggaaggagatgacacctgaggagaggaggctcatcacacaccttgacaaatgtgacttcacggagatccataagcacttcctggaaagagctgaggcccgcaggaccctgcccagggagcagaagcagaagctaaaggaagaggccgagaaactgcagcaggagtttggctattgcgttttagatggccacagagaaaaaataggcaatttcaagacggaaccacccggcttgttccgtggccgaggtgaccatcccaagatggggatgttgaagaggagggtcatgccagaggatgtggtcattaactgcagcagggattccaagatccctgagcccccagccggtcaccagtggaaagaggtacgctcagataacacagtcatgtggctggctgcctgggtggagcacatccagaactccttcaagtatgtcatactgaaccccagctccaagccgaagggggagatggattggcagaagtatgaggtagcgcgacgcttgaagggggttgtggacaagatccgtgcccagtatcaggctgactggaagtcaccagaaatgaagaagagacagctggctgtcgccctttattttattgataagctggcactgcggacaggcaatgagaaggaagagggcgagacggccgacaccgtgggctgctgctcgctccgtgtggagcacatccgactgcacgcgcccgcaggtggccaggagcacgttgtagagctggacttcttgggaaaggattccatccgctataagaaccacgtgacggtggagaagctcgtgttccagaaccttcagcacttcatggaagacaaggaccctagggatgacctctttgatgcactgaccacttccagcctgaacaagcacttgcaggacttgatggaagggctgacagccaaggtgttccggacctacaatgcctctgtcactctgcaggagcagctgcgggtgctgacccgtgcggaagacagcgtaacctgcaaagtcttagcttacaaccgggcgaaccgggctgtggcagtcctctgtaaccatcagagagcagttcccaagaccttcgagaagtcgatgcagacacttcaaaaaaagattgagacaaagaaggcacaggtggctgaggcacaggtagagctgcagaaagcagagactgacctgagaatgagaggggacagcaaacccaaaagtttccttcagaagcagcgacgattgttaaagctggaagaacagctggcccgattgtgcgcgaaggccacagacaaggaggagaataagcaggtggccctgggcaccgccaagctcaactatctggaccccaggatcagcatcgcctggtgtaagagatttggagtgcctgtggagaagatctacaacaagacccagagagagaggtttgcctgggccttcaaccaggcaggtgaagactttgaattctaagcagcctctttgccgctgaaatgttctttctcactgtgaagcagtattgtggtttttctagaataaaatgtcggggg

SEQ ID NO: 156 - protein, 558 aa, Mus musculus
WEETSKSSVKWRQLEHKGPYFTPAYEPLPDGVHFLYDGKPLKLSLAAEEVATFYGKMLHLECTSKEVFRRNFFSDWRKEMTPEERRLITHLDKCDFTEIHKHFLERAEARRTLPREQKQKLKEEAEKLQQEFGYCVLDGHREKIGNFKTEPPGLFRGRGDHPKMGMLKRRVMPEDVVINCSRDSKIPEPPAGHQWKEVRSDNTVMWLAAWVEHIQNSFKYVILNPSSKPKGEMDWQKYEVARRLKGVVDKIRAQYQADWKSPEMKKRQLAVALYFIDKLALRTGNEKEEGETADTVGCCSLRVEHIRLHAPAGGQEHVVELDFLGKDSIRYKNHVTVEKLVFQNLQHFMEDKDPRDDLFDALTTSSLNKHLQDLMEGLTAKVFRTYNASVTLQEQLRVLTRAEDSVTCKVLAYNRANRAVAVLCNHQRAVPKTFEKSMQTLQKKIETKKAQVAEAQVELQKAETDLRMRGDSKPKSFLQKQRRLLKLEEQLARLCAKATDKEENKQVALGTAKLNYLDPRISIAWCKRFGVPVEKIYNKTQRERFAWAFNQAGEDFEF

SEQ ID NO: 157 - DNA, 949 bp, Mus musculus
actgtttgctgctttaggtgtctcttttcctccctctctatctctactctccaacatgaaggcgctgagcccggtgcgcggctgctacgaggcggtgtgctgcctgtcggaacgtagcctggccattgcgcgaggccgcggtaagagcccgtcgaccgaggagcctcttagcctcttggacgacatgaaccactgctactcgcgcctgcgggaactggtgccgggagtcccgcgaggcactcagcttagccaggtggaaatcctgcagcgtgtcatagactacatcctcgaccttcaggtggtcctggcagagccggcgcctggacccccggacggtccgcatctcccgatccagacagctgagctcactccggaacttgtgatctccaaggacaagaggagcttttgccactgacccggtcgtcctggcacctcccgaacgcaggtgctggcgcccgttccgcttgggaccctgggactctgggaccctctctccagccggaagcctgagggcatggatgagcttcgatcttaacccagccctcttcacttaccctgaactcaacgcctcgaggctggacctggagcccgagagaaggactgaacttgggtggcctgaagagctagcacacgctggtcagcagctgggcaacgtcactctgtccccaccctgactcaagtctaaaagactggcttttccgagaatggggtgtcgagagggtgtggggggatgcgagtggctgccctgcgcactctgccaaggcagcataagagctgttcttctggtttccttggagaaaagctctgctgccctgattatgaactctataatagagtatatagcttttgtaccttttttacaggaaggtgactttctgtaatcatgtgatgtatattaaactttttataaaagttaacattttgcataataaaccatttttgaacactt

SEQ ID NO: 158 - protein, 119 aa, Mus musculus
MKALSPVRGCYEAVCCLSERSLAIARGRGKSPSTEEPLSLLDDMNHCYSRLRELVPGVPRGTQLSQVEILQRVIDYILDLQVVLAEPAPGPPDGPHLPIQTAELTPELVISKDKRSFCH

SEQ ID NO: 159 - DNA, 1931 bp, Mus musculus
ggcgggaggaaagcgcggtgaagccagattaggagcagcgagcacttggggacttagggccacaggacaccgcacaagatcgaccgactttttctggagaaccgcagaacgggcacgctggggtcgctggggctggccatggtgatggaggtgggcatcctggacgccggggggctgcgcgcgctgctgcgagagggcgccgcgcagtgcctgttgttggattgtcgctccttcttcgctttcaacgccggccacatcgcgggctcagtgaacgtgcgcttcagcaccatcgtgcggcgccgcgccaagggcgccatgggcctggagcatatcgtgcccaacgctgaactgcgtggccgcctgctggccggagcctaccacgccgtggtgctgctggacgagcgcagcgcctccctggacggcgccaagcgcgacggcaccctggccctggccgcgggcgcgctctgccgagaggcgcgctccactcaagtcttctttctccaaggaggatatgaagcgttttcggcttcctgccctgagctgtgcagcaaacagtccacccccacggggctcagcctccccctgagtactagtgtgcctgacagtgcagaatccggatgcagctcctgtagtacccctctctacgatcaggggggcccagtggagatcctgtccttcctgtacctgggcagtgcctatcacgcttctcggaaggatatgcttgacgccttgggcatcaccgccttgatcaacgtctcagccaattgtcctaaccactttgagggtcactaccagtacaagagcatccctgtggaggacaaccacaaggcagacatcagctcctggttcaacgaggctattgacttcatagactccatcaaggatgctggagggagagtgtttgttcattgccaggccggcatctcccggtcagccaccatctgccttgcttacctcatgaggactaaccgggtaaagctggacgaggcctttgagtttgtgaagcagaggcggagtatcatctccccgaacttcagcttcatgggccagctgctgcagtttgagtcccaagtgctagcccctcactgctctgctgaagctgggagccctgccatggctgtccttgaccggggcacctctactaccacagtcttcaacttccctgtttccatccccgtccaccccacgaacagtgccctgaactaccttaaaagccccatcaccacctctccaagctgctgaagggcaaggggaggtgtggagtttcacttgccaccgggtcgccactcctcctgtgggaggagcaatgcaataactctgggagaggctcatgggagctggtccttatttatttaacacccccctcaccccccaactcctcctgagttccactgagttcctaagcagtcacaacaatgacttgaccgcaagacatttgctgaactcggcacattcgggaccaatatattgtgggtacatcaagtccctctgacaaaacagggcagaagagaaaggactctgtttgaggcagtttcttcgcttgcctgtttttttttttctagaaacttcatgcttgacacacccaccagtattaaccattcccgatgacatgcgcgtatgagagtttttacctttatttatttttgtgtaggtcggtggtctgccttcacaaatgtcattgtctactcatagaagaaccaaatacctcaattttgtgtttgcgtactgtactatcttgtaaatagacccagagcaggtttgctttcggcactgacagacaaagccagtgtaggtttgtagctttcagttatcgacagttgtatgtttgtttatttatgatctgaagtaatatatttcttcttctgagaagacattttgttactgggatgactttttttatacaacagaataaattatgacgtttctattga

SEQ ID NO: 160 - protein, 367 aa, Mus musculus
MVMEVGILDAGGLRALLREGAAQCLLLDCRSFFAFNAGHIAGSVNVRFSTIVRRRAKGAMGLEHIVPNAELRGRLLAGAYHAVVLLDERSASLDGAKRDGTLALAAGALCREARSTQVFFLQGGYEAFSASCPELCSKQSTPTGLSLPLSTSVPDSAESGCSSCSTPLYDQGGPVEILSFLYLGSAYHASRKDMLDALGITALINVSANCPNHFEGHYQYKSIPVEDNHKADISSWFNEAIDFIDSIKDAGGRVFVHCQAGISRSATICLAYLMRTNRVKLDEAFEFVKQRRSIISPNFSFMGQLLQFESQVLAPHCSAEAGSPAMAVLDRGTSTTTVFNFPVSIPVHPTNSALNYLKSPITTSPSC

SEQ ID NO: 161 - DNA, 1436 bp, Mus musculus
gatatatttattctgtattgataaaaagcaagcccacattttctttttctttctttcttttcttaagcttaactctgcaaccatttgtcttttataaaccattaagctacacacaagggccactataaacaagactccatgttttaatttatgtttttaaagctatggaaggggagaatgaagtggtgatatttacaaaaaaaaaaaatctaaaaggagaaaaaaaaaagaaaaacagggaaaaataaatttaaaaaaagagctcgtatggacagaataggaatgccagttagattttttagtgaactaagggtcggcttctgcgccttaaagcttatcagtggtagttagctcagacagtgcattttcaatatctaacttaacacgccaccccttagcagtgcaagcttcgttctctcttttgtatggttgtcttaagtaactgtgtaaataagtgtagcctggaaagttaccaagcgacatacatgatcacgtttgcccttgtactcgaaaagccagtgcctctagacagattgtttaaaaacaaacaaaaacaaaacaaaacaaaacaaaacaacatgcatctttaaacccgatcttattcttttacttaacatcaacttctcccgaagccagcggcctctgagagtggagcaacacatgttccgagcgagaatctccttcaagacttcacaggacagggtccaggcacagaattccatatatgccctccagtttaccaagccaaaatctcgctcgcactccaccgtcaagagatccaagcttactcaagctggaatcctagatattaactctagatctgggctcaaaaacccaaataaagcaaacccacaaaggcaagtaggtgtgctgttccgggctcccaaatcacacgggtctatacccgcaagactccgcaaggtcccaaatcacacaggggtctgtatccgcaagactccgcaaggttggaaagttctatattcagtcaacaggtaaagtgctttggagttcagtgtgaaaggaaactgggagagaggaagggaaggttgaggcttcaaactcagctttctatgggaaattttgctttcaactgggaagtgttcttaaagaatccatagcaaagattcagccagcaaggctctgagggggcgtgttcctgctgacctctgcccttctgtttctgtatgtagttataaatactgtagatttcttttgtgattttttttttgccaaagttgttttatttatacattttaatgtcttaagattttcgatctcacacacgcaaagaattatactgcatattttgcaaagaaataaaaagcgcactacctttagcttgcacatacttgcaaagttaattcaaaggctttctgtttgtttgttttaatggggattttgtaaaatatccatataaataatgtatttatctttgg

SEQ ID NO: 162 - protein, 111 aa, Mus musculus
MFRARISFKTSQDRVQAQNSIYALQFTKPKSRSHSTVKRSKLTQAGILDINSRSGLKNPNKANPQRQVGVLFRAPKSHGSIPARLRKVPNHTGVCIRKTPQGWKVLYSVNR

SEQ ID NO: 163 - DNA, 3851 bp, Mus musculus
ctggtcatgttctgttaacgcagcttgctgggtttctatgtaagagcatgatgaatgtcattctttgtgatgggaccttcatcgaaagaggcacagatcttagatgagttttgcaatgtgaagttctgcatagatgccagtcaaccagatgtaggaagctggctcaagtacatcagattcgctggctgctatgatcagcacaaccttgttgcatgccagataaatgatcagatattctaccgagtagtcgcagacattgcgcctggggaagagctcttgctgttcatgaagagtgaagaggacccgcacgaacccatggcgcctgacatccacgaagaacggcagcaccgctgtgaggactgtgaccagctctttgaatccaaggcagagctagccgatcaccagaagttcccatgcagcacacctcactcggccttctccatggtggaggaggacttgcaacaaaacctggagagtgagagcgatctccgagagatccatggcaaccaggactgtaaggaatgtgaccgagttttccccgatctgcaaagcttggagaagcacatgctgtcacatactgaggagagggaatacaagtgtgatcagtgtcccaaggcatttaactggaagtccaatttaattcgccaccagatgtcacatgacagtggaaagcactatgagtgtgaaaactgtgccaaggttttcacggaccctagcaaccttcagcgacacattcgatctcagcatgttggtgcccgggctcatgcttgccccgagtgtggtaaaacatttgccacttcgtcaggcctcaaacagcacaagcacatccacagcagtgtgaagccctttatctcattctctcaatcaatgtacccatttcctgatagagacttgaggtcgttacctttgaaaatggagccccaatcaccaagtgaagttaagaaactgcagaagggaagctctgagtccccttttgacctcaccactaagagaaaggatgagaagcccttgacttcaggcccctcgaagccttcaggaacaccagccacaagccaagaccagcccctggatctaagtatgggcagtaggggtagagccagtgggacaaagttgactgagcctcgaaaaaaccatgtgtttggggaaaagaaaggaagcaacatggatactaggccatcttcagatggctccttgcagcatgccagacccactcccttcttcatggaccccatttatagagtagagaaaagaaagttaactgacccgcttgaagctttgaaagaaaaatacttgagaccttctccaggattcttgtttcacccgcaaatgtcagcaattgagaacatggcagaaaagctggaaagcttcagcgccctcaaacctgaggccagcgagctcctgcagtccgtgccctccatgttcagcttccgagctcctcccaacaccctgccagagaacctgctgcggaaggggaaagagcgctacacctgcaggtactgtggcaagatatttccaaggtctgcgaacctaacacggcacttgagaacccacacaggagagcaaccttacagatgcaaatactgtgatagatcattcagcatttcttccaacctgcagcgacatgtgcgcaacatccacaacaaggagaagccatttaagtgtcatttatgtgacagatgttttggtcaacaaaccaatcttgacagacacctgaagaaacatgagaacggcaacatgtctgggacggcaacgtcctcgcctcactcagagctagaaagcgcaggcgcaatcctggatgacaaagaagatgcgtactttacagagatccgcaatttcatcgggaacagcaaccatggtagccagtctcctcggaacatggaagagaggatgaatggcagtcacttcaaggataaaaaggctttggcaaccagccaaaattcagatttattggatgatgaagaagtagaagatgaggtgttgttggatgaggaggatgaagacaatgatattcctggaaagcccagaaaggagctaggggtgactcgtttagacgaggagatcccggaggatgactacgaagaagctggtgccctggagatgagctgtaaggcgtccccggtgaggtataaagaggaagactataaatctggcctttctgctctagatcacataaggcacttcacagatagcctcaaaatgagggaaatggaagagaatcaatacactgacgctgagctgtcctccattagttcttctcatgtgccagaggagcttaaacagacgttacacagaaagtccaaatcacaggcatatgctatgatgttgtcactgtctgacaaggattccctccatcccacctcccacagttcctccaacgtgtggcacagcatggcaagggctgcagcagaatccagtgccatccagtccataagccatgtatgacattgtcaaggttgaccagagtgggaccaagtccaacggtagcatggctctttcatacagaacaatttacaagactgctgagcaggatgccttataaccctgaagggtcacgcatttaaagtctggtgaccttaaactgaatgagtaaagaaagagagagaaaaaggaagctatttattctcaatattttgttttgcacagccaaggcagctgctgacttctggaggatcaattaatccaaaatgattggaggggaaaggaaacctcaccagggaaggcatctttcattccccctgccgcagggcatgggtggctgagaggagcagttgaaatggcagcattgatataaatggacatttcatagaaatcaaactctactctacaggatcacctgatctgactgggaacagtggcttctaactaccagattttttttttcctttttaaagttttatgtaatttaatcttttgcagatggaagtagtcagaagaaatgcacaatgattataggaagtgatagcaggattttttgtcaccccccacaccctcttaactttggccttcttgagtacattgtttaaaactagggggaaaaaagggtatgtgtatattgtaaactatggatgctcatgcagagaggttaagtcggtgacataactgtttatcaccactgtaccactaatacaatgtttgccaaatccttgtaatgacatcttaattttagacaatcatgtcactgtttttaatgtttcaatttttttgtgtgttgtgtgtatcatgtatttatttgttggcaaactatggtttgttgatcaaaaagagcactgttcccgtcagccactattttatgatgtctgaggcacacccctttctgaattccaaggaccaaggtgacatgacctgtgtatgggagtgcccaatagtgtttggcttttcttaacattccttcctttttgttgttgttgttttgttttcctttttaatgaactaaataccaatagatgcaacttagtttttgtaatactgaaatcgattcaattgtataaatgattataatttctttcatggaagcatgatccttctgattaagaactgtaccccatattttatgctggttgtctgcaagcttgtgcgatgatgttatgttcatgttaatcctatttgtaaaatgaagtgttcctgaccttatgttaaaaagagagaagtaaataacagacattattcagttattttgtcctttatcgaaaaaccagatttcatttttcctttttgtttgtgatctcatttggaaataattggcaagttgaggtactttcttcccatgctttgtacaatataaactgttatgcctttcagtgcgttactgtgggaggagcaactaaaaaaaaaaataaagacttccaaaaatc

SEQ ID NO: 164 - protein, 795 aa, Mus musculus
MSFFVMGPSSKEAQILDEFCNVKFCIDASQPDVGSWLKYIRFAGCYDQHNLVACQINDQIFYRVVADIAPGEELLLFMKSEEDPHEPMAPDIHEERQHRCEDCDQLFESKAELADHQKFPCSTPHSAFSMVEEDLQQNLESESDLREIHGNQDCKECDRVFPDLQSLEKHMLSHTEEREYKCDQCPKAFNWKSNLIRHQMSHDSGKHYECENCAKVFTDPSNLQRHIRSQHVGARAHACPECGKTFATSSGLKQHKHIHSSVKPFISFSQSMYPFPDRDLRSLPLKMEPQSPSEVKKLQKGSSESPFDLTTKRKDEKPLTSGPSKPSGTPATSQDQPLDLSMGSRGRASGTKLTEPRKNHVFGEKKGSNMDTRPSSDGSLQHARPTPFFMDPIYRVEKRKLTDPLEALKEKYLRPSPGFLFHPQMSAIENMAEKLESFSALKPEASELLQSVPSMFSFRAPPNTLPENLLRKGKERYTCRYCGKIFPRSANLTRHLRTHTGEQPYRCKYCDRSFSISSNLQRHVRNIHNKEKPFKCHLCDRCFGQQTNLDRHLKKHENGNMSGTATSSPHSELESAGAILDDKEDAYFTEIRNFIGNSNHGSQSPRNMEERMNGSHFKDKKALATSQNSDLLDDEEVEDEVLLDEEDEDNDIPGKPRKELGVTRLDEEIPEDDYEEAGALEMSCKASPVRYKEEDYKSGLSALDHIRHFTDSLKMREMEENQYTDAELSSISSSHVPEELKQTLHRKSKSQAYAMMLSLSDKDSLHPTSHSSSNVWHSMARAAAESSAIQSISHV

SEQ ID NO: 165 - DNA, 1511 bp, Mus musculus
atgaagatgggacattttgaaatggtcaccacgctgctggcagccgcagttctaatggacatcttccaggtgaaggcggaagtgttagacatggcagagaacgcgtttgacgacgaatacctgaagtgcaaaagcagaatggaatcgaagtatattccgcagatgaagagggaggagtgggcaaacgatgcgctcctgcggatggtgtgggacaatgcggagatccagtgggaagcgcggaaggctcagctcttcctccctagaaacttcaaggacacctatggcatagctctgacggcctacgtgaatgaggctcaagagcagacttccttctaccacacattcagcagcgctgtgaagatggccggcctgtcccgaagacggtacatctataacttcccgttcaaggcttttcatttttacttggtgagagccctgcagctgctgagacgaccttgcgagaaaagttacaaaactgtggtgtacagcacaagcccagacatttcattcacattcggagagcaaaaccaagccaggctgggtaacttcacgttggcgtattcagccaaaccggagacagccgacaaccaacgggtgctaaccatccagacctgctttggagtcgccgtgggaaagtttcttaataaagaagacgacagcgttgttttaatacctctgagtgaggtttttcaagtgtcgaggaaaggaactagcaacgaccttgtccttcagagcataaacagtacctgcagctactacgagtgcgcattcctcgggggtctgaaaacagaaaattgtatcgcgaacgcagaatatattgaccctaggtatctctacaacccaggtgagtacacacttctacaaacaacccagcaaggatgttccatctctctttcctccatggtgcctggaatcaaaccctgggccccctgcaagctaggaacaaccttgaccctgacagaatgccagaaattaaagtgctacaaacagaggaaaatcctctcctgccggatgaaaagcctgacagaagtcgaggaaaggccaacaatcctagtaagaaatacctccttttctttgaagaatgctctgaaatataaaactgtcaagctaattctttttttcattaaaagctccaggtctggttccaggtccgaaatcccatccctctgcatcctctggcaatacgctccttccatcagtcatggcatccaccattttactcgttgcttctgctgtaaacttcatcgagctatagcttgaaacgctatcttaatctttatctgaaagactgctatggggatcccacaggaagtcaagagaaaaaaatgtagttttccttggacagacttgactgtataaaagaactgtatatttgttcctcattttacaatttaaaaagctggtccagatagtatcatagaattaacttttcatttctgtattaattttaggactgcaaaaatcccaaagctatatactttttgatcggattcaataaaaactttaagttt

SEQ ID NO: 166 - protein, 419 aa, Mus musculus
MKMGHFEMVTTLLAAAVLMDIFQVKAEVLDMAENAFDDEYLKCKSRMESKYIPQMKREEWANDALLRMVWDNAEIQWEARKAQLFLPRNFKDTYGIALTAYVNEAQEQTSFYHTFSSAVKMAGLSRRRYIYNFPFKAFHFYLVRALQLLRRPCEKSYKTVVYSTSPDISFTFGEQNQARLGNFTLAYSAKPETADNQRVLTIQTCFGVAVGKFLNKEDDSVVLIPLSEVFQVSRKGTSNDLVLQSINSTCSYYECAFLGGLKTENCIANAEYIDPRYLYNPGEYTLLQTTQQGCSISLSSMVPGIKPWAPCKLGTTLTLTECQKLKCYKQRKILSCRMKSLTEVEERPTILVRNTSFSLKNALKYKTVKLILFFIKSSRSGSRSEIPSLCILWQYAPSISHGIHHFTRCFCCKLHRAIA

SEQ ID NO: 167 - DNA, 1404 bp, Mus musculus
atgaagatgggacattttgaaatggtcaccacgctgctggcagccgcagttctaatggacatcttccaggtgaaggcggaagtgttagacatggcagagaacgcgtttgacgacgaatacctgaagtgcaaaagcagaatggaatcgaagtatattccgcagatgaagagggaggagtgggcaaacgatgcgctcctgcggatggtgtgggacaatgcggagatccagtgggaagcgcggaaggctcagctcttcctccctagaaacttcaaggacacctatggcatagctctgacggcctacgtgaatgaggctcaagagcagacttccttctaccacacattcagcagcgctgtgaagatggccggcctgtcccgaagacggtacatctataacttcccgttcaaggcttttcatttttacttggtgagagccctgcagctgctgagacgaccttgcgagaaaagttacaaaactgtggtgtacagcacaagcccagacatttcattcacattcggagagcaaaaccaagccaggctgggtaacttcacgttggcgtattcagccaaaccggagacagccgacaaccaacgggtgctaaccatccagacctgctttggagtcgccgtgggaaagtttcttaataaagaagacgacagcgttgttttaatacctctgagtgaggtttttcaagtgtcgaggaaaggaactagcaacgaccttgtccttcagagcataaacagtacctgcagctactacgagtgcgcattcctcgggggtctgaaaacagaaaattgtatcgcgaacgcagaatatattgaccctaggtatctctacaacccaggtgagtacacacttctacaaacaacccagcaaggatgttccatctctctttcctccatggtgcctggaatcaaaccctgggccccctgcaagctaggaacaaccttgaccctgacagaatgccagaaattaaagtgctacaaacagaggaaaatcctctcctgccggatgaaaagcctgctccaggtctggttccaggtccgaaatcccatccctctgcatcctctggcaatacgctccttccatcagtcatggcatccaccattttactcgttgcttctgctgtaaacttcatcgagctatagcttgaaacgctatcttaatctttatctgaaagactgctatggggatcccacaggaagtcaagagaaaaaaatgtagttttccttggacagacttgactgtataaaagaactgtatatttgttcctcattttacaatttaaaaagctggtccagatagtatcatagaattaacttttcatttctgtattaattttaggactgcaaaaatcccaaagctatatactttttgatcggattcaataaaaactttaagttt

SEQ ID NO: 168 - protein, 376 aa, Mus musculus
MKMGHFEMVTTLLAAAVLMDIFQVKAEVLDMAENAFDDEYLKCKSRMESKYIPQMKREEWANDALLRMVWDNAEIQWEARKAQLFLPRNFKDTYGIALTAYVNEAQEQTSFYHTFSSAVKMAGLSRRRYIYNFPFKAFHFYLVRALQLLRRPCEKSYKTVVYSTSPDISFTFGEQNQARLGNFTLAYSAKPETADNQRVLTIQTCFGVAVGKFLNKEDDSVVLIPLSEVFQVSRKGTSNDLVLQSINSTCSYYECAFLGGLKTENCIANAEYIDPRYLYNPGEYTLLQTTQQGCSISLSSMVPGIKPWAPCKLGTTLTLTECQKLKCYKQRKILSCRMKSLLQVWFQVRNPIPLHPLAIRSFHQSWHPPFYSLLLL

SEQ ID NO: 169 - DNA, 1372 bp, Mus musculus
atgaagatgggacattttgaaatggtcaccacgctgctggcagccgcagttctaatggacatcttccaggtgaaggcggaagtgttagacatggcagagaacgcgtttgacgacgaatacctgaagtgcaaaagcagaatggaatcgaagtatattccgcagatgaagagggaggagtgggcaaacgatgcgctcctgcggatggtgtgggacaatgcggagatccagtgggaagcgcggaaggctcagctcttcctccctagaaacttcaaggacacctatggcatagctctgacggcctacgtgaatgaggctcaagagcagacttccttctaccacacattcagcagcgctgtgaagatggccggcctgtcccgaagacggtacatctataacttcccgttcaaggcttttcatttttacttggtgagagccctgcagctgctgagacgaccttgcgagaaaagttacaaaactgtggtgtacagcacaagcccagacatttcattcacattcggagagcaaaaccaagccaggctgggtaacttcacgttggcgtattcagccaaaccggagacagccgacaaccaacgggtgctaaccatccagacctgctttggagtcgccgtgggaaagtttcttaataaagaagacgacagcgttgttttaatacctctgagtgaggtttttcaagtgtcgaggaaaggaactagcaacgaccttgtccttcagagcataaacagtacctgcagctactacgagtgcgcattcctcgggggtctgaaaacagaaaattgtatcgcgaacgcagaatatattgaccctaggtatctctacaacccagatatggacaatcagaagcttgaagactctggtaggaacaaccttgaccctgacagaatgccagaaattaaagtgctacaaacagaggaaaatcctctcctgccggatgaaaagcctgacagaagtcgaggaaaggccaacaatcctactccaggtctggttccaggtccgaaatcccatccctctgcatcctctggcaatacgctccttccatcagtcatggcatccaccattttactcgttgcttctgctgtaaacttcatcgagctatagcttgaaacgctatcttaatctttatctgaaagactgctatggggatcccacaggaagtcaagagaaaaaaatgtagttttccttggacagacttgactgtataaaagaactgtatatttgttcctcattttacaatttaaaaagctggtccagatagtatcatagaattaacttttcatttctgtattaattttaggactgcaaaaatcccaaagctatatactttttgatcggattcaataaaaactttaagttt

SEQ ID NO: 170 - protein, 371 aa, Mus musculus
MKMGHFEMVTTLLAAAVLMDIFQVKAEVLDMAENAFDDEYLKCKSRMESKYIPQMKREEWANDALLRMVWDNAEIQWEARKAQLFLPRNFKDTYGIALTAYVNEAQEQTSFYHTFSSAVKMAGLSRRRYIYNFPFKAFHFYLVRALQLLRRPCEKSYKTVVYSTSPDISFTFGEQNQARLGNFTLAYSAKPETADNQRVLTIQTCFGVAVGKFLNKEDDSVVLIPLSEVFQVSRKGTSNDLVLQSINSTCSYYECAFLGGLKTENCIANAEYIDPRYLYNPDMDNQKLEDSGRNNLDPDRMPEIKVLQTEENPLLPDEKPDRSRGKANNPTPGLVPGPKSHPSASSGNTLLPSVMASTILLVASAVNFIEL

SEQ ID NO: 171 - DNA, 1309 bp, Mus musculus
atgaagatgggacattttgaaatggtcaccacgctgctggcagccgcagttctaatggacatcttccaggtgaaggcggaagtgttagacatggcagagaacgcgtttgacgacgaatacctgaagtgcaaaagcagaatggaatcgaagtatattccgcagatgaagagggaggagtgggcaaacgatgcgctcctgcggatggtgtgggacaatgcggagatccagtgggaagcgcggaaggctcagctcttcctccctagaaacttcaaggacacctatggcatagctctgacggcctacgtgaatgaggctcaagagcagacttccttctaccacacattcagcagcgctgtgaagatggccggcctgtcccgaagacggtacatctataacttcccgttcaaggcttttcatttttacttggtgagagccctgcagctgctgagacgaccttgcgagaaaagttacaaaactgtggtgtacagcacaagcccagacatttcattcacattcggagagcaaaaccaagccaggctgggtaacttcacgttggcgtattcagccaaaccggagacagccgacaaccaacgggtgctaaccatccagacctgctttggagtcgccgtgggaaagtttcttaataaagaagacgacagcgttgttttaatacctctgagtgaggtttttcaagtgtcgaggaaaggaactagcaacgaccttgtccttcagagcataaacagtacctgcagctactacgagtgcgcattcctcgggggtctgaaaacagaaaattgtatcgcgaacgcaggtaggaacaaccttgaccctgacagaatgccagaaattaaagtgctacaaacagaggaaaatcctctcctgccggatgaaaagcctgacagaagtcgaggaaaggccaacaatcctactccaggtctggttccaggtccgaaatcccatccctctgcatcctctggcaatacgctccttccatcagtcatggcatccaccattttactcgttgcttctgctgtaaacttcatcgagctatagcttgaaacgctatcttaatctttatctgaaagactgctatggggatcccacaggaagtcaagagaaaaaaatgtagttttccttggacagacttgactgtataaaagaactgtatatttgttcctcattttacaatttaaaaagctggtccagatagtatcatagaattaacttttcatttctgtattaattttaggactgcaaaaatcccaaagctatatactttttgatcggattcaataaaaactttaagttt

SEQ ID NO: 172 - protein, 350 aa, Mus musculus
MKMGHFEMVTTLLAAAVLMDIFQVKAEVLDMAENAFDDEYLKCKSRMESKYIPQMKREEWANDALLRMVWDNAEIQWEARKAQLFLPRNFKDTYGIALTAYVNEAQEQTSFYHTFSSAVKMAGLSRRRYIYNFPFKAFHFYLVRALQLLRRPCEKSYKTVVYSTSPDISFTFGEQNQARLGNFTLAYSAKPETADNQRVLTIQTCFGVAVGKFLNKEDDSVVLIPLSEVFQVSRKGTSNDLVLQSINSTCSYYECAFLGGLKTENCIANAGRNNLDPDRMPEIKVLQTEENPLLPDEKPDRSRGKANNPTPGLVPGPKSHPSASSGNTLLPSVMASTILLVASAVNFIEL

SEQ ID NO: 173 - DNA, 3386 bp, Mus musculus
ggcggcgagagctactgtcgggcacagagagcgagcgacgcgggttctggggttcttactgaagtgcggcggcggcggcggcaagttgtggggcggcagcatgttcagctggatggggcggcaggctggcgggcgcgagcgctcgggcggcatggacgcggtgcagacggtgacgggcggcctgcgctctctgtaccagcgcaaggtgctgccgctggaggaggcgtaccgcttccacgagtttcactcgccagcgctggaggacgccgacttcgaaaacaagcccatgatcctgctggtgggccagtacagcacgggcaagaccacgttcatcagatacttactggagcaagatttcccaggcatgagaattggtccagagccaaccacagattccttcattgctgtgatgtatggggagactgagggaagcacccctgggaatgctttagttgtggatcccaaaaagccattccgaaagcttagtcgctttggaaatgctttcctgaacagattcatgtgctcacagctgcccaaccaagttctgaagagcatcagcatcatcgacagtcctggcattctgtctggggagaagcagcgcataagccgagggtatgacttctgccaggtcttacagtggtttgccgagagggttgacaggatcatcctgctctttgacgctcacaaattggacatctcagatgagttctcagaggcgatcaaggccttccggggccaggatgacaaaatccgagtggtactgaacaaggctgaccaagtggatacacagcagctgatgcgagtctatggggccctcatgtggtctctgggcaaggtcatcaacacacctgaagtacttcgagtctacattggttcattttgggcacagcccctgcaaaacaccgacaaccgccggctctttgaggctgaagcacaggacctcttccgagacatccagagcctgccccagaaggctgcagtgcgcaaactcaatgacctcatcaagcgtgcaaggttggccaaagtccacgcctacatcatcagctacctgaagaaggaaatgccaaatatgtttggaaaagaaaataagaagcgagaacttatctacaggctcccggaaatctatgttcagctgcagcgagaataccagatttctgcaggggacttccctgaggtcaaggccatgcaggagcagctggagaactacgacttcaccaagttccactcactgaagcccaagctgatcgaggctgtggacaacatgctgaccaacaagatctcatccctgatgggcctcatcagccaggaggagatgaacatgcccacgcagatggtgcagggcggcgcctttgatggcaccacagaggggcccttcaaccagggctatggggagggggccaaggagggggccgatgaggaagagtgggtcgtggctaaagacaagccggtgtatgacgaactcttttacacgctgtcacccatcaatggcaagatatcgggtgtcaacgccaagaaggagatggtgacctccaagctgcccaacagtgtcctgggcaagatctggaagctggccgactgcgactgcgacggcatgctagacgaggaggagttcgcgctggccaagcacctcatcaagatcaagctggacggctacgagctgcccaacagcctgcccccacacctggtgcccccctcccacaggaagtccctgccaaaggctgactgagggcccacagctggggtgggaggggtggtgcctgggcctgaagtctgctctgccactgactcgctgaatgtccgtggccaaagttccgtcctctccgtgactcggttttctcatatgtagggcagggagggcagatcccggacactagatgaggtctttatgcctctaaaatcctgaagtttctatcaaaatattgagaagagcagtatatagatatggagatcaaagaataagaagaaaaaaaaattatccaaagaagaatgtaggtgtgacacaggctgtcgaagtctgggcactcagggattgagccagggactcactggagccatcagagctgtgctggacagtaagttaccatgagcctctttgtccttcagggggcactgagaggcagcaaaggacctaatttatttttcttactgtgtttcctgctctatctagagaggaaaaggaacagaacagagagtttctgccttccatagattaaaaaccaaagagaagactaatacccaggtttgaaagaggatgtgccatgtctgtgtgggcccatctgcagtccccatcagagtaggcagccaggcaaggagaacctgtcttgtcccagcacctgctgcctgaccctgccaagcctccctcagttaggaattcataattcacaaactgtcagcccctggcaagacctgtgtgcccttcaaccactgaatgtccccaaagcttttttggtaggtggcagaatttaaattcaataaagcttgtcttgatttgtgtggagtcccagagccttcggacccaggtaaagcgagagcagccccatcctgagctgtgagtggaagagaccagcgccctggtgattgatgatgttgtttgatttttaaagaaagaaatgcatttcattgtgtccaggtatgtttttctcacaagatgtagcctctctgaagaaatctctgtaataccttttcttccaagctagacacctcacatcaggagtgcctatctgggccaggattggtctacttctgcctcttcagtgttctttcccaagcccacctagtcaggcgccgcaggggctgcctcctactgtaccctgctctgtggcccagcagaagaacactgtcaccatcacttacgaagtaggaatcacagcgcagcagtgaccacatgaccaacagcagcagaaatgaatgaatctgaacagcatccctgaatcttcacaaaaacatactccaatccctaattgtctgcatctggcaacctcagggtcagaaccggggatttaagagaaaatgctaagagctcacacccatttcgcagcacttgggaggcagatgcagggggattaccatgagttcgaagccagtctgaactacatcgtttgttttatggtagtctgtgtaaaacagaatacttacgccaccattcacacttcctatcttactttctaaataatggttttaagagaaacacagtgtttgctttactctgaaagcgtgtttttattaattggacacacacaggtgaatgtttgatcccggggctgtaactgtatttgtgtcagtgtccatggagaggtgatgcctgggaggtcttgactttcctcctagttgtcttctgctttctctgcacagttgtcatatatctacctaaatataatcacaaatgt

SEQ ID NO: 174 - protein, 541 aa, Mus musculus
MFSWMGRQAGGRERSGGMDAVQTVTGGLRSLYQRKVLPLEEAYRFHEFHSPALEDADFENKPMILLVGQYSTGKTTFIRYLLEQDFPGMRIGPEPTTDSFIAVMYGETEGSTPGNALVVDPKKPFRKLSRFGNAFLNRFMCSQLPNQVLKSISIIDSPGILSGEKQRISRGYDFCQVLQWFAERVDRIILLFDAHKLDISDEFSEAIKAFRGQDDKIRVVLNKADQVDTQQLMRVYGALMWSLGKVINTPEVLRVYIGSFWAQPLQNTDNRRLFEAEAQDLFRDIQSLPQKAAVRKLNDLIKRARLAKVHAYIISYLKKEMPNMFGKENKKRELIYRLPEIYVQLQREYQISAGDFPEVKAMQEQLENYDFTKFHSLKPKLIEAVDNMLTNKISSLMGLISQEEMNMPTQMVQGGAFDGTTEGPFNQGYGEGAKEGADEEEWVVAKDKPVYDELFYTLSPINGKISGVNAKKEMVTSKLPNSVLGKIWKLADCDCDGMLDEEEFALAKHLIKIKLDGYELPNSLPPHLVPPSHRKSLPKAD

SEQ ID NO: 175 - DNA, 3360 bp, Mus musculus
gacatttcgcttgaagaccacatcaccagcaaatttgagagtcacttgtaaggctgagcatcagcacaggagcccctcaccatgatcccgacactgctgctgggctttggggtgtacctgagctggggactgctagggtcctgggcacaggaccccggtaccaagttctcccatctcaataggcccggcatgcctgaaggctggagactaggggctgaggataccagcagagaccccatcagacggaactggtgtccttaccagaagtccaggctagtcacctttgtagctgcttgcaaaacagagaaattcctggtccattcacagcagccatgtccacagggagcccctgactgccagggagtcagagtcatgtatcgagtggcccagaagccagtgtaccaggtccagcagaaggtgctgatctctgtggactggcggtgctgcccagggttccagggaccagactgccaggaccacaatcccacagcaaaccctgagcccacagagccaagtggtaaactccaggagacttgggactcgatggatggctttgaacttggtcaccctgtcccagagtttaatgagattaaggtgccacaagaacaacaggaaaacctgcttcaaaatctccagaatgatgcccagtcagtagaagatggctttccaggctcttgggaagccccacccagcaacctcacagatgagatgacagaagccaatctaacagaattcgagtttcctggcaggacatcagagcacctgctgcagccccatattgatgcattcctgaaagcacacttcagtcccatctggaagaacttcaacgacagcttgcacagcctctcccaggccatcagaaacttgtctcttgatgtggaggccaatcaccaggccatcaagatgatccaggagggcacagtggctagggctgacttccaagagcttggtgccaagtttgaggccaaggtccagcagaatagccagagactgggccaactgtggcaggatgtggaggaccagctgcatgcccagcgccgatcggtgcatcatgccctctctgatgtccaggctgaggtgagcaccaagttaaagcagcttgtcaaggctcaggaacttccaggggccaatggcagcctggtgatggcatctgcagcagcggcagcaaggccagagccagagagcctgcaggccaggctagggcagctgcagagaaacctctctgctctgcacatggtcactagccagagggaggaggagttgcagagcaccctcaagaacatggacagcgtcctgaagcagcacgccgaagagatcaaagagctctattctgaatcggatgagaccttcgaccagatcagcaaggtagagaggcaggtggaggagctgctggtgaaccacaccgggcttcgagagctgcgggtgatcctaatggaaaagtccctgatcatggaggagaacaaagaggagatagagcggcaactgttggaactcaaccttaccctgcagcatctgcatgcgggtcatgcagacctcattaagtatgtcaaggactgcaactgccaaagggtcaactctgacgtggatgtcgctccggagggccacagggatgtcatgcacaccctagaagagacccaagtgagcctggacgaacagcaccagctagacggttcttctttgcaggccctgcaaagcactgtagatgccatgtcttcagcaatggatgcctatagaggagagggtgaacgggcccgggctgaaagggcacggatacggagccaactgcgggctctggatcatgctgtggaagcgctgaagacagcggcgaatggaacccgcaaagagatacgcctactgcacggctccttcacagccctgctggaggatgccctgcgacatcaggccgtgctagctgcactcttcggggaggagatgatagacgagatgtcagaggaggcccctcgccctctgccactggattatgagcagatccgcctagccctgcaggacgcggccagtgggctacaggaacaggcgattggttgggaggacttggccacccgggtggaggcattggagaaggccgcaggtggctttgtggagcagcacccacagttggcagagggacttgagcccagccacgactctgggagagaggaggaagccatgactttggcggagctggagcaggagattcggcgcctgagttctgatgtcaagcagattgggcagtgctgtgaggcctcctgggctgcctccctcaatagctcccttgaagacctacacagcatgctcttggacacccagcacggcctgagacagcaccggcagctcttccacaacctcttccagaacttccaaggtctggtggcaagcaacatcagcctagacttggggaagctgcaggccatgttgagtaagaaagataagaagcaaccgagaggcccaggagaatcccggaagagggataagaagcaagtggtgatgtctacagatgcacacgccaaaggtctggagctctgggagacaggctcccctgtggccttctatgccggttcttcagaaggggccactgctctgcagatggtgaagttcaacaccacatccatcaatgtgggcagcagctactttcctgaacatggctacttccgagctcccaaacgtggcgtctacttgtttgctgtgagcattacatttggcccaggcccaggaatggggcagctggtatttgaaggtcatcaccgggttccagtctacagtacggaacagaggggcgggagcacagccaccacttttgctatggtagagctacaaaagggtgagagagcgtggtttgagttaatccaagggtcagcaaccaaagggagccaaccaggcactgcatttgggggcttcctgatgttcaagacctgaaccctgggctcggctcagcttgtatcagacatggtagatccgcctgctgctcttagactgaggctctggccagcaaaggctggagaacatctagtggcctagctcttccctggacaccttctgcaaagaccctgcggccagcagcacgtaccttcttctggacacacaggttggggaggccagaatactgctctctggactgggccggggcctggagtgggagctgggatttccatgccttccccaatggcacggctcggcttgtctctgagacacttcctcagttctacagcttttctttttctctcccttgtggttggaaacttgtacacttacgcctttttcggtttccacttttctgtgttagaaagtcactgtttctcagaaggaatgtctacagtgatgggtttgccatgcagaaaggtcccagattctctttccaatgtc

SEQ ID NO: 176 - protein, 943 aa, Mus musculus
MIPTLLLGFGVYLSWGLLGSWAQDPGTKFSHLNRPGMPEGWRLGAEDTSRDPIRRNWCPYQKSRLVTFVAACKTEKFLVHSQQPCPQGAPDCQGVRVMYRVAQKPVYQVQQKVLISVDWRCCPGFQGPDCQDHNPTANPEPTEPSGKLQETWDSMDGFELGHPVPEFNEIKVPQEQQENLLQNLQNDAQSVEDGFPGSWEAPPSNLTDEMTEANLTEFEFPGRTSEHLLQPHIDAFLKAHFSPIWKNFNDSLHSLSQAIRNLSLDVEANHQAIKMIQEGTVARADFQELGAKFEAKVQQNSQRLGQLWQDVEDQLHAQRRSVHHALSDVQAEVSTKLKQLVKAQELPGANGSLVMASAAAAARPEPESLQARLGQLQRNLSALHMVTSQREEELQSTLKNMDSVLKQHAEEIKELYSESDETFDQISKVERQVEELLVNHTGLRELRVILMEKSLIMEENKEEIERQLLELNLTLQHLHAGHADLIKYVKDCNCQRVNSDVDVAPEGHRDVMHTLEETQVSLDEQHQLDGSSLQALQSTVDAMSSAMDAYRGEGERARAERARIRSQLRALDHAVEALKTAANGTRKEIRLLHGSFTALLEDALRHQAVLAALFGEEMIDEMSEEAPRPLPLDYEQIRLALQDAASGLQEQAIGWEDLATRVEALEKAAGGFVEQHPQLAEGLEPSHDSGREEEAMTLAELEQEIRRLSSDVKQIGQCCEASWAASLNSSLEDLHSMLLDTQHGLRQHRQLFHNLFQNFQGLVASNISLDLGKLQAMLSKKDKKQPRGPGESRKRDKKQVVMSTDAHAKGLELWETGSPVAFYAGSSEGATALQMVKFNTTSINVGSSYFPEHGYFRAPKRGVYLFAVSITFGPGPGMGQLVFEGHHRVPVYSTEQRGGSTATTFAMVELQKGERAWFELIQGSATKGSQPGTAFGGFLMFKT

SEQ ID NO: 177 - DNA, 3540 bp, Mus musculus
agcagccaaggaggaggcgtgcagctgggggctgcaggcaggaagctagggacagaactggctcggcggagtactgtcccctgaagcagcggcatcccctggaagtgcggtataggcattattggtcagaccaagatgtgcctctaagggcagcaaggaacatttcaccatggcccccagagccctctggagctgctatctctgctgtctgctgaccatagccacggaagctgccagctaccctcctcgaggttacagcctctacacaggaggcactggggccctgagtcctgggggaccccaggcccagaactcaccacggcctgccagccgccacaggaactggtgtgcctacgtggtgactcggacagtgagctgcgtccttgaggatggagtggagaccattgtcaagccagactatcaaccctgtggctggggccagccccactgttcccgaagtatcatgtaccggagctttcttcgccctcgctatcgggtggcttacaagacagtgacagacatggagtggaggtgctgtcagggttatgggggcgatgactgtggagagggccctgcttccgttctgggcccagcaccctccacaccacttccccggcccaggcctgtgcgccccaacctgtctggctccagtgccggcagccatctcagtggactgggaggagaaggtcctgttgagtcagagaaggtgcagcagctagagcggcaggtgaagagtctgaccaaagagctgcaaggccttcggggtgtcctgcaggggatgaatgggcgcctagcagaagatgtacagcgagctgtggacacagtctttaatggaaggcagcagccagcagatgcagctgcccgcccgggcgtgcatgaaaccctcagtgagatccagcagcagctgcagctcctggacaaccgtgtctccactcatgaccaggagctgggccaccttaacaaccatcataatggaggccctggtggaggtggcagggcctcaggccctgtcccagttccttctggccccagtgaagaactgttaaggcagctggaacggcagctgcaagagtcttgctcagtgtgcctgacggggctggatggcttccgccagcagcagcaagaggatagggagcggctgcgaaccctggagaagctaatgtcctctatggaggagcggcagcaacagcttgtgggacctgccatggccaggagaccccctcaggaatgctgccccccagagctgggtcgacgagtgtctgagctggagcggaggctagatgtagtgactggctcactgacagtgctaagtggacgcagaggttctgagcttggaggagcagctgggcaggggggccaccctccaggctacaccagcttggcctcccgcctttctcgcctggaggaccgcttcaactctaccctaggtccctcagaggagcaagagaagaactggcctggaggaccagggaggctgggccactggttgcctgctgctccaggacggctagaaaagctggagggactactagccaatgtgagcagggagctgggtggccgcatggatctgctggaagagcaggtggcaggggctgttcggacttgtgggcagatttgctctggggcacccggggaacaggattctcgggtcaatgagatcctcagtgccttggaacgcagggtgctggacagcgagggccggttacagctagtgggctctggcttgcatgaagcagaggcagcaggggaggctcagcaggccgtgttggagggactgcaagggctcctgagccggcttcgggagcgcatggatgcacaggaggagactgcagcagaaatcttactgcgcctcaatcttaccgcagcccagctaagccagctggagggtctgctgcaagcccgtggggatgagggttgtggcgcctgtggtggtgtccaggaggagctgggccgccttcgggatggtgtggaacgttgctcctgcccattgttacctccacggggccctggagctggcccaggggttgggggaccaagccgtgggcctctggatggtttcagtgtgtttgggggcagttcaggctcagccctccaggcccttcaaggagaactctctgaggttattctcaccttcagctccctgaacgactcactccacgagctccagaccactgtggagggtcagggtgccgatctggctgacctgggggccaccaaggacagcatcatctctgaaatcaacagactacagcaggaggccacggagcacgtcacagagagcgaggagcgcttccgaggcctggaggagggccaggcacaggctggccaatgccctagcttagaggggcgattaggccgccttgagggagtctgcgaacgactggacaccgtggcagggggactacaaggcctacgtgaaggcctctccagacacgtggctgggctctgggctgcagtacgggaaagcaacagcaccagcctgacacaggccgccctgctggagaagctgctggggggccaggcaggcctgggcaggcggcttggtgccctcaacaattccctgctgctcctggaagaccgtctgcagcaacttagcctaaaggacttcactggaccttcaggcaaggctgggcccccagggcctcccgggctacaagggccttcaggccctgcaggacctccaggacctcctggcaaagacggacaacagggggccattggcccaccaggtcctcaaggggagcagggagcggagggagcaccagcagcccctgtgcctagggtagcattttcagctgccctgagtttgccacggtcagaacctggcacagtccccttcgacagagtcttgctcaatgatggaggctactatgacccagagacaggtgtattcactgcaccactggctggacgctatttgctgagcgctgtacttactgggcaccggcatgagaaagtggaagcagtattgtcacgctccaacctgggcgtggcccgcatagactcgggaggctatgaacccgagggactggagaataagcctgtggccgaaagtcagcccagcccaggcgctctgggcgtcttcagcctcattctgccactgcaggtcggagacactgtctgcatcgacctggtcatggggcagctggcacactccgaggagccgctcaccatcttcagcggagccctgctctacgaggacacagagcttgaacaggtgtagacagggtggacccgaccaccaaacttatctacaggggccgcagagccacctggatggtggctacccaccaaggcaagggcaagtctggcgaccacgtcccgctgcggttcaggcatccaaatcggtcactccgtacgttgtgactgcgtggtctatgggaccgaggcatctcctcttgacctttggcctcattgccgtccccaccagagccctctccgggacccaagctgcggaagaggaacctaccctccagggctctccccagtccacaccaccgtactaaactattcaggaataaagacactttttttttttct

SEQ ID NO: 178 - protein, 1017 aa, Mus musculus
MAPRALWSCYLCCLLTIATEAASYPPRGYSLYTGGTGALSPGGPQAQNSPRPASRHRNWCAYVVTRTVSCVLEDGVETIVKPDYQPCGWGQPHCSRSIMYRSFLRPRYRVAYKTVTDMEWRCCQGYGGDDCGEGPASVLGPAPSTPLPRPRPVRPNLSGSSAGSHLSGLGGEGPVESEKVQQLERQVKSLTKELQGLRGVLQGMNGRLAEDVQRAVDTVFNGRQQPADAAARPGVHETLSEIQQQLQLLDNRVSTHDQELGHLNNHHNGGPGGGGRASGPVPVPSGPSEELLRQLERQLQESCSVCLTGLDGFRQQQQEDRERLRTLEKLMSSMEERQQQLVGPAMARRPPQECCPPELGRRVSELERRLDVVTGSLTVLSGRRGSELGGAAGQGGHPPGYTSLASRLSRLEDRFNSTLGPSEEQEKNWPGGPGRLGHWLPAAPGRLEKLEGLLANVSRELGGRMDLLEEQVAGAVRTCGQICSGAPGEQDSRVNEILSALERRVLDSEGRLQLVGSGLHEAEAAGEAQQAVLEGLQGLLSRLRERMDAQEETAAEILLRLNLTAAQLSQLEGLLQARGDEGCGACGGVQEELGRLRDGVERCSCPLLPPRGPGAGPGVGGPSRGPLDGFSVFGGSSGSALQALQGELSEVILTFSSLNDSLHELQTTVEGQGADLADLGATKDSIISEINRLQQEATEHVTESEERFRGLEEGQAQAGQCPSLEGRLGRLEGVCERLDTVAGGLQGLREGLSRHVAGLWAAVRESNSTSLTQAALLEKLLGGQAGLGRRLGALNNSLLLLEDRLQQLSLKDFTGPSGKAGPPGPPGLQGPSGPAGPPGPPGKDGQQGAIGPPGPQGEQGAEGAPAAPVPRVAFSAALSLPRSEPGTVPFDRVLLNDGGYYDPETGVFTAPLAGRYLLSAVLTGHRHEKVEAVLSRSNLGVARIDSGGYEPEGLENKPVAESQPSPGALGVFSLILPLQVGDTVCIDLVMGQLAHSEEPLTIFSGALLYEDTELEQV

SEQ ID NO: 179 - DNA, 3878 bp, Mus musculus
ggttccctgctcgtggcgctgctcctggtgcttccaatccgcacgagttggtctccagactgaaaacagcagagcggctaccagactctcacaggagcaagctgtaacatgcaatcgcccgcaagccggtgcggacgcgccttggtggcgctgctgctggcctgtggcttcttgggggtatggggagagaaaagaggattcccacctgcccaagccacgctgtcacttctcgggactaaagaggtaatgacgccacccactaagacctcctggaccagaggttccaactccagtctgatgcgttcctccgcacctgcggaggtgaccaaaggagggaggggggctggagtcccgccaagatccttccctcctccgtgccaacgaaatattgagatcagcaagacttttaaatacatcaacacgattgtgtcgtgcctcgtgttcgtgctaggcatcatcgggaactccacgctgctaagaatcatctacaagaacaagtgcatgcgcaatggtcccaatatcttgatcgccagtctggctctgggagacctactgcacatcatcatagacatacccattaacacctacaagttgctcgcagaggactggccatttggagctgagatgtgtaagctggtgcccttcatacagaaggcttctgtgggaatcacagtgctgagtctttgtgctctaagtattgacagatatcgagctgttgcttcttggagtcgaattaaaggaattggggttccaaaatggacagcagtagaaattgttttaatttgggtggtctctgtggttctggctgtccccgaagccataggttttgatatgattacgtcggactacaaaggaaagcccctaagggtctgcatgcttaatccctttcagaaaacagccttcatgcagttttacaagacagccaaagattggtggctgttcagtttctacttctgcttgccgctagccatcactgcagtcttttataccctgatgacctgcgaaatgctcaggaagaagagcggtatgcagattgctttgaatgatcacttaaagcagagacgagaagtggccaagacagtcttctgcctggtcctcgtgtttgctctctgttggcttccccttcacctcagccggatcctgaagctcaccctgtatgaccagagcaatccacacaggtgtgagcttctgagctttttgttggttttggactacattggtatcaacatggcttctttgaactcctgcatcaatccaatcgctctgtatttggtgagcaaaagattcaaaaactgctttaagtcatgtttgtgctgctggtgccaaacgtttgaggaaaagcagtccttggaggagaagcagtcctgcctgaagttcaaagccaacgatcacggatatgacaacttccggtccagcaataaatacagctcgtcttgaaggcaagaacactcgccgaatctcactgtcctcattgtggacagataccattaaaacaaaatgaaaccgttgccaaatcaaaatggaaaaaaccatgctagcagaaaggtgtgcgcgcgtgtgagagggattatttttaactgttctgacgctcaacaccggatatattcacgggctgtttacaacctaagaaagctgtgggaaggaatgaagccctcctccgtggggaagcacttagattcttagtcagcacttcagcagagctcttaaaagcccctagtgcgttcacatgccacttacgtttaaaaaaacgagaacttcactgaagttctgttcaggagtttattatccagtcctatgaatctggattcaagaaagcatgacattgcaaaacaattcttaaaacgaagtttcaattgcttaatttgaaacttaaaaaaaaaaaaactaataaatttttatgcatactatcatacccactaatctgattgtaactatatgcaaaagaaaaggcaatatggttggtaaacttttttggtcattaccaacattgaaatgatcagaattcgggggaagaaaagacagcctgcgaatgccacagagaaaacatgggaaagcgtgagctgctatgcctgagacttctgaaattccctcacacatactctgcagaaagacacaaaacagaacactacctatgatttctttaaagttctttcaaatatcctttcatgattgaagtttaaattccatgtgttcaacttcatcatctgtaaatacttagctattagctataagcactacacgtagaggacttaacaaagggcaggtcccagcgttcgtagctttctgacaaagagatgccagtaacccggttatagacagaatgtgaattgcccggtgcagtgtccacatggcaaagaagcagggagcatcctttcagccatgctgtagagaaaatggtccacagcacaatatgatagcgaaaataccgtggtttaacgccatagaaaatagtcactgtaaccagctctctcggaggcatactaccaactttttatgttattcctgaaaatagccaatagaaaggcgttctggacatggtgctttttctaaaacgtagaagccaaactgcttcggggtctgcaagatcctcctctttgcgcattcttgtctaggttttttttttttttttttaatctccttccacgacgtgccttaggttcactccggatgagcggtgtgtgaaagaatgcccaagagaaaactgaagagagaggaaatgaggtggggccagaggaagcccgtggggaaatattcccattcttagccctgtgttcgtcactgccacgtcatgtcggtgtgaaaggtcctggttcggctccagcaaaacaaagcgcagcgttctcagcgtgactcgggaacaaaccaagcccgagagctttaaccttgtcttaaaatataacagattttccttccttcctttttctctttcttctcttctcttctcttctcttctcttctcttctcttctcttctcttctcttcttttcataacccaggccacatgttgaaaatgagcttaacaatgcagttttctaccaaaatcattgtgacaatacaataaacccaaacgggacaatgaggtaaaaaaccaagaacaatactgaatccacgtgacacatgactctctttaggagtcacccacagttcttgtgtgtacagattgctttttaatcataaaggacgccccagatcttcaattttaagttagttattggctccccagtagtttcacagcgtggatatatttttaatttttactaagttttagattggttttattgttgtgttctaaattcttaagtcctaacatctttgtttaacccagatgttccttccctcttcatgggcaataatcgtcctgccaaattatgaaatggcataagaatactattcacataatatatacaataaaactatattaagtggcttttttattaaaaattttagcacacagaccaagggtgataagaaaaaaaacatgattcccttgcataattaaaaccaagataagagaaggtaccatctaatttaaagcatattttctaacatttaagtagcctaatatagcaatgcataaaaatagtgttaacaaggatgttagaggtcaaacgatttgtaagtgacttcagcctattttctcccaaattatttactgctatttttggtctgtgttcaaacattttcagtattgataatgtgcaacagccaaaggaacactgttttcatccaaatgcgggtgtgttgtacctaacatgcacttgtaataaagccgtgtaaaataactgtgttttgttttgctctggtcacctaaagtggcagcttgtgtcgttgctaacttcttgttgagtaagcaaaaccaataaacgttcaaatggttt

SEQ ID NO: 180 - protein, 442 aa, Mus musculus
MQSPASRCGRALVALLLACGFLGVWGEKRGFPPAQATLSLLGTKEVMTPPTKTSWTRGSNSSLMRSSAPAEVTKGGRGAGVPPRSFPPPCQRNIEISKTFKYINTIVSCLVFVLGIIGNSTLLRIIYKNKCMRNGPNILIASLALGDLLHIIIDIPINTYKLLAEDWPFGAEMCKLVPFIQKASVGITVLSLCALSIDRYRAVASWSRIKGIGVPKWTAVEIVLIWVVSVVLAVPEAIGFDMITSDYKGKPLRVCMLNPFQKTAFMQFYKTAKDWWLFSFYFCLPLAITAVFYTLMTCEMLRKKSGMQIALNDHLKQRREVAKTVFCLVLVFALCWLPLHLSRILKLTLYDQSNPHRCELLSFLLVLDYIGINMASLNSCINPIALYLVSKRFKNCFKSCLCCWCQTFEEKQSLEEKQSCLKFKANDHGYDNFRSSNKYSSS

SEQ ID NO: 181 - DNA, 3989 bp, Mus musculus
ggagactgaatgcagaccagcgggtggcgtgcgcccaagttccccactggcgcgcaaacttaacttactgttaaggcgcgggtagaggcaaccgggctagtgtgttttcagaggcttggctggggtagctgacttaagtgtcctgtcttcactccccagttggtctccagactgaaaacagcagagcggctaccagactctcacaggagcaagctgtaacatgcaatcgcccgcaagccggtgcggacgcgccttggtggcgctgctgctggcctgtggcttcttgggggtatggggagagaaaagaggattcccacctgcccaagccacgctgtcacttctcgggactaaagaggtaatgacgccacccactaagacctcctggaccagaggttccaactccagtctgatgcgttcctccgcacctgcggaggtgaccaaaggagggaggggggctggagtcccgccaagatccttccctcctccgtgccaacgaaatattgagatcagcaagacttttaaatacatcaacacgattgtgtcgtgcctcgtgttcgtgctaggcatcatcgggaactccacgctgctaagaatcatctacaagaacaagtgcatgcgcaatggtcccaatatcttgatcgccagtctggctctgggagacctactgcacatcatcatagacatacccattaacacctacaagttgctcgcagaggactggccatttggagctgagatgtgtaagctggtgcccttcatacagaaggcttctgtgggaatcacagtgctgagtctttgtgctctaagtattgacagatatcgagctgttgcttcttggagtcgaattaaaggaattggggttccaaaatggacagcagtagaaattgttttaatttgggtggtctctgtggttctggctgtccccgaagccataggttttgatatgattacgtcggactacaaaggaaagcccctaagggtctgcatgcttaatccctttcagaaaacagccttcatgcagttttacaagacagccaaagattggtggctgttcagtttctacttctgcttgccgctagccatcactgcagtcttttataccctgatgacctgcgaaatgctcaggaagaagagcggtatgcagattgctttgaatgatcacttaaagcagagacgagaagtggccaagacagtcttctgcctggtcctcgtgtttgctctctgttggcttccccttcacctcagccggatcctgaagctcaccctgtatgaccagagcaatccacacaggtgtgagcttctgagctttttgttggttttggactacattggtatcaacatggcttctttgaactcctgcatcaatccaatcgctctgtatttggtgagcaaaagattcaaaaactgctttaagtcatgtttgtgctgctggtgccaaacgtttgaggaaaagcagtccttggaggagaagcagtcctgcctgaagttcaaagccaacgatcacggatatgacaacttccggtccagcaataaatacagctcgtcttgaaggcaagaacactcgccgaatctcactgtcctcattgtggacagataccattaaaacaaaatgaaaccgttgccaaatcaaaatggaaaaaaccatgctagcagaaaggtgtgcgcgcgtgtgagagggattatttttaactgttctgacgctcaacaccggatatattcacgggctgtttacaacctaagaaagctgtgggaaggaatgaagccctcctccgtggggaagcacttagattcttagtcagcacttcagcagagctcttaaaagcccctagtgcgttcacatgccacttacgtttaaaaaaacgagaacttcactgaagttctgttcaggagtttattatccagtcctatgaatctggattcaagaaagcatgacattgcaaaacaattcttaaaacgaagtttcaattgcttaatttgaaacttaaaaaaaaaaaaactaataaatttttatgcatactatcatacccactaatctgattgtaactatatgcaaaagaaaaggcaatatggttggtaaacttttttggtcattaccaacattgaaatgatcagaattcgggggaagaaaagacagcctgcgaatgccacagagaaaacatgggaaagcgtgagctgctatgcctgagacttctgaaattccctcacacatactctgcagaaagacacaaaacagaacactacctatgatttctttaaagttctttcaaatatcctttcatgattgaagtttaaattccatgtgttcaacttcatcatctgtaaatacttagctattagctataagcactacacgtagaggacttaacaaagggcaggtcccagcgttcgtagctttctgacaaagagatgccagtaacccggttatagacagaatgtgaattgcccggtgcagtgtccacatggcaaagaagcagggagcatcctttcagccatgctgtagagaaaatggtccacagcacaatatgatagcgaaaataccgtggtttaacgccatagaaaatagtcactgtaaccagctctctcggaggcatactaccaactttttatgttattcctgaaaatagccaatagaaaggcgttctggacatggtgctttttctaaaacgtagaagccaaactgcttcggggtctgcaagatcctcctctttgcgcattcttgtctaggttttttttttttttttttaatctccttccacgacgtgccttaggttcactccggatgagcggtgtgtgaaagaatgcccaagagaaaactgaagagagaggaaatgaggtggggccagaggaagcccgtggggaaatattcccattcttagccctgtgttcgtcactgccacgtcatgtcggtgtgaaaggtcctggttcggctccagcaaaacaaagcgcagcgttctcagcgtgactcgggaacaaaccaagcccgagagctttaaccttgtcttaaaatataacagattttccttccttcctttttctctttcttctcttctcttctcttctcttctcttctcttctcttctcttctcttctcttcttttcataacccaggccacatgttgaaaatgagcttaacaatgcagttttctaccaaaatcattgtgacaatacaataaacccaaacgggacaatgaggtaaaaaaccaagaacaatactgaatccacgtgacacatgactctctttaggagtcacccacagttcttgtgtgtacagattgctttttaatcataaaggacgccccagatcttcaattttaagttagttattggctccccagtagtttcacagcgtggatatatttttaatttttactaagttttagattggttttattgttgtgttctaaattcttaagtcctaacatctttgtttaacccagatgttccttccctcttcatgggcaataatcgtcctgccaaattatgaaatggcataagaatactattcacataatatatacaataaaactatattaagtggcttttttattaaaaattttagcacacagaccaagggtgataagaaaaaaaacatgattcccttgcataattaaaaccaagataagagaaggtaccatctaatttaaagcatattttctaacatttaagtagcctaatatagcaatgcataaaaatagtgttaacaaggatgttagaggtcaaacgatttgtaagtgacttcagcctattttctcccaaattatttactgctatttttggtctgtgttcaaacattttcagtattgataatgtgcaacagccaaaggaacactgttttcatccaaatgcgggtgtgttgtacctaacatgcacttgtaataaagccgtgtaaaataactgtgttttgttttgctctggtcacctaaagtggcagcttgtgtcgttgctaacttcttgttgagtaagcaaaaccaataaacgttcaaatggtt

SEQ ID NO: 182 - protein, 442 aa, Mus musculus; identical to SEQ ID NO: 180

SEQ ID NO: 183 - DNA, 1156 bp, Mus musculus
ggagactgaatgcagaccagcgggtggcgtgcgcccaagttccccactggcgcgcaaacttaacttactgttaaggcgcgggtagaggcaaccgggctagtgtgttttcagaggcttggctggggtagctgacttaagtgtcctgtcttcactccccagttggtctccagactgaaaacagcagagcggctaccagactctcacaggagcaagctgtaacatgcaatcgcccgcaagccggtgcggacgcgccttggtggcgctgctgctggcctgtggcttcttgggggtatggggagagaaaagaggattcccacctgcccaagccacgctgtcacttctcgggactaaagaggtaatgacgccacccactaagacctcctggaccagaggttccaactccagtctgatgcgttcctccgcacctgcggaggtgaccaaaggagggaggggggctggagtcccgccaagatccttccctcctccgtgccaacgaaatattgagatcagcaagacttttaaatacatcaacacgattgtgtcgtgcctcgtgttcgtgctaggcatcatcgggaactccacgctgctaagaatcatctacaagaacaagtgcatgcgcaatggtcccaatatcttgatcgccagtctggctctgggagacctactgcacatcatcatagacatacccattaacacctacaagttgctcgcagaggactggccatttggagctgagatgtgtaagctggtgcccttcatacagaaggcttctgtgggaatcacagtgctgagtctttgtgctctaagtattgacagatatcgagctgttgcttcttggagtcgaattaaaggaattggggttccaaaatggacagcagtagaaattgttttaatttgggtggtctctgtggttctggctgtccccgaagccataggttttgatatgattacgtcggactacaaaggaaagcccctaagggtctgcatgcttaatccctttcagaaaacagccttcatgcagttttacaagacagccaaagattggtggctgttcagtttctacttccttgccgctagccatcactgcagtcttttataccctgatgacctgcgaaatgctcaggaagaagagcggtatgcagattgctttgaatga

SEQ ID NO: 184 - protein, 311 aa, Mus musculus
MQSPASRCGRALVALLLACGFLGVWGEKRGFPPAQATLSLLGTKEVMTPPTKTSWTRGSNSSLMRSSAPAEVTKGGRGAGVPPRSFPPPCQRNIEISKTFKYINTIVSCLVFVLGIIGNSTLLRIIYKNKCMRNGPNILIASLALGDLLHIIIDIPINTYKLLAEDWPFGAEMCKLVPFIQKASVGITVLSLCALSIDRYRAVASWSRIKGIGVPKWTAVEIVLIWVVSVVLAVPEAIGFDMITSDYKGKPLRVCMLNPFQKTAFMQFYKTAKDWWLFSFYFLAASHHCSLLYPDDLRNAQEEERYADCFE

SEQ ID NO: 185 - DNA, 3907 bp, Mus musculus
attaaggacttggagcaggagggtagaagttgtctctgtcggcgggcgggcaggattggggcaccgagaccggcgtgcggacagcagggatcgcggggagcgaggggtgcggcatggagctccgggcagtcggtttctgcctggcgctgctgtggggttgcgcgctggcggccgcggcggcacagggaaaggaagttgttttgttggacttcgcagcaatgaagggagagctcggctggctcacgcacccctatggcaaagggtgggacctgatgcagaacatcatggacgacatgcctatctacatgtactcggtgtgcaacgtggtatccggcgaccaggacaactggctccgcaccaactgggtgtaccgggaggaggccgagcgcatctttattgagctcaagttcacggtgcgagactgtaacagcttcccgggtggcgccagctcatgcaaagagaccttcaacctctactatgcagagtcagatgtggactatggcaccaacttccagaagcgccagttcaccaagattgacaccatcgcccctgacgagatcacggtcagcagtgacttcgaggctcgcaatgtcaagctgaacgtagaggagcgcatggtggggccccttacccggaagggcttctacctggccttccaggacatcggcgcctgcgtggcgctgctctccgttcgcgtctactacaagaagtgtcccgagatgctgcagagcttggctcgcttccccgagaccattgctgtcgctgtctccgatacacaacccctggccacggtggccggtacctgcgtggaccatgccgtggtgccttatgggggcgaggggcctctcatgcactgcacggtggatggcgagtggctggtgcccatcgggcagtgcctgtgccaggaaggctacgagaaggtcgaggatgcctgccgagcctgttctccaggattcttcaagtctgaggcatctgagagcccttgcctggagtgtccagagcataccctgccatccacagagggtgccacctcctgccagtgtgaagaaggctatttcagggcacctgaggacccactgtccatgtcttgcacacgtccaccctctgcccccaactacctcacggccattggcatgggtgccaaagtagaactgcgttggacagctcccaaggacactggtggccgccaggacattgtctacagtgtcacttgcgaacagtgctggccagagtctggcgagtgtgggccctgtgaggcgagcgtgcgctattcagaacctcctcacgccctgacccgcacgagtgtgacagtcagtgacctggagccccacatgaactataccttcgctgtcgaagcacgcaatggtgtctcaggcctggtgactagccgaagcttccggactgccagcgtcagtattaaccaaacagagccccccaaagtgaggctggaggaccgaagcaccacctccctgagtgtcacctggagcatcccggtgtcacagcagagccgtgtgtggaagtacgaagtcacctaccgcaagaagggggatgccaacagctataatgtgcgccgcacggaaggcttctccgtgaccctggatgaccttgctccggataccacgtacctggtgcaggtgcaggcgctgacgcaggagggccagggagccggcagcaaagtgcacgagttccagacactgtccacggaaggatctgccaacatggcggtgatcggcggtgtggctgtaggtgttgttttgcttctggtactggcaggagttggcctcttcatccatcgaaggaggaggaacctgcgggctcgccagtcctctgaggatgtccgtttttccaagtcagaacaactaaagcccctgaagacctatgtggatcctcacacttacgaagaccccaaccaggctgtactcaagtttaccaccgagatccacccatcctgtgtggcaaggcagaaggtcattggagcaggagagtttggagaggtctataaagggacgctgaaggcatcctcggggaagaaggagataccggtggccatcaagacactgaaagcgggctacactgagaagcagcgggtggacttcctgagcgaggccagcatcatgggccagtttagccaccacaatatcatccgcctggagggcgtggtctctaaatacaaacccatgatgattatcacagagtacatggagaatggagcgctagacaagttccttagggagaaggatggtgagttcagtgtacttcagttggtgggcatgctgaggggtatcgcatccggcatgaagtacctggccaacatgaactacgtgcaccgggacctggccgcccgcaacatcctcgtcaacagcaacctggtgtgcaaggtgtccgattttggcctgtcgcgtgtgctggaagatgaccccgaggccacctacaccacaagtggcggcaagatccctattcgatggacagccccagaggccatttcctaccgcaagttcacctcagccagcgatgtgtggagctacggcattgtcatgtgggaagtgatgacttatggcgaacggccctactgggaactgtcaaaccacgaggtcatgaaagccatcaacgacggcttccggctccctacgcccatggactgcccttcagccatttaccagctcatgatgcagtgctggcagcaagagcgctcccgccgacccaagtttgccgacatcgttagcatcctggacaagctcatccgagcccccgactccctcaagacgctggctgactttgatccccgagtgtccatccggctgcccagcaccagcggctcggagggagtccccttccgtacggtgtccgagtggctggagagcatcaagatgcaacagtacacggaacacttcatggtggctggctacacggccatcgagaaggtggtacagatgtccaacgaagacatcaaaaggatcggagtgcgtcttcctggccaccagaagcgtattgcctacagcctgctgggactcaaggaccaggtcaacacagtggggattcctatctgagtccattggggccgtgcccaacaatacttgaagagccacagtggtctccctgccgacctggtgctggcccactggaactttatttatttctgtttcctcgtctatgcctccctgaggactctgcagggggcttttgaatgacaccctggcctgagcctgggaaacttggatgctggtcagggctctctttcccctgcaaaggacccagctaagcacttagcagtttgccatggccttcccagcatcccctgaggctaaagttccaccaagaccgtcgatatcgacgagggacatttccaaacggacctccccatcttcatttggcctcctgagaagccacctcaggagctgaggctaagcactaagcccaggaccatatgactagggcactgtacgccccgcccctagttagagggtaggttttggacttggctgggtgtggtcacagcaatctcccagtgccttttacagacccagggctctgccctccgccctcgagggccagcttcttgctttcctagggccctctcaggatgcttggctgtgctgaggtttttattaaatatatattttatacttgtggaaagaatgagtgtgtggcagggaccttgccagggctggagacagaggatcccctgcaacagacattcccgggctgggggctggcggacctgcaggagactttccgccagccacccagtctccagcccctttggacaaatgtcgctgtcagtgttacagatttcttttattgggttgtttttttgttgtattttttgaaccttaacttattattttttttatatttattgttagaaaatgacttatttctgctctggaataaagttgcagatggttca

SEQ ID NO: 186 - protein, 977 aa, Mus musculus
MELRAVGFCLALLWGCALAAAAAQGKEVVLLDFAAMKGELGWLTHPYGKGWDLMQNIMDDMPIYMYSVCNVVSGDQDNWLRTNWVYREEAERIFIELKFTVRDCNSFPGGASSCKETFNLYYAESDVDYGTNFQKRQFTKIDTIAPDEITVSSDFEARNVKLNVEERMVGPLTRKGFYLAFQDIGACVALLSVRVYYKKCPEMLQSLARFPETIAVAVSDTQPLATVAGTCVDHAVVPYGGEGPLMHCTVDGEWLVPIGQCLCQEGYEKVEDACRACSPGFFKSEASESPCLECPEHTLPSTEGATSCQCEEGYFRAPEDPLSMSCTRPPSAPNYLTAIGMGAKVELRWTAPKDTGGRQDIVYSVTCEQCWPESGECGPCEASVRYSEPPHALTRTSVTVSDLEPHMNYTFAVEARNGVSGLVTSRSFRTASVSINQTEPPKVRLEDRSTTSLSVTWSIPVSQQSRVWKYEVTYRKKGDANSYNVRRTEGFSVTLDDLAPDTTYLVQVQALTQEGQGAGSKVHEFQTLSTEGSANMAVIGGVAVGVVLLLVLAGVGLFIHRRRRNLRARQSSEDVRFSKSEQLKPLKTYVDPHTYEDPNQAVLKFTTEIHPSCVARQKVIGAGEFGEVYKGTLKASSGKKEIPVAIKTLKAGYTEKQRVDFLSEASIMGQFSHHNIIRLEGVVSKYKPMMIITEYMENGALDKFLREKDGEFSVLQLVGMLRGIASGMKYLANMNYVHRDLAARNILVNSNLVCKVSDFGLSRVLEDDPEATYTTSGGKIPIRWTAPEAISYRKFTSASDVWSYGIVMWEVMTYGERPYWELSNHEVMKAINDGFRLPTPMDCPSAIYQLMMQCWQQERSRRPKFADIVSILDKLIRAPDSLKTLADFDPRVSIRLPSTSGSEGVPFRTVSEWLESIKMQQYTEHFMVAGYTAIEKVVQMSNEDIKRIGVRLPGHQKRIAYSLLGLKDQVNTVGIPI

SEQ ID NO: 187 - DNA, 3258 bp, Mus musculus
atgcgcgctggacagcagtggggggtgtgtgtgattcgcactgactgcagacactcgggctcaatcgccggggattaaggacttggcgaccgggctgccgggctacccggccgaggcttcagaggtgcaaatcgacgggactgatttgctcggcagggccgtactagccttttaagtatactgagaagggccggtgctaaagtagaagctgtcgtgggacgcgccggcgcggagtcccactgtggcccggaggaacggagtccgtgttagggggacccagtcgggagcctggggaccgagctcgcattgttgggagacaacccgcctcttcttcccagaggcgtcaatcccaggacggtcgaggcgtcggggcagccactgagcgctcttcagggagacccgatcggggagaggacttgcagtctcaaacaatctgggagagccgagcggaatccggcgggatcactcgggggcggcgagcccccgtcgcgcctcgtgcggcggagaggccagggaagaaagtcctcggaggccgcagcccatgcgcgggttggggacgcctgcccagtgagtcctcctggccagccgggcgaaggagagcgaccccgaggccagcgggaggggagtgcttcaaggccggcggctgcggaggatgggcgcctgagtggctccgagcgctgcgcggcacgggcaggcgaggcgagctttgctgaggaggcgctaggggatcctgaagtgcattctgccccggggaaaatggcccggcctgggcagcgttggctcagcaagtggcttgtggctatggtcgtgctgacgctgtgccggcttgccacgccgttggccaagaacctggagcccgtgtcctggagctctcttaaccctaagttcctaagtgggaagggcttggtgatctacccgaagattggagacaagctggacatcatctgcccccgagcagaagcagggcggccctacgagtactacaagctgtacctggtgcggccagagcaggcggctgcttgcagcactgtgcttgatcccaatgtactggtcacttgcaacaagccacaccaggaaatccgcttcaccatcaagttccaagagttcagccccaactacatgggcctggaattcaaaaagtaccacgattactacattacatcaacgtccaatgggagcttggagggactggagaaccgggagggaggtgtgtgtcgcacccgcactatgaagatcgttatgaaggttgggcaagatccaaatgctgtgacacccgagcagttgactaccagccggccaagcaaggagtcagacaacactgtcaagacagccacacaggctcctggtcggggatcccagggtgactctgacggcaagcatgagactgtgaaccaggaagagaagagtggcccaggtgcaggtggcggtggcagcggggactctgacagcttcttcaactccaaggtagcattgttcgcagccgtcggcgccggctgtgtcatcttcctgctcatcatcatcttcttgacagtcctactactcaagctccgcaagcgccatcgcaagcatacacagcagcgggcggctgccctctcgctcagtaccctagccagccccaaagggggtagtggtacagcgggcaccgagcccagcgacatcatcatccccttacggactacagagaacaactactgcccccactatgagaaggtgagtggggactacgggcatcctgtctacatcgtccaggagatgccccctcagagcccggcgaacatctactacaaggtttgaaggcccagcatggcctcaggccccacaggacacatggcctggatcggccgctctcttctcccccacacccctgcccttgccagctgtgcccacctttgtatttagttttgtagtttcttggcttttataatcccctttttcttgccccctgggcttcggaggggggtgcttgtgcccccaatccccatgctcttgtgccttccccctctggccaggcctctgggctccgtgggggtgccctttctaggagggcagggttggacactgacggactgcaggcagggaggtagccccctggccctgccccctcctcatcccttcacccatccccaggactgctcgtccactatcatcactgtttttaatgcttttgtgttgattttttttaaagctgtcaactcattttcatctgtttttttttttttgagaaaaaaaaatgggaaaatgtacaaggcagccccttcccaggctttctgagcctggcctgacccagtctaagagggcctggggcaggatgtggccagccaggaaacataggatggcatttcttttatagactccttagtagttcaggggagtgggggagggtaggccagggctatttctgcccaccgaggagagaagagcgccaccctcctttttggaccctcatgagacaatgctgttcctagcagtggggtagtgactaccacccttctaccaaaaaaaaaaaaaaatcccttccttgtgggattcttgggcatctcctgcctccttcactctcacggtaattaatgtcttaattggctgttgcctggggaacaggagagctgctgcaggcagatgacctcatggggggtggagggaggtgaggtgcccaggtggctatttgccctgcagagctgggagttccccccaccaccaccaccctgttctctccttatctttggcatctttggttcaaggtggagatcttaagcgggtgtaaggccaggcggcctgctccttccctgggttctagtacaaagcacacacaccccccactcactcaatatggctcccactgtccccccaccccaccccccgccccgagtttggagctggggcctggaaagaggaagaggctgcttggggctgggccagcctgcagtgcactttgaccccagctccttggcagcacggctgctaacagactgccactcaactgtgcctcgcaggcactcccagggctgccatggaaggagctgggccttacaccacccacctccacactgcctcctggccagctgcccaccccggtgccaggtgggagagggagcaaaacagccagccccttccaggtggcagtcggaagggatttttgtttttgattctgttgccatttgtgtaaatactagtcttttttggaagaaataatgtaaagatgttttgtataaactctgaattattttcttgttgcttttttcttagaaaaaaaatgagaac

SEQ ID NO: 188 - protein, 345 aa, Mus musculus
MARPGQRWLSKWLVAMVVLTLCRLATPLAKNLEPVSWSSLNPKFLSGKGLVIYPKIGDKLDIICPRAEAGRPYEYYKLYLVRPEQAAACSTVLDPNVLVTCNKPHQEIRFTIKFQEFSPNYMGLEFKKYHDYYITSTSNGSLEGLENREGGVCRTRTMKIVMKVGQDPNAVTPEQLTTSRPSKESDNTVKTATQAPGRGSQGDSDGKHETVNQEEKSGPGAGGGGSGDSDSFFNSKVALFAAVGAGCVIFLLIIIFLTVLLLKLRKRHRKHTQQRAAALSLSTLASPKGGSGTAGTEPSDIIIPLRTTENNYCPHYEKVSGDYGHPVYIVQEMPPQSPANIYYKV

SEQ ID NO: 189 - DNA, 3430 bp, Mus musculus
cgggcgggcagggaggcgggctaggaagagggcggcagggaggaggctcggcagcccggagggcggaggacgccgcgcagtcccagccccaagcttcaaaacagccggcgcctcgccccacgcgcagcccgccactgtgtccagacgcccgtgcccggtttggatttgtctctcgccatctttgtctcctcatctctctttggacttcctgctgcccccttggccttcactgccctgtgaacatgttggtgattcttgccttcatcattgtcttccacatcgtgtccacggcactcctgttcatttctaccattgacaatgcctggtgggtaggcgacagcttctctgctgacctctggagagtgtgcaccaacagcacaaactgtaccgagatcaatgagctgaccggccctgaagcgtttgaaggttattctgtgatgcaggcggtgcaggccaccatgatcctctccaccatcctctcctgcatctccttcctcatctttctgctccagctcttccgcctcaagcagggagagaggttcgtcctgacgtccatcatccagctcatgtcctgtctgtgtgtcatgatcggagcttccatctatacagaccggcgccaagaccttcaccaacagaacagaaaactctattacctactgcaagaaggcagctacggctactctttcatcctggcctgggtggcctttgccttcactttcatcagcggcctcatgtacatgatcctgaggaagcgtaaataagtgtcagaagtctgaccaccctcccacagggtggcatccatggtcacataaccattttgtatataatcattttttgtgttttttctagcaaacatattgtttcctttaaaagcttttatgaagaagaagaaggagaaggagaaggagaaggagaaggagaaggagaaggagaaggagaaggagaaggagaaggagaagaagaagaagaagaagaagaagaagaagaagaagaagaagaagaagaagaagaaagaatagagacagagaaggagtttctgcattcttgggatcacaaaccagaccatgaaagctggcattcagaatgcctgcctaccaaaagtctcagcaaggcccagcaagctccacaggatgcttttcaagggtggctctgtggtgtgggtacggccaaaggtggggaaagccagtctttgggagcagactctttgtaggagtctgcccttccctcttcccctgcccactccactctgacagccacaggtggaatgatgagggcccaaatgtgggacatctatgctcagatattaaacctaagctcacgtaagaagtgggcaaagactggccctggtttgtctgtaagagacccagagtttcccaacccccctgccatgagctaggtcatcacactaatttgttgatgtttgctcctgtttgccttaaggatagtgacccttgcctgacgcagatgtcatgtttaggcattaagtgtccataggtcattccgtagggcatctagtacacgtcggttcacaaatctacttccaagaccctcagaatccttcattaaagggctgggcctgggtgtctgaatttctgatgagctccctgcaatatggttaaatgcactataactggaggtcagagccttagaaccggggggagcagagccaccttgtaaatgttatcaggctaatcacaatgagatggccccactgctagctacgtctcagcctccatcagctcttgctgcctcttccacagctgcttacatctgggacacttgtgccccattcccaggccatacaagcctggaaggtgggctggacagcctcctccctgacctacatgggaaggtctctccttttcttcccgcccttttttctaatgtggatgcttccattaatcctctgtttctggagccttggaagatctgtcttccattcattcatccacccatccatcattcaacatgaatgggtcatgtcacgtgttgggtgcaagggatactctttcaaaacaatccctcacgagactcacagtctagtgaagagcacacgccagaaaccaattagagaagctaccaaccacgatggaacatcagggattcaaaacctcggggtgagagggagcctactttctctgtgttcttctaagagccctgatggctctcgattgctctgaacagaggtccacttggtccagtgctatcatgggtagtgcccacgaggtttccccagagaatactactgtagagcattctatactccccacagggagacaggaaaggattcccagagccatggctcttaagatggtcctcgaaggaaaatccagtcatttccaagtgggccctgaaccctgaggctatggggaggtcttcagaagtcctggaagagtgacaacacccgagtcccaggagctctgtgatggcaaccttctcccttgaacacccttttccatttttgagcatcgagttggagaggtgattctgggacagggtgtgtatatttgtgttgtttaaacacattcacatgtaagctgcctgaggggaggggatgtttgcctctagctcagtcccagtggagctggggggatgatgagtctgagtggctttagggccatcattgacaccacctcagtacaaacggactcccctcccttcctccctctcttctatcctcctttccttccttcccttagcagggctgccaaggtgatatgggacagcgacagggcaaacgatcacctgttgccttaatgaactttccacagctcactgctggctaggtcgtagagtttctccttgtcttgtgaggcccaaggaaggaggccaatctaaagtgtcctccataccttccccttgggggcttttctgtaatacttgtttaaaaattgttctgatgatcatgatggaaacagacagaccaccttagaaccagaggcctgaaagcctgacctgaccagcacagattcccacttcagaaccccagggctatggaagtgcccttgtccaacgctatgggaatagtcctgtgggttgtctctgcttgccactgtggccagcattccagtgcctacagccacctgtgcctacagccacctgtgccatgagaagtgcctctcctgctctatgccctgcatttgggatgctaagaagaggtgagggtgtgagcgagaacagatccacccttctcctaggtaggatcagctctcaattggtgcttatcactagttatcaaagaacagcagagacagctgcgttatccaagaagcaagtattaggaccaaaacctgttactgtatttaaaggaactttagtttgcgtatcttacatttttataaagtactgtaattcagggggtggggtatgcaacagagacagactaacccatgtttgtcatttgcattaaaattattttgggtctctgttt

SEQ ID NO: 190 - protein, 172 aa, Mus musculus
MLVILAFIIVFHIVSTALLFISTIDNAWWVGDSFSADLWRVCTNSTNCTEINELTGPEAFEGYSVMQAVQATMILSTILSCISFLIFLLQLFRLKQGERFVLTSIIQLMSCLCVMIGASIYTDRRQDLHQQNRKLYYLLQEGSYGYSFILAWVAFAFTFISGLMYMILRKRK

SEQ ID NO: 191 - DNA, 755 bp, Mus musculus
cgggcgggcagggaggcgggctaggaagagggcggcagggaggaggctcggcagcccggagggcggaggacgccgcgcagtcccagccccaagcttcaaaacagccggcgcctcgccccacgcgcagcccgccactgtgtccagacgcccgtgcccggtttggatttgtctctcgccatctttgtctcctcatctctctttggacttcctgctgcccccttggccttcactgccctgtgaacatgttggtgattcttgccttcatcattgtcttccacatcgtgtccacggcactcctgttcatttctaccattgacaatgcctggtgggtaggcgacagcttctctgctgacctctggagagtgtgcaccaacagcacaaactgtaccgagatcaatgagctgaccggccctgaagcgtttgaaggttattctgtgatgcaggcggtgcaggccaccatgatcctctccaccatcctctcctgcatctccttcctcatctttctgctccagctcttccgcctcaagcagggagagaggttcgtcctgacgtccatcatccagctcatgtcctgtctgtgtgtcatgatcggagcttccatctatacagaccggcgccaagaccttcaccaacagaacagaaaactctattacctactgcaagaaggcagctacggctactctttcatcggcctgggtggcctttgccttcactttcatcagcggcctcatgtacatgatcctgaggaagcgtaa

SEQ ID NO: 192 - protein, 170 aa, Mus musculus
MLVILAFIIVFHIVSTALLFISTIDNAWWVGDSFSADLWRVCTNSTNCTEINELTGPEAFEGYSVMQAVQATMILSTILSCISFLIFLLQLFRLKQGERFVLTSIIQLMSCLCVMIGASIYTDRRQDLHQQNRKLYYLLQEGSYGYSFIGLGGLCLHFHQRPHVHDPEEA

SEQ ID NO: 193 - DNA, 695 bp, Mus musculus
aaagggagggagggagaaggcagacggagaagggtgggtattaaagggtgggaggaaggcggtgagggaggcgggggcctcagagtggaaggagggagcagaagggcggggcaagaggcccaacgaggacagactccaactctgacttcttcagcaactctcggcttgcctctcctgccctgagccagacatctggcagccatgtcactcctcctgttggtggtctctgccctccacatcctcattcttgtcttgctttttgtggccactttggacaagtcctggtggactctcccagacaaagagtccctgaacctgtggtatgactgcacgtggaacaccaccactcaaacatgggcctgcagtaacgtcagtgagaatggctggctgaaggcagtgcaggccctcatggtgctgtctctcatcctctgctgcctgtccttcatcctcttcatgttccaactctacaccatgcggcgcggagggctcttctacgctaccggcctctgccagctttgcaccagtgcagctgtgttctccggggcactcatctatgccatccacaccgaggagatcctggccaagcacccgagtgggggcagcttcggttactgcttcgccctggcctgggtggcttttccactcgctctggtcagcggcactgtctacatccacctgcggaaacgtgaatgagc

SEQ ID NO: 194 - protein, 163 aa, Mus musculus
MSLLLLVVSALHILILVLLFVATLDKSWWTLPDKESLNLWYDCTWNTTTQTWACSNVSENGWLKAVQALMVLSLILCCLSFILFMFQLYTMRRGGLFYATGLCQLCTSAAVFSGALIYAIHTEEILAKHPSGGSFGYCFALAWVAFPLALVSGTVYIHLRKRE

SEQ ID NO: 195 - DNA, 1253 bp, Mus musculus
tctctttctcggcaagatggcttctccggccgtaccggctaatgtccctcctgccactgcagccgcagccccggcgccggtcgtcaccgcagccccggcttcagccccgaccccatccacgccagctccgacaccggctgcgactcccgctgcgtccccggcgcccgtctcgtctgatcctgctgtagctgcgcctgcagccccgggccagaccccagcctccgcgccagccccagcgcagacgccggcgccttcgcagcccgggcccgccctcccggggcctttcccgggcggccgcgtggtcaggctacaccccgtcattttggcctcgatcgtggacagctacgaacgccgcaacgagggagctgcccgagttattggaaccctgttgggaactgttgacaagcactcggtagaagtcaccaactgcttttcggtgccacacaatgagtcagaagatgaagtggctgttgacatggaatttgctaagaatatgtatgaattacataaaaaagtctccccaaatgagctcatcctaggctggtatgccacaggccatgacatcacagaacactcagtgctgatccatgagtactacagcagggaggccccgaaccccattcacctcacggtggacacaggtctccagcatgggcgcatgagcatcaaggcctatgtcagcactttaatgggtgtccctgggaggaccatgggagtgatgttcacacctctcacagtgaagtacgcgtattatgacactgaacgcattggagttgacctcatcatgaagacgtgttttagccccaaccgggtgattggactctcaagtgacttacaacaagtgggaggggcctcagctcgcatccaggatgctctaagcactgtattacagtatgctgaggatgtgctgtctgggaaagtgtctgctgacaacacggtgggccgcttcttgatgagccttgtcaaccaagtacccaagatagttcctgatgactttgagaccatgctcaacagcaacatcaatgacctgctgatggtgacctacctggccaatctcacccagtcacagattgccctcaacgagaaacttgtaaacctgtgaatgagccccaagaggcacttgtgctggtcgaggttttcaccacagggctgagaccgaagtggaggcaaagggtttctttgtggtcttgagtcacggtgactcagtcagctgcttgtgactccaaataaacatagcttaccttttgtaaatg

SEQ ID NO: 196 - protein, 361 aa, Mus musculus
MASPAVPANVPPATAAAAPAPVVTAAPASAPTPSTPAPTPAATPAASPAPVSSDPAVAAPAAPGQTPASAPAPAQTPAPSQPGPALPGPFPGGRVVRLHPVILASIVDSYERRNEGAARVIGTLLGTVDKHSVEVTNCFSVPHNESEDEVAVDMEFAKNMYELHKKVSPNELILGWYATGHDITEHSVLIHEYYSREAPNPIHLTVDTGLQHGRMSIKAYVSTLMGVPGRTMGVMFTPLTVKYAYYDTERIGVDLIMKTCFSPNRVIGLSSDLQQVGGASARIQDALSTVLQYAEDVLSGKVSADNTVGRFLMSLVNQVPKIVPDDFETMLNSNINDLLMVTYLANLTQSQIALNEKLVNL

SEQ ID NO: 197 - DNA, 4327 bp, Mus musculus
ggaaatgaactcaaaagcggctggttaaaaacccaaacatgaaaaccgggatgcccctgcagtcgggctgaagacacacgcagagaggcttccctgccgccagagccggctgccgggaacaggcgtgcggcgcaggctcccctggcgcccacacctacccgggcccgcgccctcgcagcacctgtgcggccgctctagctcggttccgggttcgcgcctcggtggtggcgtcggaggaactgaaggcccggctgttgagccgcttccgggccctcggagagccgccggagccgggtcctcgggggtgtctgtgggtggaggagccggggtctgagcgtcggagccagccgcgggccaagagggagcggagccgccagcctcctcccgccgcccgcagagctgtttggatttgaggaggagctgcagaactgcctcacggcaacagggatgggatcagagaacagcgctttaaagagctacacactgagggagtctccttttaccttaccatctggacttgctgtttatcccgccatattgcaagatgggaaatgtgcttccgtgtttgtatataagcgagaaaatgaagacaaggttaacaaggctgccaagcacttaaagacactccgtcacccttgcttgctaagatttttatcttgtactgtggaagcagatggcattcacctcgtcactgagagagtgcagcctctggaagtggccttggaaaccctgtctcctgcagaagtctgtgctggaatctatgacatactgctggctcttatcttccttcatgacagaggacatttgacacacaacaatgtctgcctgtcgtctgtttttgtgagtgaggatgggcactggaagcttggaggcatggagactgtttgccaagttcctcaggccacgccagagtttctcaggaatatccagtcagtaagagacccagcatccattcctcctgaggagatgtctccagaattttcaggccttcccgagtcccacggccacgcccgggatgcctatgcctttggagctttggtggacagcttgctccccatcttcaatgagcaggtttcagcggacgttctctccagcttcctacagatcctgcactcagctctgctgaaccccatgcccgagtgtcggccagcactcagcaccttactgtcccatgatttcttcagaaatgattttctagaagttgtgaacttcttgaaaagcttgacattaaagagtgaagatgaaaagactgaatttttcaaatttctgctggaccgagtgagctgcctgtcagaagaattaatagcttcaagattggtgcctcttctgcttaaccagctggtgtttgctgagccagtagctgttaagagctttcttccctatctacttggtcctaaaaaagagaacgcaccaggagaaaccccttgcttgctctcgccagcgctgttccagtcccgagtgatccctgtgcttctccggctgttcgaggtgcacgaggagcacgtgcggatggtgttactgtcccacatcgaggcctacgtggagcacttcactcaggaacagctaaagaaagtcatcctgccacaggtactactgggccttcgtgataccagcaattccattgtggcaattactctccgtagcctggcagtgctggtgtctttacttggaccagaagtggttgtgggaggagaacgaaccaagatctttaagcgcaccgctccaagcttcaccaaaactagtgacctttcccctgaaggttctcccatgcatgttgtctgcagccagcagagtcgggtctcaaaagtcttggaggacccctcgtctaacgtattccctaaatggttgtctggcaacgtgcccagcagcagcaggaagcgcatacaggaagaatgttacagctctctctcacagacaggtgatcagttttctcacaccattaaattccctatgaatggactctcagatgtgaaaaacacttcagaggacaatggaagcttccctgcaggttctaataagcccgaggagtggcctgactggagcgagcctgaggagcctgagcagcagcctgccagtattcacagatggccccgagaaccctgtgatgtagcagagtcccagcacacaaacctgaccgcagaggaggtgacctgggatgatggtgaggctagctttggcactgaaataaactcaacagctacagcctctgctcctgtgcctgttacctcagggggacagtcaacctctgcagctttggttcctctcactgaagagtcaaagcctttgcaatccagtccttcctcaaagaccagtcatagacagcatgaggaagtcaaaccaccccaagtgtcacaagaaagacccctgaaggctccgtcaggacttggtttgggagaagagtttaccattcaagtaaaaaagaagccagtacaagacccggagttggactggtttgcagatatgatcccagaaattaagccttcaggtacttttcttattctgcctgaactaaggacagaagtgatggtccctgacaaggataacgtctcatcactgatgcagttttcctcaaagtttgctgcaacagaaatgaccgagggagaggcagaaggctgggaaggagaagagctagcctgggaagataacaactggtgacgataatgaaaagcttcaggaagaattctcaaagaattaatacctcaaagcaagctgcatggatgcaaaaccccaaagcagcttgtgttccccacaccaggagctcttttttgcagtctgtgccaagtcaagcagagaccaacctcaggttgctgactaagtcctggtggcaaaaggcttcggtgccagagtccaggagaaagtgctgtgtgcacttgactgaggccagtttccatacaaagcaaacagctaaagaagtgcttttttccaggacaattctggaagaaataaaaaattcaagctggtaagcttaattttgtgccatttctttaaaagagtaaattctattatgaaataacttagtggaaaaagaaaacaaacaaacctagctgtaaattataacttcagactgctaaggctccttaggcagtttgtctgtttacagtctgtccctctccttcggacctgggcagttactgtttcacctgtattacactggaccaaagctctcaatgagaaatacccaccctcatctcccatcttgttctttatgtcaaataaagattattttcacatttacaaaagctcttttatgtgctatgaaaatatacaaacataatttacattcacaatttcatttacaaaacacccaggcaggcatctgaagagtcagcccagttctgtcgatacacaggccattcatattttaccctgtaagcacacagcgttttagcttctcgatccttccttgcagcgcctccagttctggcagcagccatgctggagcaagagagtgtttgagtaaaaactcagttgtctccaaagcccttgctgcagctttaaatactgatctgtattcttcttcaaagggcaacacccgacgggctctctttgtgtgaggctggaaaataaggaaatcatgaaacaagtaatacataatactcattctaaaaataatataagagaaactagtcataggatcacgaagaaggcagccttcccatttgtattaacaataacctaaatgtgctactactctccacgtcctaacttgtatgtggcagacaagaagtcgcactgtgcaacggttcccaatgataaatgctgtcttgtccaacaactatccacgagtagtctttaaaaacatcattaaggaaataaaacatgaatttcctaataagtttgtaaatgctgagagccataatacctttcaacatacttttggagccaattaaggaaaactaaggctccagacatcttgcatagaaggggaagaggaactgaggtgaaactaaaacatatcttaacaactagtttttcaaagggaagtcacagtttaaattcatagggctttcgaacacaactgacttaaattgaactttatatatattcaggcctacagctacatccaagaaaacaagttactattgcactataaacctagaacattgttttccttaggaccctattctatcacctgtgttcaaaacacaattttgaatgtatgtagtcgtgtcaaatttctgccaattaataggtacatgtgatatttgagaaaagtgattattattgatgagatgaattgaacaaactgacatctaagtgtcagaaaatgcatttatgtcatcattggtacaatatgcaattaccaataataaagagtatatttggt

SEQ ID NO: 198 - protein, 735 aa, Mus musculus
MGSENSALKSYTLRESPFTLPSGLAVYPAILQDGKCASVFVYKRENEDKVNKAAKHLKTLRHPCLLRFLSCTVEADGIHLVTERVQPLEVALETLSPAEVCAGIYDILLALIFLHDRGHLTHNNVCLSSVFVSEDGHWKLGGMETVCQVPQATPEFLRNIQSVRDPASIPPEEMSPEFSGLPESHGHARDAYAFGALVDSLLPIFNEQVSADVLSSFLQILHSALLNPMPECRPALSTLLSHDFFRNDFLEVVNFLKSLTLKSEDEKTEFFKFLLDRVSCLSEELIASRLVPLLLNQLVFAEPVAVKSFLPYLLGPKKENAPGETPCLLSPALFQSRVIPVLLRLFEVHEEHVRMVLLSHIEAYVEHFTQEQLKKVILPQVLLGLRDTSNSIVAITLRSLAVLVSLLGPEVVVGGERTKIFKRTAPSFTKTSDLSPEGSPMHVVCSQQSRVSKVLEDPSSNVFPKWLSGNVPSSSRKRIQEECYSSLSQTGDQFSHTIKFPMNGLSDVKNTSEDNGSFPAGSNKPEEWPDWSEPEEPEQQPASIHRWPREPCDVAESQHTNLTAEEVTWDDGEASFGTEINSTATASAPVPVTSGGQSTSAALVPLTEESKPLQSSPSSKTSHRQHEEVKPPQVSQERPLKAPSGLGLGEEFTIQVKKKPVQDPELDWFADMIPEIKPSGTFLILPELRTEVMVPDKDNVSSLMQFSSKFAATEMTEGEAEGWEGEELAWEDNNW

SEQ ID NO: 199 - DNA, 637 bp, Mus musculus
atagcaccctcctgtgctgcagcctttctcacctggaagacagctcctcctcgaaggtttacaaaatgtgtgatgcctttgtgggaacctggaagcttgtctccagtgaaaacttcgatgattacatgaaagaagtgggagtgggctttgccacaaggaaagtggcaggcatggccaagcccaacatgatcatcagcgtaaatggggatttggtcaccatccggtcagagagtacttttaaaaacaccgagatttccttcaaactgggcgtggaattcgatgaaatcaccgcagacgacaggaaggtgaagagcatcataaccctagatggcggggccctggtgcaggtgcagaagtgggatggaaagtcgaccacaataaagagaaaacgagatggtgacaagctggtggtggaatgtgttatgaaaggcgtgacttccacaagagtttatgaaagggcatgagccaaaggaagaggcctggatggaaatttgcatcaaacactacaatagtcagtcggatttattgtttttttttaaagatatgattttccactaataagcaagcaattaattttttctgaagatgcattttattggatatggttatgttgattaaataaaacctttttagactt

SEQ ID NO: 200 - protein, 132 aa, Mus musculus
MCDAFVGTWKLVSSENFDDYMKEVGVGFATRKVAGMAKPNMIISVNGDLVTIRSESTFKNTEISFKLGVEFDEITADDRKVKSIITLDGGALVQVQKWDGKSTTIKRKRDGDKLVVECVMKGVTSTRVYERA

SEQ ID NO: 201 - DNA, 857 bp, Mus musculus
gcctgctgacactctgtggggcttacactgggcctgggagtgctgctttgggaaacatgaatctcctattcagactagcagttttccttagcctgtggtgttgttccgatgctcagggacaaacaaaagaagaaagcactgaggaagtgaaaatagaagttttgcaccgtccagaaaactgctccaaaacaagcaggaaaggagacttgctaaatgcccattacgatggctacttggctaaagacggctccaaattctactgcagccggacacaagatgaaggccaccccaaatggtttgttcttggtgtcggacatgtcataaaggggctggacattgctatgatggacatgtgccctggggaaaagagaaaggtgattataccgccttcgtttgcatatggaaaagaaggctacgcagaaggcaagattccacccaatgcaactctgatgtttgagattgaactttatgctgtgaccaaaggaccaaggagcattgaaacatttaagcaaatagacacggataatgaccggcaactctccaaagctgagatagagctttacttacagaaggactttgaaaaagatgcaaacccccgtgacaagtcatatcagaaggcagttttggaagatatctttaagaaaaatgaccacaatggagacggcttcatttctcctaaggaatacaatgtgcaccaacatgatgagctataaatataattacttctctatttgttagtaactcacatactttgctttaaaaaaaataccaccgttctctatgttgtggttatacctgttttcccttgtgagaagatatttgttccttcaataaacataattttggtgtattaatgt

SEQ ID NO: 202 - protein, 218 aa, Mus musculus
MNLLFRLAVFLSLWCCSDAQGQTKEESTEEVKIEVLHRPENCSKTSRKGDLLNAHYDGYLAKDGSKFYCSRTQDEGHPKWFVLGVGHVIKGLDIAMMDMCPGEKRKVIIPPSFAYGKEGYAEGKIPPNATLMFEIELYAVTKGPRSIETFKQIDTDNDRQLSKAEIELYLQKDFEKDANPRDKSYQKAVLEDIFKKNDHNGDGFISPKEYNVHQHDEL

SEQ ID NO: 203 - DNA, 3927 bp, Mus musculus
cccagcctggcccggccctaacagcaaagtttagtcgagttgaagttgcagcatttgcaggggacacaagaggcgtccagcggtagccggtggcagagccatggcgggcgaggaagagcgcggggatggggacccagtatccgtggtaactgtgagagtgcagtacctggaagacaccgaccctttcgcttgtgccaacttcccggaaccacgccgggcccccacctgcagcctggacggggctctgcccctgagtgcgcagatccctgctctgcaccgactcctgggggcgcctcttaagctggaggactgtgcattgcaagtgtctccctccggatactacctggacccggagctgtccctagaagaacagcgggagatgctggagggtttctatgaagagatcagcaaagggcggaagcccacgttaatcctgcggacccagctctccgtgagggtcaatgctatcttggaaaagctgtatggctccagtggccccgagctccgccgatctctcttctcattaaagcagatattccaggaagacaaggacctggtgcccgaattcgtgcactcggagggtctgagttgcctgatccgcgtgggtgctgctgcagaccacaactaccagagctacatccttcgagccctgggccagctgatgctgtttgtggatgggatgctgggggtggtggcccacagcgagaccgtgcagtggctgtataccctgtgtgctagcctgtcccgcttggtggtaaagacagccctgaagctgctgctggtgtttgtggagtattccgagaacaacgcgccgctgttcatccaggcagtcaacgcagtagccagtgccaccggtactcttccctgggccaacttggtgtccatcctggaggagaagaatggagctgatgcagagttgttggtgtacactgtcactctcattaacaagacgctggcggcactcccagaccaggactccttctatgatgtgacagatgctctggagcagcagggcatggaagcgctggtccaacgtttcttgggcaccgctggcactgatgttgacctgcgaacccagctaacgctctatgagagtgcccttcggttagaggatggagatatggaagaggctgcagccgccgctgctgcaggtggccggcgagagcggcggaagccatcctcggaggagggcaaaaggagccgaagatcactagaaggtggaggctgccctgtgcgtgccccagaacctggctctacaggctccgcctcaccagtaggctccaccccctccactggctccgccccgcctacaaatccagccttcagctctactggcccagcctctggccttcttcgaacctcagtgaacctctttcctaccatttccgtggggccgtcagtggacagttcctgtgagagaagcgtctacaaagcccggttcctggagaatgtggcggcagcagagacggagaagcaggctgctctggcccaaggccgagcggagacgctggctggagccacggtagatgacactgatggatcatcaggcacaagggaactgtgggactccccagagccagcctctgcacccaggacaccccagagccctgtttcccgaatcctgctgcgcacccagcggagtcttgagccagagcccaagaagccagtgtcaccaccaagccctaaggctgagcctatccaggagcctcccacctgtgtccccaagctctgcattggggacttggacttctcagacctaggggaggatgaagaccaggacacactgaatgtggaatctgtggaggctggaaaagcatctcccttcctgtcatctctatcgccctcactctctgggggtccccctcctccgcccccacctcctccacccatcacaggctcctgccccccacctccgcccccacctctccccccacccgccacaggctcctgccctccacctccgcccccacctcccccacccatcataggctcctgcccaccgcctccacccctggctgctccttttacccactcagcacttgacggcccaaggcaccccaccaaaaggaagacagtaaaacttttctggcgggaactaaagctgactgggggccctgggtgctctagaagccgctttgggccttgtcctaccctgtgggcctcgctggaacccgtctcggtggacacagcccgcctggaacacctatttgagtccagagccaaggatgtgctaccaaccaagaaagctggtgagggccgccggacaatgaccgtagtgctggaccccaagcgcagcaatgccatcaacattggcctaaccactctgccacccgtgcacgtcatcaaggctgccctgctcaacttcgatgagtttgctgtcagcaaagatggcattgagaaactgctgacaatgatgcccacggaggaagagcggcagaagattgaggaagcccagctggctaaccccgatgtacccctcggccccgctgagaatttcctgatgacgcttgcttccattggaggcctggctgcgcgcctacagctctgggctttcaagctggactatgaaagcatggagcgggaaattgcagagccactgtttgatctgaaagtgggcatggaacagctggtacacaatgccaccttccgctgtattctggctacccttttggctgtgggcaacttcctcaatggttcccagagcagtggctttgagctgagctacctggagaaggtgtcagaagtgaaggacacagtgcgacggcagtcattgctctatcatctctgctccctggtgctccagacccgacctgattcctctgacctctactcagaaattcctgccctcacccgctgtgccaaggtggactttgaacagctgactgagaacctagggcagctggagtgccggagccaggctgccgaggacagcctccggagcttggctaagcacgagctctccccagctctgcgtgctcgcctcacccacttcttggcccagtgtacccgccgggtagccatgttaagagtagtgcatcgccgagtctgcaataggttccatgccttcctgctctacctgggctacaccccacaggcagcaagggatgtacgcatcatgcagttctgccacacactgagagagtttgcccttgagtatcggacttgtcgggaacgggtactgcagcagcagcagaagcgggctacataccgtgagcgcaacaagacccgtggtcgcatgattaccgagacagagaagttctcaggtgtggctggggaggcccccaataacctgtctgtcccagtggctgtgggcagcgggccaggtcagggtgatactgacaatcatgccagcatgaagagcctgcttaccagcaggccggaagatgccacacacagccgacgcagcagaggtatggtccagagcagttcccccgtctcacacacagcagtggggccctccgctgcatcccctgaggagactgcagcctccggcttacccaccgacacgtcagatgagataatggacctgctggtgcagtcagttaccaagagcggtcctagagccttagctgctcgggagaggaagcgctctcgtggcaaccgaaagtccttgagacggacactgaagagtggacttggagatgacctggtgcaggcactgggactaagcaaagctcctggtctagaggtgtgaggtgctaccacgcctggacatgacagcgacatgcacaagagatggagtgcggaaagggcctggaacagaaacctggtttcagaagcttatacccagaaaccagtattgtgaacagtattaggtgtgtgtgtgtgtgtgtgtgtgtgtgtgtgtgtgtgtgtgtatacacgtacatgtattttgcatgtgtgagttccttatttggaacaaaataaagtttacctagctaatct

SEQ ID NO: 204 - protein, 1197 aa, Mus musculus
MAGEEERGDGDPVSVVTVRVQYLEDTDPFACANFPEPRRAPTCSLDGALPLSAQIPALHRLLGAPLKLEDCALQVSPSGYYLDPELSLEEQREMLEGFYEEISKGRKPTLILRTQLSVRVNAILEKLYGSSGPELRRSLFSLKQIFQEDKDLVPEFVHSEGLSCLIRVGAAADHNYQSYILRALGQLMLFVDGMLGVVAHSETVQWLYTLCASLSRLVVKTALKLLLVFVEYSENNAPLFIQAVNAVASATGTLPWANLVSILEEKNGADAELLVYTVTLINKTLAALPDQDSFYDVTDALEQQGMEALVQRFLGTAGTDVDLRTQLTLYESALRLEDGDMEEAAAAAAAGGRRERRKPSSEEGKRSRRSLEGGGCPVRAPEPGSTGSASPVGSTPSTGSAPPTNPAFSSTGPASGLLRTSVNLFPTISVGPSVDSSCERSVYKARFLENVAAAETEKQAALAQGRAETLAGATVDDTDGSSGTRELWDSPEPASAPRTPQSPVSRILLRTQRSLEPEPKKPVSPPSPKAEPIQEPPTCVPKLCIGDLDFSDLGEDEDQDTLNVESVEAGKASPFLSSLSPSLSGGPPPPPPPPPPITGSCPPPPPPPLPPPATGSCPPPPPPPPPPIIGSCPPPPPLAAPFTHSALDGPRHPTKRKTVKLFWRELKLTGGPGCSRSRFGPCPTLWASLEPVSVDTARLEHLFESRAKDVLPTKKAGEGRRTMTVVLDPKRSNAINIGLTTLPPVHVIKAALLNFDEFAVSKDGIEKLLTMMPTEEERQKIEEAQLANPDVPLGPAENFLMTLASIGGLAARLQLWAFKLDYESMEREIAEPLFDLKVGMEQLVHNATFRCILATLLAVGNFLNGSQSSGFELSYLEKVSEVKDTVRRQSLLYHLCSLVLQTRPDSSDLYSEIPALTRCAKVDFEQLTENLGQLECRSQAAEDSLRSLAKHELSPALRARLTHFLAQCTRRVAMLRVVHRRVCNRFHAFLLYLGYTPQAARDVRIMQFCHTLREFALEYRTCRERVLQQQQKRATYRERNKTRGRMITETEKFSGVAGEAPNNLSVPVAVGSGPGQGDTDNHASMKSLLTSRPEDATHSRRSRGMVQSSSPVSHTAVGPSAASPEETAASGLPTDTSDEIMDLLVQSVTKSGPRALAARERKRSRGNRKSLRRTLKSGLGDDLVQALGLSKAPGLEV

SEQ ID NO: 205 - DNA, 3115 bp, Mus musculus
ctctttttcgatccgctacaacaacaaacgtgcacaggggagcgagggcagggcgctcgcagggggcactcagagagggcccagggcgccaaagaggccgcgccgggctaatctgaaggggctacgaggtcaggctgtaaccgggtcaatgtgtggaatattggggggctcggctgcagacttggccaaatggacgggactattaaggaggctctgtctgtggtgagtgacgatcagtccctttttgattcagcatacggagcggcagcccatctccccaaggcagatatgactgcttcggggagtcctgactacgggcagccccacaaaatcaaccccctgccaccgcagcaggagtggatcaaccagccagtgagagtcaatgtcaagcgggagtatgaccacatgaatggatccagggagtctccggtggactgcagtgtcagcaaatgtaacaagctggtgggcggaggcgaagccaaccccatgaactataatagctacatggatgagaagaacggcccccctcctcccaacatgaccaccaacgaacggagagtcattgtgcctgcagaccccacactgtggacacaggagcacgttcgacagtggctggagtgggctataaaggaatacggattgatggagattgacacttccttcttccagaacatggatggcaaggaattgtgtaaaatgaacaaggaggacttcctccgagccacctccgcctacaacacagaagtgctgttgtcgcacctcagttacctcagggaaagttcactgctggcctataacacaacctcccatacagaccagtcctcacgactgaatgtcaaggaagacccttcttatgactctgtcaggagaggagcatggaacaataatatgaactctggcctcaacaaaagtcctctccttggaggatcacagaccatgggcaagaacactgagcagcggccccagccagatccttatcagatcctggggccaaccagcagccgcctagcaaaccctgggagtgggcagatccagctgtggcagtttctcctggaactactgtccgacagcgccaacgccagctgtatcacctgggaggggaccaacggggagttcaaaatgacggaccctgatgaggtggccaggcgctggggagagcggaagagcaagcccaacatgaattatgacaagctgagccgggccctccgatactactatgacaaaaacattatgaccaaagtgcatggcaaaaggtatgcctacaagtttgacttccatggcattgcccaggccctgcagccacatccaacagagacatccatgtacaagtatccctctgatatctcctacatgccttcctaccatgcccatcaacagaaggtgaactttgtcccgtctcacccatcctccatgcctgtcacctcctccagcttctttggagcagcatcacaatactggacctcccccactgctgggatctatccaaaccccagtgtcccccgccatcctaacacccacgtgccttcacacttaggcagctactactagaactaacaccagttggccttctggctgaagttccagctctcactttactggatactctggactctaaaaggcacagtagccttgaagagataagaaaactggatgttctttcttttggatagaacctttgtatttgttcttctaaaaaaattattatttttatgttaaaaacttttgtttcctctacctgaaaaaaaaaaaagatcattccatgagccagtccaccagtttggattctcaacctcctatcatcgaatgagttaaatatttaggttactggaacggtttataccatgattctgagaaaggagtacgcattttctttactctttttttttatgaccaaagcagtttcttatcagcacacgggtctcatcattgtaggattccctacgatcatgaatcatggacttgaccagggttggtctggtttgagacttaataaaagtcaaggcaggatgtttataatcttatcttcggaggactcaattcagtggatggcaactggaacactggctctgaggccagtgaagttttttgcccaactggaatttaaaagatgtgtgtctatgtgtgtatttaagaagccattattattacaaaattcccacaatgggcagtatgtgtttgggtgactcttctccccagaaatagtcagaatatgaacaaagaaagtttaacacaaactcagacactcctgacgggcagaggattaaataacatttttttggagggtttaataacatttttggaggggtttttttgtttgtttttgtttttgggggttttttttgtttgttttttgttttttggtttttggtttttttttgttttttttttttttttggttttgatttttaatgacagtgagtcccagaactttgaaaagtcatggggatttctaaactcagattcgcaaacgctgtgcgtttgtcagaccaccagaccaaggtcaaacaatcagaaggcaactaactgtataaattatgcagagttattttcctatatctcacagtattaaaaaaataaataattaaaaattaaagaataagtaaacgagttgacctcggtcacaaatgcagttttactatcaaatcaatcattgttatttttttaaaatataatttgtacatctttgtcaatctgtacatttgggctatttgtacgtttttgtaactgtttttttttaataagcataatgtgactattgaaaacgaggagttaaaagtcactgagtttttaggaagaaaaacctaaaaatacagttatttaacacgcatgcccaaacaagatctgtttagacctacaacgctttagaaatgtttgtaaataacagagttgcaataacctgaaaaggacaaacaaacttttctctgtgcacacgaggcactctcctgctctatatatgcaatatatttttagatgtgcaaatatatatataatttttcaggtaatcgtgactttttaaacgatattgttaaggtgacaactcttagtccactgaagactaagttgtaaaataatttgaccttaataaattgtgccttcttctttttcttcttctctc

SEQ ID NO: 206 - protein, 478 aa, Mus musculus
SEGATRSGCNRVNVWNIGGLGCRLGQMDGTIKEALSVVSDDQSLFDSAYGAAAHLPKADMTASGSPDYGQPHKINPLPPQQEWINQPVRVNVKREYDHMNGSRESPVDCSVSKCNKLVGGGEANPMNYNSYMDEKNGPPPPNMTTNERRVIVPADPTLWTQEHVRQWLEWAIKEYGLMEIDTSFFQNMDGKELCKMNKEDFLRATSAYNTEVLLSHLSYLRESSLLAYNTTSHTDQSSRLNVKEDPSYDSVRRGAWNNNMNSGLNKSPLLGGSQTMGKNTEQRPQPDPYQILGPTSSRLANPGSGQIQLWQFLLELLSDSANASCITWEGTNGEFKMTDPDEVARRWGERKSKPNMNYDKLSRALRYYYDKNIMTKVHGKRYAYKFDFHGIAQALQPHPTETSMYKYPSDISYMPSYHAHQQKVNFVPSHPSSMPVTSSSFFGAASQYWTSPTAGIYPNPSVPRHPNTHVPSHLGSYY

SEQ ID NO: 207 - DNA, 2975 bp, Mus musculus
gtcccacagatgtcactgtccagtcgcctgtgtctcctcactattgtcgccctgattctgcccagcagagggcagacaccaaaaaagcccacatccatttttacagcggaccagacttctgcgactactcgtgacaatgtcccagatccagatcaaaccagcccaggagtccagaccacccctctcatctggaccagagaagaagccacaggaagccagacagcagcccaaaccgagacccagcaactgacaaaaatggccacctcgaatccagtgtcagatccagggccacatacaagcagcaagaaaggtacccctgcagtctccaggatcgagcctctcagcccatccaaaaacttcatgcctccatcctacattgaacatccactggattcgaatgagaacaaccccttctactacgatgatactaccctccggaaacggggactgctggtggctgcggtgctgttcatcacgggaattatcattctcactagtgagagtcgggcatgggcagaaagggcaagaaggggctgggggcgggctgggctgcatggtgactgaggatcagggtcttgaaaccccctgggcaaagctgtgcaaactcagcacccctacaaaccaccccagggatgattctcggcctagcctgctggttgcatccagctgggcggttgttctggttgcagcagggggcgctgttcctagagtgcacgtctcttcctctgttgtccttttcttcctgggctcggtcacgtggtagtgccccgatgagcgatacagagacacacaggacagagatatgcagactcagatgactgctagtggatactacgttatgcttctttacaagccaagggtcggcttcatttgtgagaagagaaaacaggacttcattcatccttttaagacagggtctcactgtgttgctcaggctggcgtcaaactcacaatcctcctgcttcagcctcctgaggcttgaggttataggtgtgccaagctgatcagcagtttttgggtttattttgttttgagacagaggagcatgtcgaccaaagatggccttgaatctgtgtgtgtgtgtgtgtgtgtgtgtgtgtgtgtgtatgtgtgtgtgagtgcagaggccatgacagatggaagagagttggataccctggagctgggagtttcagacgatgtgagtctccttagatagatggtaggagctggatgtgagtaaccactgaaccacctcttccaccttaaccttgaacttctgaccctcctgcctctacctcccaagtgcttagttataggtataggcagttaatgcagcacagggagtcaaccccatcacattgtacatgccaggcaagcacaaccgaaccacagccctctggacctgacttcttttattcacgagagctctgcgggttgctgttctcattgtgaccaaataccggactggaatcaatttctggaagcgtttatagcttaagaagagatccatgggtttaggaggtattggtgggcaaagtgcttgcttgaggacctgaattcagaggctcagcctgggtatctgggtgacacccacccatgctgaagagagaaaggagccagcccagctgcatcagtgtgtgccaggttcagcaaagaagacagagtcctttgactctgaaatacagtgcagcccaaccgaggaaaacactccacgtctacctctggtgggggaggatgtgtggtcaaagaggctgagtaacaaaacaggaagtaagagagaagggaggagactggctggtctttctatgacagcacaccctcccgagggctaactgatgggcaagcagagctataacttcctaggtgaccctagactctgcctctcaaaggctgcccaccctctccgtcccaaccctgagtactaaggacccaacatcaaagacagacattggagggacacacccaaaccacacgcactaacagtgggaaaagccagggagacacagacagggagagcagaaggggaggcctgagaggcaggtggctgccatcttctcatggccccgtgcctttttaaactctacgccatctccaattgactctaatccaggtcccagcttctcttgctcatgttcttccatctcacgtccgccctttaccacagggatgtttgcacaggctgctctgccccaccacagccctgcatttgttcatctcagtgtgtgtgtgtgtgtgtgtgtgtgtgtgtgtgtgtgtgtgtacatgtagagatcagaggacaatttccatgagttggttttctccttttttaaaacaaagatttattcatttatcttatgtatatgggtgttttatctgcatgtatgtctgcacacaagacgagggcattggattccatgggtctgcagttatagacaattatgagtgtctatgtggatgctgggaattaaaaccaggaccttctgaagagcaaccactgagcagtctctttagcccctggttttctctttttgcccaaaactcaggacatctggctcagcagcaaacacctttacttgttgagccatcttgctgtcccccttcactgggagcttcctgaggtccagattgatcccccacccccaccccccagccggtctccagtgactatgtgataattagtactgtttccagctcatgggcaaactggttctttttcttccaggtgggaagtgtaggcagttgtctcaattttgcctgaatcgccacaggtgagtgcgggccagcaccctgatgggcaccccagctggagcctccaaactacaccaactcaccaccccctgcctcctccctctaccccaagagcctacagagtgatcaacatgaaagaatcctgaaaggaagaggccactggagggagtcaggcttaaggctaatggtcttcccaccctggggagagaggtctccctaggcactgctgtggctgttcagataaatccacatggtctctcttc

SEQ ID NO: 208 - protein, 184 aa, Mus musculus
MSLSSRLCLLTIVALILPSRGQTPKKPTSIFTADQTSATTRDNVPDPDQTSPGVQTTPLIWTREEATGSQTAAQTETQQLTKMATSNPVSDPGPHTSSKKGTPAVSRIEPLSPSKNFMPPSYIEHPLDSNENNPFYYDDTTLRKRGLLVAAVLFITGIIILTSESRAWAERARRGWGRAGLHGD

SEQ ID NO: 209 - DNA, 813 bp, Mus musculus
cacgcggtactctgacacttcagtctggagatctccggctcagatatgtcactgtccagtcgcctgtgtctcctcactattgtcgccctgattctgcccagcagagggcagacaccaaaaaagcccacatccatttttacagcggaccagacttctgcgactactcgtgacaatgtcccagatccagatcaaaccagcccaggagtccagaccacccctctcatctggaccagagaagaagccacaggaagccagacagcagcccaaaccgagacccagcaactgacaaaaatggccacctcgaatccagtgtcagatccagggccacatacaagcagcaagaaaggtacccctgcagtctccaggatcgagcctctcagcccatccaaaaacttcatgcctccatcctacattgaacatccactggattcgaatgagaacaaccccttctactacgatgatactaccctccggaaacggggactgctggtggctgcggtgctgttcatcacgggaattatcattctcactagtgggaagtgtaggcagttgtctcaattttgcctgaatcgccacaggtgagtgcgggccagcaccctgatgggcaccccagctggagcctccaaactacaccaactcaccaccccctgcctcctccctctaccccaagagcctacagagtgatcaacatgaaagaatcctgaaaggaagaggccactggagggagtcaggcttaaggctaatggtcttcccaccctggggagagaggtctccctaggcactgctgtggctgttcagataaatccacatggt

SEQ ID NO: 210 - protein, 178 aa, Mus musculus
MSLSSRLCLLTIVALILPSRGQTPKKPTSIFTADQTSATTRDNVPDPDQTSPGVQTTPLIWTREEATGSQTAAQTETQQLTKMATSNPVSDPGPHTSSKKGTPAVSRIEPLSPSKNFMPPSYIEHPLDSNENNPFYYDDTTLRKRGLLVAAVLFITGIIILTSGKCRQLSQFCLNRHR

SEQ ID NO: 211 - DNA, 2474 bp, Mus musculus
attgtttccagccaaaccctggtaaagggagggagaaaagcagaaagaagagaagtcagcccaggccagtggcaggggacccaattggggttttgaagtcgctgacccggagcagggaccaaggaccgtgggtggcgtcccctgagttacaggttggaacaaacttgcctagcttcgagtggcaggagctcccaagttcaccggtgagcagcacttgcaagcttgacaaggtgcggagctgagcgccgggctctcgctcgcactgggcgcgagcggcgagggagggggcgggcgcgcaggtcccgcctcccctggccgcgtgcacacacacgcccaccgcggctaggctggaggagcgcgggcgagtgtgagcgcgggcgagtgtgagcgcgagtgtgcgcacgccgcgggagccactctgccctctcctcgcaccctgcccagggcatctcgagaggctggaaacgtgaacaggcttaaagtatggcatgttgcgaagatggtttctgtccagaaggtacccgcgattgcgctgtgctccggggtcagcctcgccctcctgcacttcctgtgcctggcggcttgtttaaacgaatccccaggacagaactcaaaggacgagaaattgtgcccggaaaattttacccgtattctggacagtttgctggatggttatgacaacaggctgcgtcctggatttgggggtcctgttacagaagtgaaaactgatatatatgtcaccagctttgggcccgtttctgatgttgaaatggaatacactatggatgtgttcttcagacagacatggattgacaaaagactaaaatatgacggcccaattgaaatcttgaggctgaataatatgatggtcaccaaagtttggacccctgatactttcttcaggaatggaaagaaatctgtctcacataacatgacagctccaaataagctttttagaattatgagaaatggcactattttatacacaatgagactcaccataagtgcggagtgccccatgagactggtggattttcctatggatggtcatgcctgccctttgaaatttgggagttatgcatatcccaaaagtgagatgatctacacctggaccaaaggccctgagaagtcagtggaggtgccaaaggagtcttctagcttagttcaatatgacctcattgggcagactgtatcaagcgagactatcaaatctattacaggtgaatacattgttatgacggtttacttccacctcagacggaagatgggctactttatgattcagacgtatatcccatgcatcatgacagtgattctttctcaagtttccttctggataaacaaggagtctgttccagctagaactgtatttggaataaccacagtcctcacgatgaccaccctaagcatcagtgctcggcattctttgcccaaagtgtcctatgcgactgccatggattggttcatagctgtctgttttgcttttgtattttcggctcttattgagtttgctgctgtcaactatttcaccaacattcaaatgcagaaagccaaaaagaagatatcaaagcctcccccagaagttccagctgctcctgtgctgaaggagaaacacacagaaacatcccttcagaatacacatgccaatttgaacatgaggaaaagaacaaatgccttggtccattcagaatcggatgtcaaaagcagaactgaggtgggaaatcactccagcaagaccagcgctgtccaggagtcttctgaagccacgcctaaggctcacttagcttccagtccaaatccattcagcagggcaaatgcagctgagactatgtctgctgcagccagaggtctttcatctgcagcatccccctctcctcatggcacattgcggccagcttctttggggtcagcttccactcgccctgcatttggatctagacttgggcgaattaagacaacagttaatacaacaggggctgctgggaatgtgtcagccacacctcctccccctgctccaccgccttctggatctggcacaagtaaaatagacaaatatgctcgtattctctttccagtcacatttggagcatttaacatggtctactgggttgtttatttatctaaggacaccatggagaaatcagaaagtctaatgtaattttgttgctatagtaatttcataacaacgatggaaatacagactgtcttttaaaatgtttttaaaggtaagtattctttactaaaataaaaattctatgtaattttttcacttaaaaaaatacaagtcagatatggagagagttaattaactcttcagtggctagaaagtgaaccatctttctttatagaaagatagctttaaaagaatctattcagtgttcaaattggatagaacacagagcattatggaaagttggagcaagagaaatagagctaggagagatatgtggtacacccttttgcattgaaatttg

SEQ ID NO: 212 - protein, 552 aa, Mus musculus
MVSVQKVPAIALCSGVSLALLHFLCLAACLNESPGQNSKDEKLCPENFTRILDSLLDGYDNRLRPGFGGPVTEVKTDIYVTSFGPVSDVEMEYTMDVFFRQTWIDKRLKYDGPIEILRLNNMMVTKVWTPDTFFRNGKKSVSHNMTAPNKLFRIMRNGTILYTMRLTISAECPMRLVDFPMDGHACPLKFGSYAYPKSEMIYTWTKGPEKSVEVPKESSSLVQYDLIGQTVSSETIKSITGEYIVMTVYFHLRRKMGYFMIQTYIPCIMTVILSQVSFWINKESVPARTVFGITTVLTMTTLSISARHSLPKVSYATAMDWFIAVCFAFVFSALIEFAAVNYFTNIQMQKAKKKISKPPPEVPAAPVLKEKHTETSLQNTHANLNMRKRTNALVHSESDVKSRTEVGNHSSKTSAVQESSEATPKAHLASSPNPFSRANAAETMSAAARGLSSAASPSPHGTLRPASLGSASTRPAFGSRLGRIKTTVNTTGAAGNVSATPPPPAPPPSGSGTSKIDKYARILFPVTFGAFNMVYWVVYLSKDTMEKSESLM

SEQ ID NO: 213 - DNA, 1276 bp, Mus musculus
agagagaaggctgtaatggcggctgtgactgaagttgtggtccccgcggatggcgcggaagccaggcccttggcggccgaggagctggcggcgcagaagcgggagcagagactacgcaagttccgtgagctgcatctgaagcggaatgaagctcgtaagctgaatcaccaggaagttgtggaagaagacaaaagacttaagttgcctgcaaactgggaagccaagaaagcgcgtctggagtgggagctccaggaagaggagaagaaaaaggagtgtgcagctcgaggggaagactacgagaaggtgaagttgctggagatcagcgcagaggacgctgagaggtgggagaggaggaagaagaagaagaaccctgacttggggttttcagattatgctgctgcccaattacgccagtatcaccggctgaccaagcagatcaaacctgacatggaaagctatgagcgacagagagagaagcatggagaagattttttcccaacatccaacagtcttctccatgggacgcacgtgccttcctcagaggaaattgacagaatggttttagacctggaaaagcaaattgaaaagcgagacaaatacagccgaagacgcccgtacaatgatgatgccgacatcgactacatcaatgagaggaacgccaagttcaacaagaaagcagagaggttctacgggaagtacacggccgagatcaagcagaacctggagagaggcacagctgtgtgagcttaaacctcgggagcagcgcagaagctgggaacggtcggtcggaggcttctgctggcaaattcaacctccctcgtgggaccagtcgattactgtcccacttcccctgcctccccactgggcttctgaaataaatgtcttttctcacctcctctgccacatgcatatgttcacatttttgtgcttggatagacgatgtatttcttgtagtaattgatgttttgtaaaaatctaatttgtataaatcctaattattatttttctatgtattttaaatgtgcataaccatataacctttgaattattggggcttagatgtacacgggtgcagtcactgctgcttttgagtgttgttaggaggaagacggaagctccagccgggctttgggactggccaggaggggactgagaagcagaggctgttgagacagatgctcctggagttctggcactgtgcccggactggagtcagaggtcatggccgtcagccgtgcacactccctttttaaagaacaataaaatgctttggaat

SEQ ID NO: 214 - protein, 234 aa, Mus musculus
VPADGAEARPLAAEELAAQKREQRLRKFRELHLKRNEARKLNHQEVVEEDKRLKLPANWEAKKARLEWELQEEEKKKECAARGEDYEKVKLLEISAEDAERWERRKKKKNPDLGFSDYAAAQLRQYHRLTKQIKPDMESYERQREKHGEDFFPTSNSLLHGTHVPSSEEIDRMVLDLEKQIEKRDKYSRRRPYNDDADIDYINERNAKFNKKAERFYGKYTAEIKQNLERGTAV

SEQ ID NO: 215 - DNA, 1969 bp, Mus musculus
gtttcagatagcagcagcagcggcggcggcggctatgtttcacttcttccgaaagcctgcagaatccaaaaagccctctgggccggaaccggaagcagatggatttgtcctcttaggagctacagcaaatgaagtgagatgtaaaacttctgaagcagaaggcagccaggctttggagaccggcaaagaagacacatccagcgtgactgtatcaggccccgagacagagaatcagacaggccagactctgcagaacaactcactaacagctgagctcctgagcgatgtgcccttcaccctggccccacatgtgctggcggcacagggcaccatcagcgaccttcctgaccacgtactctcatacgatgtcggcgacaacttgtcccgattctggtatgatttcactcttgaaaattcagtcctctgtgatttgtagtctttgtgtctatgcataccctagcagctttaaaggaaatgaggctgcccattttattgaacctgtgtgatgttctttgtcatttcactggtggcggccttgaggcaagcaaggatcataaaataaataaaatagcatcatattcatggttttatcttcaaaatcaagtgaatttatataaaaattaaagtcaatttaatgaatggaactgactttgggaaaaaatatggattcagaccactcatatttccccatgtgataaaagtccaattgtggagagtatatgagaggcacagggtgtttttgctgacacaacagtgaaagagaaacaagaacttccctcgctcagttaccaaggctcagcaacctgagcatggagcgggtgtgaagggcctgggttcagaggaggctatggtcctatgcagttactctcacagtgtttatgaatgaggtcagacaaaccactagggaaaattgaaacctcttcgaaacaccagcccttctttgctgattcaagactaagggagatgctttggttttcttagactcatgtggccctctccaccctcctgaaggatcgctgtgtccttctttattctcatccctgctgagtgtgttgaagccctttctagagaactgtcctgtgggtccttcctgaccacgtgtgttcccagctcgtgggtctgcttctgctttcacctcttctgcttcctagatcactgctgataagccctggttagaagtgtgttggccgcagtacagtggcagggtttgactgttaaacacacccagttgaatgatgctccaattagtgtgtaggcagacacccagataggactagaatgcccactgtttattccaagtaaagctgagcaggattgctgtcggtcagtacacgactaagagagttggtctagagtaacagggccatttccttgccgtgaaaattttaagtcatttcttttgattagttataatttattaattctgtgccaaaggtttttaagtatattttttcacaaagagagagtatcaggaaaactaaacactgtgcagaaaagtacaagagtttttctaatttttatgtgctctgcatactcatttaataaatgtggtgtggtcttcataaaacatactgtgtgatttaaagttaaagggacatttgtgatgacaaaattatacttcctttacagttaacatgactgtgtgagattaaggcttcaattaggtctttacatagttttcataaaacatctacataggaaatatgccttatttttggcacaaatgtgaacattttgtagcacttctgtgatggtacatcctttttaactatccatgttaatgtactctcaaaattgaatgtaaagagattgttcttttgcttaaaatatgtgaaaatttatataattatacatttcatttatatgtatgtcttccgtgttacaaatgtgcttataagtactttttgtctaaaattgttatatttaaagaatgtgaattgaaataaatgttttgattgttttcagatcc

SEQ ID NO: 216 - protein, 133 aa, Mus musculus
MFHFFRKPAESKKPSGPEPEADGFVLLGATANEVRCKTSEAEGSQALETGKEDTSSVTVSGPETENQTGQTLQNNSLTAELLSDVPFTLAPHVLAAQGTISDLPDHVLSYDVGDNLSRFWYDFTLENSVLCDL

SEQ ID NO: 217 - DNA, 5587 bp, Mus musculus
atgtgcccttcaccctggccccacatgtgctggcggcacagggcaccatcagcgaccttcctgaccacgtactctcatacgatgtcggcgacaacttgtcccgattctgtggacaggccaaaatctcaacatattcgaacctctagtacaataaggcgaacctcttctctggatacgataacaggaccttacctcacaggacagtggccacgggaccctcatgttcactacccttcatgcatgagagataaagccactcagacacctagttgctgggcagaagagggagcagaaaaacgatcacatcagcgctctgcatcatggggaagtgctgatcaactgaaagagattgccaaacttaggcaacagctacaacgcagcaagcaaagtagtcggcatagtaaagagaaggacagacagtcacctctccatggcaaccacataacaatcagtcatactcaggctattggatcaagatcagtccctatgcctctgtcaaacatatcagtgccaaaatcatctgtttcccgtgtaccctgcaatgtagaaggaataagtcctgaattggaaaaggtattcatcaaagaaaacaatggaaaggaagaagtgtccaagccattggatataccagatggtcgaagagctccgctccctgctcactacaggagcagtagtactcgaagcatagatacccagacaccttctgtccaagagcgcagcagtagctgcagcagccactccccttgtgtgtccccattttgtcctccggaatcccaggatggaagtccttgttcaacagaagatttgctctatgatcgtgataaagacagtgggagtagctcaccgttacccaagtatgcttcatctcccaaacccaacaacagctacatgttcaaacgggagcccccagagggatgtgagcgggtgaaggtctttgaggaaatggcgtctcgtcagcctatctcggcccctctcttttcatgtcctgacaaaaacaaggttaatttcatcccaaccggatcagctttctgtcctgtaaaacttctaggccctctcttacctgcctctgacctgatgctcaagaactcccctaattctggccagagctcggctctggcaacactgaccgtagagcagctttcctcccgggtttccttcacatctctctctgatgacaccagcacagccgactccctggagccctctgcccagcagccatctcagcagcagcagctcctacaggacttgcaggtggaggaacacgtctccactcagaactatgtgatgatctaaagcagagggggagctggtctccacccatggtccatggattgggaatgagatctcagacatctatctgcatggagtgacaaactttcccaacatcaccaacagcaaagtacttagcatcacaaaatagctattaacactgatcttggcagggaccgacttatattcagcagtttttgtggaaagcagtaatgcttgcaaaaatgtgtgtgtcattcagcatttaatggagactatgcatttcatagtatgtctgacagattagtactgtgtcctgtgttttgttccaacattttcagtatgaataagctctatttcaaaaagttgcctgtctaagtagaaaatgtcttgctgtgttttgtcctatggaaaatactgtacttcaggattatgtttacaattgatccaggtgtttgtttctaacttctataatacatacaatgcaaaaaaaaaaaaaaaatggccacaacagttgcacagtgcccaccctatggcctagcttcaggtacttcagttgaagtctaaactcaggtaacttggaatgtatgtcatattgggatattaaatatttcacagctacaaagctaaagagggaacatcactcttttgcctttccttgttttatgcatttccttttcttcattccattccacactagaataagaagtgcattgatccctaggagatgctaatcctgggtatagggaacatgaggagaaccagcaaatttgtggtgtgtgacatcacttttgtcatgtggttaccagtagaacaactgttgcattcactgtttcaacatgtgtaaatgtggcttttttttttaaaaaaaaagaaaaagaaaaaagaaaaaacaagttgtgttgctcagtgactgactgttacagtgttgcaaataaagcctcagtagtagcctacataaacattccccattgcgtgtgacgaaatttaaatgcagggatggctggagttcatttcaaagcaagtggcgttttgcagaaataaataaggatttttctttatattggccattggggtcataattgctactatttttatctaaagacatatttatgtttagcttcattttaggaaattgtaattttctggttacaaagtgaaacattttggttactgttttcctcaagtatttggtaaatgagttgtattcatgtagagagaatgtgtatgtctcagaaccagtgcagcataagcaagcagatttcttgttgactttcgagagcaatagcttaaagctgtctcatttaagcctcagataacactatcatgaataattttgttaagacgtagaacgcatggagtggagcagaaccccgagtaaatagccttgaacttgcagacttgacagaagttctccacaaagtgcatagaagagagccatagagattcctgttgccacctggagagcccgacttcagactttatttttttgcagcacagcctgtgcaaaagtaaagggacgcttttgtattggtgttccgttgctctcagttcagttagagcctagagttctcccatctccacctaacgtgtgtggcacaatgtttggtttggttggtttttagagtcgggaaccgctgcctacagttactcttcagttttccataggtcatacctgcggtttcctttgactcctctaaggagtcaacgagtagaaggatgagctgataaagtgatgataccgtgttaatttttacaaaatgctgtgcgtgagtgtgcatacacgtgcacatggatgtgtggatgtgtgtattctgtgtgctattttgtcaccttgatgtctcctttccaccaaagtttgcagtaatactctcttctgaaggtacgcagtcagtgttatagagactgtcatggagaagaggactcagttgacttttgccattttcataggggaaccttttaaaacaatcttttcagcagcagacacctttaaccctaataatctcaggccttgatgaaaatactatattttgtagattatggttaaaggaagaaaattgctagttccgtaagataaatatgagctccatttaacttcttttttttaagcctctaacaattttattgtaagtaaacaaaattatgtgtacttgttttattcggcacgtgaaaacagatatttacagatataaaaaactcgtattgacagacgtttaaatggacagagtcaagttgatagaagcatgacacaaatttggtaaagcaaatctcagatactgacactgaagcaagtgctctcagatccatcaaacagaccacagccctcccttgccaaaactccaatcaattctatcttagtatctaagatagacatcctgtttgtttttcataagtcaatcttggcacttttatgaacaattagttcctctattcacaaaaggcatcataattatttttactttcttaaagtttgagggttttttggtttttgttttaagtagccaagatctacagttgatcttctaaaaggtcacgatcttagtaagttctttttagttacaggcaaaggacccactttacagttggcttttaggatcttgccattcaaacagtctttgttgttatggtaagcacacagacactttgtacaatattcaaattgacagctttcccgtttgcagactgctcgctctaaatagtggtcatattttgcagggaaattatagcaagcacaggctttgaggcttcccttgttcttcaatgtctgccacctccacgaacttgttgtgccagctgtaggtagaacctttctgaccacgctgactggaggacttgacctgaacatctttttttgggaggtgcccaggtcgacgatgactttgaacagaagttagtgcaggtctgcccacaacatgtcctctcgttgcagcatgtagtgacaacttactgctttcaatgactctgcatggttttgctgtagagctggaccgctcccttattgttttccagtatcttcttccaaattctgctcactttagacaggtttattaagtccgtgccccgagcttcatcacaatgttagccaacaggtgcacgaatcccctccgggagagctcagccaggagatctaggtgttccaggcccattttcttgccaattatactttgcagtctaaagttgccgctggtgataacttccttcagcatttctcgatccactttagggtttcgcttgccattcttttttagtgttgagcaaaccactctttgacaatgcaggacaggcagcaggttttgttgggatgctggtccaggctctgtgatggcagcaggcgggcctggggactgtttctgaaattctccaggataaggatgccgtcgtcacggtcactttgtgtaaaagatgagtagccactgtcctcatacagtctactggcctctagctcttctgtttcgtttgaactatctagtgtgttttgtacacgttgattctccttgctatcatgacccacaattggtgactcgatgaaagacaacctctcatggtttctaacacagtccttacaggaaggtttcaaacacacgggactgtaggaaccttctctcccactgtcctcaggcttcaaccacttcaagctcagaaagatcagggttgcaattaaaacacttcattgtaacagaaagaacagggctttcttctttatgtccacggtcgtccacgcgccaagacggcagggacagaacgacggccggcgcagatcactgcaggtgtgcctgctcatgcgggaaaactcgggctccagtgcaggggaggtggcggcgaccataggaaagaggtggccggccctccatttaacttctaatatctgggttagcattacatgatgtgttgatcttatgctcagcatttgtctaagatgcaatagtatcattatcaatttcagaaatatggactgaatatgcttttttggtgatgaaatctatgtacgatatttatagtgatgtgcttttattttctcatgagaaactaaatattgtgttgtacatttgtttttagcatatattaaagttttaaaccaaatgtgttaaagcttatgctttgccatgcaaatcccccagaagttggtgagctcaaatgtatcctacatccagctgtagaaacttgtcagaaattgtttaaattttgtatataggtgactgtttaattttagccactgcgctgaacagtattcaagttatataatatggctttacacaagaaatgtgtggcttctgttttgtatttttttcagtatagaagttcctgtgtcttatttaaataaagttattagtaaaactgg

SEQ ID NO: 218 - protein, 430 aa, Mus musculus
MCPSPWPHMCWRHRAPSATFLTTYSHTMSATTCPDSVDRPKSQHIRTSSTIRRTSSLDTITGPYLTGQWPRDPHVHYPSCMRDKATQTPSCWAEEGAEKRSHQRSASWGSADQLKEIAKLRQQLQRSKQSSRHSKEKDRQSPLHGNHITISHTQAIGSRSVPMPLSNISVPKSSVSRVPCNVEGISPELEKVFIKENNGKEEVSKPLDIPDGRRAPLPAHYRSSSTRSIDTQTPSVQERSSSCSSHSPCVSPFCPPESQDGSPCSTEDLLYDRDKDSGSSSPLPKYASSPKPNNSYMFKREPPEGCERVKVFEEMASRQPISAPLFSCPDKNKVNFIPTGSAFCPVKLLGPLLPASDLMLKNSPNSGQSSALATLTVEQLSSRVSFTSLSDDTSTADSLEPSAQQPSQQQQLLQDLQVEEHVSTQNYVMI

SEQ ID NO: 219 - DNA, 1490 bp, Mus musculus
tcagtggttaagttagaaatgtaattgtactatctctaaaacccagtggacaggccaaaatctcaacatattcgaacctctagtacaataaggcgaacctcttctctggatacgataacaggaccttacctcacaggacagtggccacgggaccctcatgttcactacccttcatgcatgagagataaagccactcagacacctagttgctgggcagaagagggagcagaaaaacgatcacatcagcgctctgcatcatggggaagtgctgatcaactgaaagagattgccaaacttaggcaacagctacaacgcagcaagcaaagtagtcggcatagtaaagagaaggacagacagtcacctctccatggcaaccacataacaatcagtcatactcaggctattggatcaagatcagtccctatgcctctgtcaaacatatcagtgccaaaatcatctgtttcccgtgtaccctgcaatgtagaaggaataagtcctgaattggaaaaggtattcatcaaagaaaacaatggaaaggaagaagtgtccaagccattggatataccagatggtcgaagagctccgctccctgctcactacaggagcagtagtactcgaagcatagatacccagacaccttctgtccaagagcgcagcagtagctgcagcagccactccccttgtgtgtccccattttgtcctccggaatcccaggatggaagtccttgttcaacagaagatttgctctatgatcgtgataaagacagtgggagtagctcaccgttacccaagtatgcttcatctcccaaacccaacaacagctacatgttcaaacgggagcccccagagggatgtgagcgggtgaaggtctttgaggaaatggcgtctcgtcagcctatctcggcccctctcttttcatgtcctgacaaaaacaaggttaatttcatcccaaccggatcagctttctgtcctgtaaaacttctaggccctctcttacctgcctctgacctgatgctcaagaactcccctaattctggccagagctcggctctggcaacactgaccgtagagcagctttcctcccgggtttccttcacatctctctctgatgacaccagcacagccgactccctggagccctctgcccagcagccatctcagcagcagcagctcctacaggacttgcaggtggaggaacacgtctccactcagaactatgtgatgatctaaagcagagggggagctggtctccacccatggtccatggattgggaatgagatctcagacatctatctgcatggagtgacaaactttcccaacatcaccaacagcaaagtacttagcatcacaaaatagctattaacactgatcttggcagggaccgacttatattcagcagtttttgtggaaagcagtaatgcttgcaaaaatgtgtgtgtcattcagcatttaatggagactatgcatttcatagtatgtctgacagatt

SEQ ID NO: 220 - protein, 343 aa, Mus musculus
TPSCWAEEGAEKRSHQRSASWGSADQLKEIAKLRQQLQRSKQSSRHSKEKDRQSPLHGNHITISHTQAIGSRSVPMPLSNISVPKSSVSRVPCNVEGISPELEKVFIKENNGKEEVSKPLDIPDGRRAPLPAHYRSSSTRSIDTQTPSVQERSSSCSSHSPCVSPFCPPESQDGSPCSTEDLLYDRDKDSGSSSPLPKYASSPKPNNSYMFKREPPEGCERVKVFEEMASRQPISAPLFSCPDKNKVNFIPTGSAFCPVKLLGPLLPASDLMLKNSPNSGQSSALATLTVEQLSSRVSFTSLSDDTSTADSLEPSAQQPSQQQQLLQDLQVEEHVSTQNYVMI

SEQ ID NO: 221 - DNA, 4256 bp, Mus musculus
gcgcgcgtcccctaccagtggtagcgacaaagtccagcagcgggagccggcgcgaggggcggggactgacggtggggacagcgaggccaaaaagtggggagtagggaaaaccaagccggctgcgcgcggggaccagtagcaagggcagcgggctctgaagtatgcaaagagactccacgcgggcccagccactcgcggaaatccgacatcgcagaagtttggtggctgctggccgggtggcgtcgatgacctggcgcccagccggccgcgggggctgagcggccgcctcttcctctctggtccggcttttgtgtctcgcgtcttctgctcatgccgtgtccagctacttctcgcggtggccgttgctgagctgtccgacgcagccgaggaccgaggacacgacggctcccgccgccgcagcgcggggcacaggagggactatgggaaacgggatgtgctcccgaaagcagaagcggatcttccagacgctgctgcttctcacggtggtcttcggcttcctctatggcgcgatgctctacttggaactgcagacgcagctgcgcaaagctgaggcagtggcgctcaagtaccagcagcaccaggactctctctctgcccagttgcaagttgtatatgaacacagatcaagattagagaaatctttgcaaaaagaaaggcttgaacacaagaaagcaaaggaagatttccttgtttataagttagaagcacaagaaacacttaacaaaggaaggcaagattccaatagcagatatagtgcattgaatgtccaacatcagatgctgaaaagtcagcatgaggagctgaggaagcagcacagtgacctggaagaggaacaccggaagcaaggggaagacttcagtagaacgttcaatgaccacaagcagagatacctgcagcttcagcaagaaaaggaacaagaactttctaagctaaaagaaactgtatataatttgagagaagagaatagacaactaagaaaagcacaccaagacattcacacacagcttcaagacgtcaagactcaagttgcagaatataaacaactgaaagatacactgaacaggattccaagctttcgaaatcctgacccagtcgagcagcaaaatgtcacctttccccatgggactcaccctcctcaaggttacaacggaagagagaagctgacaggagagctccaagaggtgcagccgaatcacgaagcagggcctagaagaatggaagagaaacctctgtcttccatgcagaaggatgcaggattccaggctctagaagagcagaatcaagtggaacccagagagccagaggagcgtcaagtggaagaggaacacaggaaggcactggaggaggaggagatggagcaggtggggcaggcggagcatctggaggaagaacacgacccatcaccagaggagcaggatcgagactggcgggatcagcagggacagaatgcagcccaccttctggatggccaccctcaagctgaggtggagcattcgaccaaggcagctacaaacttccaatccccatatgaggaacagttggaacagcagaggctggcagcgaggagagatgaggaagcccagcggctgagagaacatcaggaagccttgcaccaacagaggctccatgggcagttgctaagacaacagcagcagcaacagttcctggccagagagatggctcagcagaagcaggtagcccatgaagatggccagcagcagcaccaggagcagctaaggcagcaagctcattacaatgctgtggagaatgacatcgcacagggagtcgaggaccagggaatccccgaagaagagggaggtgcctatgacagagataaccagcgccaagatgaagctgaaggagacccaggcaacagacaggaacttcgtgaaccaggacaccaagaaggcgaccctgaagttgaagcagatagggcagctgtggaggatataaacccagcagatgaccccaacaatcaaggcgaagatgaatttgaggaagccgagcaagtgagagaagaaaatttgccagaggaaagtgaagagcaaaaacaaagcgaagcaaagcaagggaatgtagaaatggatgagcacttggtgatggcagggaatccagaccagcaggaggataatgttgatgagcagtatcaggacgaaggagaggaagaggttcaggaagatctgactgaagagaaaaaacgggaaatggagcataatgttgaagagacatatggtgaacatcctgatgataagaataatgatggtgaagaacaaggagttcacaacagggcgcatcctaaaggaagacaggagcattatgaggaggaggaagatgaagaagacggggctgctgttgctgagaaatcacatcgcagagctgaaatgtaactggactcagtttctagactgtgctcagccaacgatttttttctcaagctgctctaaaacaaatcccgcctactgaattctagagtatttaattacatacagaagtaagggtttagacttttttaacttttttattagaaatgctatacatttatatgaatatattttgataccttaggtgagaacttcttttatagtcgagttatacatggacaagaagaaaagcagtaagacttgccttcaggtctgaatctcatttcccagcgatggtgggaagatgtgcttggctttggtgcatgtctcagctcagtaccattttgttttctggcttccgggtagtctactatttatctcagataaaatgcaagatatagaaaaaaaaaggtgtatggaaaaacaatatgcaaacatcaggggaatggctggtgtcctcgtggctgttcttgcaggttcttgtatacagctctgaaagaatgtcactactgcagagtgttggcaaatgagagccatctgtacagttgaaaatcaattggaaagcccgtgtgtctgtgtcggtgtgtgtgcgtgcgtgtcaggacaaagttttttttcaaactttcaggtcactttgaataatacgtagcaattcttaaaatcacagctatcttgcttgagaggaatcacgtatgaaagttggataatattaatacccctatgaaagtctcaaggactctgtcttgtcagagaggccaaaggagctgacacacttagaaatagatgcagtatgttcagtgatgcttcctgggtgaactccccgtctccccatcggttatctgcttgctcgtcagtctccacttgctccagcatattttcctctcttaagctctgtgccttgatgtggaaccatttggttcacagttatggataggaaagcatgcgaagctacagtttaataggattatttttcagactatatgataaaataactatagcactaggataggcacccctcccttagcggctttactatttacccagaattgacctgcctttgcctatgtatgaggcattctaatggctatcaagaataatgcatcctttaaaagaaaactcaaactgaaaggttttccctgaaatgagcacatattttagtttacatcatcaatattgttaaatacattgaactgggccaccgttaatctgtgtgtggtactttcaaaataataaagcaaatttcattttctgttattatcatatgagtgtaattttagtttctaataaccacaatcatgtatggttttgattttcccagctgagcaattgtgtatgtatgcataggaaatgttccgctcaaatttagtttggatttccagtaacaataaatcaaatctcatctttatgtataaaagccccatatgtaatgtaaaatgtattatattgtacataaatactcagaatacaattattttggtaaattagtttgtatttttaatgtccctttgcagtatttaattatttgaaacacattgaaacttgggtaataatcaataaacttataaaaagttaaggataagtcttttaaagcatataatttcttagtgctttgttatctatggtttttctttataggacaatataaattaatgaattattaaatgcctttcccaaactgctttatttttctttctttttctgctttaattgacacttgaattctcatcatcaaacttctttgaaagaagaagctaataatttccattatctttaagggctagaaataagaaattgaactagaaaggtatgtaaaacatgagtgtcatatccacaattcatatgtaaatctggccattaaagcaacaatcacaaacc

SEQ ID NO: 222 - protein, 655 aa, Mus musculus
MGNGMCSRKQKRIFQTLLLLTVVFGFLYGAMLYLELQTQLRKAEAVALKYQQHQDSLSAQLQVVYEHRSRLEKSLQKERLEHKKAKEDFLVYKLEAQETLNKGRQDSNSRYSALNVQHQMLKSQHEELRKQHSDLEEEHRKQGEDFSRTFNDHKQRYLQLQQEKEQELSKLKETVYNLREENRQLRKAHQDIHTQLQDVKTQVAEYKQLKDTLNRIPSFRNPDPVEQQNVTFPHGTHPPQGYNGREKLTGELQEVQPNHEAGPRRMEEKPLSSMQKDAGFQALEEQNQVEPREPEERQVEEEHRKALEEEEMEQVGQAEHLEEEHDPSPEEQDRDWRDQQGQNAAHLLDGHPQAEVEHSTKAATNFQSPYEEQLEQQRLAARRDEEAQRLREHQEALHQQRLHGQLLRQQQQQQFLAREMAQQKQVAHEDGQQQHQEQLRQQAHYNAVENDIAQGVEDQGIPEEEGGAYDRDNQRQDEAEGDPGNRQELREPGHQEGDPEVEADRAAVEDINPADDPNNQGEDEFEEAEQVREENLPEESEEQKQSEAKQGNVEMDEHLVMAGNPDQQEDNVDEQYQDEGEEEVQEDLTEEKKREMEHNVEETYGEHPDDKNNDGEEQGVHNRAHPKGRQEHYEEEEDEEDGAAVAEKSHRRAEM

SEQ ID NO: 223 - DNA, 927 bp, Mus musculus
gatggaggctgaaacaccccaggaagaatatggtgaacagagtctcccgcaggatgatcagggatggccccctgtgaatgccaccgctcggccttggagatctgctcctccctcccctcctcctcctggaacccgacacacagccctagggccccgttctggctccctgctctccctgcagactgagctccttctggacctagtggccgaagcccagtcccgccgcctagaggaacagagggccaccttccacacccccgaggccccaccaaacctagccccagccccaccccggcttcttgaagacaaagaacagctctacagcaccatccttagtcaccagtgccagcggattgaagcccaacggtctgacccgccccttccccccggggggcaggagcttctggagttgctgctgagagttcagggtggaggtcgaatggaggagcagagatcccggcctcctacacacacctgctgagaccggagctcctcaccagtcccttctctctgggactcaaagctgggacactccccgaaggtcttcaaccctgtttggcaggggtaaccagagatggaagacccggctaaaattgctgtatttaccacccactttccctggggactggacttgggacaagtactctaaccatgaagataagcaaggtagggtggacacaactcccgaggacagttaaagagtctctatcctgagctgtcaagctactaaacagggtgtgagggctgcggcctgcccctgcctagtgagaaaaaaagggaagagtaagacaattgtccagcactagcagtctcaggccccaaggcagaggggcccagaggcggtgaagcgactcttaccccgcccccaccctgctgctgagtctgtctgatgttttggttgtatgaataaacataattcccctctgg

SEQ ID NO: 224 - protein, 159 aa, Mus musculus
MEAETPQEEYGEQSLPQDDQGWPPVNATARPWRSAPPSPPPPGTRHTALGPRSGSLLSLQTELLLDLVAEAQSRRLEEQRATFHTPEAPPNLAPAPPRLLEDKEQLYSTILSHQCQRIEAQRSDPPLPPGGQELLELLLRVQGGGRMEEQRSRPPTHTC

SEQ ID NO: 225 - DNA, 339 bp, Mus musculus
atggaggctgaaacaccccaggaagaatatggtgaacagactgagctccttctggacctagtggccgaagcccagtcccgccgcctagaggaacagagggccaccttccacacccccgaggccccaccaaacctagccccagccccaccccggcttcttgaagacaaagaacagctctacagcaccatccttagtcaccagtgccagcggattgaagcccaacggtctgacccgccccttccccccggggggcaggagcttctggagttgctgctgagagttcagggtggaggtcgaatggaggagcagagatcccggcctcctacacacacctgctga

SEQ ID NO: 226 - protein, 112 aa, Mus musculus
MEAETPQEEYGEQTELLLDLVAEAQSRRLEEQRATFHTPEAPPNLAPAPPRLLEDKEQLYSTILSHQCQRIEAQRSDPPLPPGGQELLELLLRVQGGGRMEEQRSRPPTHTC

SEQ ID NO: 227 - DNA, 1225 bp, Mus musculus
cagtggccccgaggcagcagtgcagagttccccagcgaggctaggcgagcagccggccggccggagcggagaagggagggtgggagcgaggcgcagagccggcgccgcgcactgtgggggccaggagcagcccgcgcgccgagggagggactcgcacttgcaatatgactttggaggaattctcggctgcagagcagaagaccgaaaggatggacacggtgggcgatgccctggaggaagtgctcagcaaggctcggagtcagcgcaccattacggtcggcgtgtacgaggctgccaagctgctcaacgtagaccccgataacgtggtactgtgcctgctggctgctgacgaagacgacgaccgggatgtggctctgcagatccatttcaccctcatccgtgcgttctgctgcgagaacgacatcaacatcctgcgggtcagcaacccgggtcggctagctgagctgctgctactggagaacgacgcgggcccggcggagagcgggggcgccgcgcagaccccggacctgcactgtgtgctggtgacgaacccacattcatcacaatggaaggatcctgccttaagtcaacttatttgtttttgccgggaaagtcgctacatggatcagtgggtgcccgtgattaatctcccggaacggtgatggcatccgaatggaaataactgaaccaaattgcactgaagttttgaaatacctttgtagttactcaagcagtcactccccacgctgatgcaaggattacagaaactgatgtcaaggggccgagttcaactgcacgagggctcagagatgactttgcagagggagagagaggtgagcctgaagaaggaagctgcgagaaaagagaaatccaaggcaaaagggacaaaaactacaaagcactgcaagaaagaaaactgctaatttaggatggccaggttactttcaaataagccaaatattgctttgttgaaactttaaatgtatagcaatagtttgggtattttttttcttttttttttttggtctttatgccctcaaataaaaggaaagtaaaagaggattaatcatattttcaagccacagtttaaatgtattttgatgagatgttaaattctcagaagttttattataaatcttactaagttattttatgatgtgaaaggttatttatgataaagtttttgaagcacattatctaaaataaactggtatggaataattgt

SEQ ID NO: 228 - protein, 165 aa, Mus musculus
MTLEEFSAAEQKTERMDTVGDALEEVLSKARSQRTITVGVYEAAKLLNVDPDNVVLCLLAADEDDDRDVALQIHFTLIRAFCCENDINILRVSNPGRLAELLLLENDAGPAESGGAAQTPDLHCVLVTNPHSSQWKDPALSQLICFCRESRYMDQWVPVINLPER

SEQ ID NO: 229 - DNA, 1075 bp, Mus musculus
gcactcgctggtggtgggcgcgcatcggactctgggaatctttacctgcgctcgggttccctccgcactcttttggataacttgctgttcgtggatcgcacaatgactctggaagaagtccgtggccaggatacagttccggaaagcacagccaggatgcagggcgccgggaaagcactgcacgaacttctgctgtcggcgcagcgccagggctgtctgaccgctggcgtctacgagtccgccaaagtcctgaatgtggaccctgacaatgtgaccttttgcgtgctggctgccgatgaagaagatgagggcgacatagcgctgcagatccatttcacgttgattcaggcgttctgctgtgagaacgacattgatatcgtgcgcgtgggagacgtgcagaggctggcggcgatcgtgggcgccgacgaagaggggggcgcgccgggagacctgcattgcatcctcatttcgaatcctaatgaggacacatggaaggaccctgccttggagaagctcagtttgttctgcgaggagagccgcagcttcaacgactgggtgcccagcatcacccttcccgagtgacagcctggcagggaccttggtctgatcgacttggtgacactctagcgcgctgctggctctggagtggccctccgagggcgctcgagtgcgcgtggagactggcaggcgatgttgcctggagagcgaggagcgcggcctcccaagaagggggtctggcggcagcggggacaccttgttccgagcccaggactctgccagtgtccggagaggctgctagcacaggaaggcctaggcgaggacgttggccccagggccgggaagaaccgaccagcgaggcaggtgtgactcagcaagcagccttccagtgaaaggaggggaaagaaaggcaggcgaccgcctggacttggtacagcggcaggagcggccactgcaggagcgagctggacttagccgactgcactgctctttcaaaaaacggatcccgggcaatgctttcattttctaaaggacgctatcgtggaagctttgaatatcacaataaacttattgaaac

SEQ ID NO: 230 - protein, 159 aa, Mus musculus
MTLEEVRGQDTVPESTARMQGAGKALHELLLSAQRQGCLTAGVYESAKVLNVDPDNVTFCVLAADEEDEGDIALQIHFTLIQAFCCENDIDIVRVGDVQRLAAIVGADEEGGAPGDLHCILISNPNEDTWKDPALEKLSLFCEESRSFNDWVPSITLPE

SEQ ID NO: 231 - DNA, 2316 bp, Mus musculus
ttcaagccctcagtcagttgtgcgggagaaagggggcggtcggctttctcctttcaagaacgagttattttcagctgctgactggagacggtgcacgtctggacacgggagcacttccactatgggactggatacagacacacgcccggcggacttcaagacactcagactgaggagaaagccctgcctgctgctgctgctgccaccgctgcctctgaagacccactcctttcatggtttttcctgccaagccagaggcaccttcgctgctacggcctttctctgtggtgtcattcagcggctggccagaggatgagactccccaaactcctcactcttttgctgtggcacctggcttggctggacctggaactcatctgcactgtgctgggtgcccctgacttaggacagagaaccccaggggccaagccagggttgaccaaagcggaggccaaggagaggccacccctggccaggaatgtctttaggccagggggtcatatctatggtgtgggggccaccaatgccagggccaagggaagctctgggcagacacaggccaagaaggatgaacccagaaagatgccccccagatccggtggccctgaaaccaagccaggaccctcttcccagactagacaggctgcagcccggactgtaaccccaaaaggacagcttcctgggggcaaagcatcttcaaaagcaggatctgcccccagctccttcctgctgaagaagaccagggagcctgggacccctcgagagcccaaggagccgttccgcccgccccccatcacaccccacgaatacatgctctccctgtacaggacgctgtccgatgctgacagaaagggaggtaacagcagcgtgaagttggaggctggcctggccaacaccatcaccagctttattgacaaagggcaagatgaccgaggccctgcggtcaggaagcagaggtacgtgtttgacatcagtgccttggagaaggatgggctgttgggggctgaactgcggatcttacggaagaagcccttggacgtggccaagccagcggtccccagtagcgggcgggttgcccaactgaagctgtccagctgccccagcggccggcagccggcagccttgctggatgtgcgctccgtgccaggcctggatggatctggctgggaggtgttcgacatctggaagctcttccgaaattttaagaactcagcgcagctgtgcctggagctggaggcctgggaacggggccgggccgtggacctccgtggcctgggctttgaacgcactgcccgacaggtccacgagaaagccttgttcctagtgtttggtcgtaccaagaaacgggacctgttctttaatgagattaaggcccgctctggccaggatgacaagactgtgtatgaatatttgttcagccagcggcggaaacgccgggccccattggccaatcgccagggcaagcgacccagcaagaacctcaaggctcgctgcagtcgcaaggccttgcatgtcaacttcaaggacatgggctgggacgactggatcatcgcacctcttgagtatgaggccttccactgcgaaggactgtgtgagttccccttgcgctcccacttggagcccacaaaccacgcagtcattcagaccctaatgaactctatggaccctgaatccacaccacccacttgttgtgtgcctacacggctgagtcctattagcatcctcttcatcgactctgccaacaacgtggtgtataaacagtacgaggacatggtcgtggaatcttgtggctgcaggtagcagcactggcccacctgtcttccagggtggcacatccagagactaccccctccacaggttcctggagtaacagagagcctgtgaagctgctgcccgaagtttcctggcagcctgcaggaaagagttctcagcaggcttactctctggatgtgatctggactaaagagatcaccttctgaagattcctgcccaaggaacagactctgagtgggcctggggctcaggaaaggtgttcttaatgagactcagttcaccatctctcctgcccggggcctcttcatttctctccagactctccagagaagttgtagctatatcctaagctctttaagggagagctgtctcctccttgaatcacctttgtgcctggtgactttctgccaagagatgttcattacaggggctgggcaaagaaggggaaagggcttgggcaggggtgaagagaagagtatgagcctaattagactgttagattaaaatgtacatcgatgacataaaagctgaatcttcatggct

SEQ ID NO: 232 - protein, 495 aa, Mus musculus
MRLPKLLTLLLWHLAWLDLELICTVLGAPDLGQRTPGAKPGLTKAEAKERPPLARNVFRPGGHIYGVGATNARAKGSSGQTQAKKDEPRKMPPRSGGPETKPGPSSQTRQAAARTVTPKGQLPGGKASSKAGSAPSSFLLKKTREPGTPREPKEPFRPPPITPHEYMLSLYRTLSDADRKGGNSSVKLEAGLANTITSFIDKGQDDRGPAVRKQRYVFDISALEKDGLLGAELRILRKKPLDVAKPAVPSSGRVAQLKLSSCPSGRQPAALLDVRSVPGLDGSGWEVFDIWKLFRNFKNSAQLCLELEAWERGRAVDLRGLGFERTARQVHEKALFLVFGRTKKRDLFFNEIKARSGQDDKTVYEYLFSQRRKRRAPLANRQGKRPSKNLKARCSRKALHVNFKDMGWDDWIIAPLEYEAFHCEGLCEFPLRSHLEPTNHAVIQTLMNSMDPESTPPTCCVPTRLSPISILFIDSANNVVYKQYEDMVVESCGCR

SEQ ID NO: 233 - DNA, 2060 bp, Mus musculus
atgggctgcaccgtgagcgccgaggacaaggcggcagccgagcgctctaaaatgatcgacaagaacctgcgggaggacggcgagaaggcggcgcgggaggtgaagttgcttctgttaggtgctggagagtcagggaagagcaccatcgtcaagcagatgaagatcatccatgaagatggctactcagaagaggagtgccggcagtaccgtgccgtggtctacagcaacaccatccagtctatcatggccatcgtgaaggccatgggcaacctgcagatcgactttgctgatccccagcgtgcggatgatgccaggcagctgttcgccctgtcctgtgctgcagaggaacaagggatgcttcctgaagacctgtccggtgtcatccggaggctctgggctgaccacggtgtgcaagcctgctttggccgctcacgagaataccagctcaatgactcagccgcttactacctgaatgatctggagcgcattgcacagagtgactacatccctacacagcaggatgtgctgcggacccgtgtgaagaccacgggcatcgtggaaacacacttcaccttcaaggacttacacttcaagatgtttgatgtgggtggtcagcggtctgagcgcaagaagtggatccactgctttgagggcgtcacggccatcatcttctgtgtcgccttgagcgcttatgacttggtgctggctgaggatgaggagatgaaccgcatgcatgagagcatgaagctgtttgacagcatctgcaacaacaagtggttcacagacacctccatcatcctcttcctcaacaagaaggacctgtttgaagaaaagatcacacagagctccctgaccatctgtttccctgagtacacgggggccaacaagtacgacgaggcagccagctacatccagagcaagtttgaggatctaaataagcgcaaagacaccaaggagatctacacgcacttcacgtgcgccaccgacaccaagaacgtgcagtttgtgttcgatgccgtcactgacgtcatcatcaagaacaacctgaaggactgtggcctcttctgaggggcagtggacctggcaggatgggccaccgctgactgtgctccccactacccctgaggaagatgggggcaagaagaccatgttccctgcctgttcccccagctgcttctcccatcttttctctctgttctcagctcccctgtcccctccctcggctctagacttgggggaggggttgccacaggcctcccagtctaaaacccacctttgtctgaggtgccgggagtagccatggtacccccttcctgggcatccgttcgggttttctaaccgttgtcttgttctggggtgagcggggagcgcatgcagagatcccaaggcctatgtctggagggtaccaactcctccagcctagacccctggctttgtccaacaccagccctgacccaagtccaaatgtttacagggagcctcctgcctaccccactctctgccgctcggaggccccaaaggaaaaagcacaagaagcgtgagagataccgccattcctggagacaaagcccacctgctcattctcgtagctttaaagaaaaagaaaaaggaaaaataaggaaaactgcaaatctagaaaactttttagagaaacctatttaaaactgtcaggtcctgaccagcacccccaccccagcccagccccagccccacccctttccagcgattccgtgccttgagtgtgtctgcgtgtttacacccatccctctttgggcggccccctgctctgccctccacggaattggattccaagggctgttccagacaactgccaacgtcactgagggccctgctctgaagccctgggccctggctccattaacctaaatgtagctccttagcgctaatctaggaaccgccgctgcctgctgagggccaggcccctcacgccctcgccccaggcccgggtcctccagcgttgaacacttccttgcttttttcacatgttttatggaattgttcacatgatttgaaataataaaatgtagaaagaaaacacc

SEQ ID NO: 234 - protein, 355 aa, Mus musculus
MGCTVSAEDKAAAERSKMIDKNLREDGEKAAREVKLLLLGAGESGKSTIVKQMKIIHEDGYSEEECRQYRAVVYSNTIQSIMAIVKAMGNLQIDFADPQRADDARQLFALSCAAEEQGMLPEDLSGVIRRLWADHGVQACFGRSREYQLNDSAAYYLNDLERIAQSDYIPTQQDVLRTRVKTTGIVETHFTFKDLHFKMFDVGGQRSERKKWIHCFEGVTAIIFCVALSAYDLVLAEDEEMNRMHESMKLFDSICNNKWFTDTSIILFLNKKDLFEEKITQSSLTICFPEYTGANKYDEAASYIQSKFEDLNKRKDTKEIYTHFTCATDTKNVQFVFDAVTDVIIKNNLKDCGLF

SEQ ID NO: 235 - DNA, 996 bp, Mus musculus
atggctctaacaacgctgctcttgctggtggcggccgccctgaccctgatcgagacccgcgcgggcccacactcgctgcgatatttccacactgctgtgtcctggcccggcctcgtggagccccggttcattatcgtcggctacgtggacgacacgcagttcgtgcgcttcgacagcgatgcggaaaatccgaggatggagccgcgggcgcggtggatggagcaggaggggccggagtattgggagcgggagacacagatcgccaagggccatgagcagagtttccgagggagcctgaggaccgcacagtactacaaccagagcaagggcggctctcacacactccagtggatgtatggctgtgacgtggggtccgacgagcgcctcctccgcgggtacctgcagttcgcctatgaaggccgcgattacatcgccctgaacgaagacctgaaaacctggacggcggcggacatggctgcacagatcaccctacacaagtgggagcaggctggtattgcagagagagaccgggcctacctggagggcgcttgcgtgcagtcgctccgcagatacctgcagctccggaaggagacgctgctgtgcacagatcccccaaaggcacatgtgacccatcaccccaggtcttatggtgctgtcaccctgaggtgctgggccctgggcttctaccctgctgacatcaccctgacttggcagttgaatggggaggagctgacccaggacatggagcttgtggagaccaggcctgcaggggatggaaccttccagaagtgggcatctgtggtggtgcctcttgggaaggagcagaattacacatgccatgtgaaccatgaggggctgcctgagcctctcaccctgagatggggtaaggaggagcctcctccatccactgtctccaacatggcgaacgtagctattctggttgtccttagcttggccatcattggagctgtggtggattttgtgatgaagagaagg

SEQ ID NO: 236 - protein, 332 aa, Mus musculus
MALTTLLLLVAAALTLIETRAGPHSLRYFHTAVSWPGLVEPRFIIVGYVDDTQFVRFDSDAENPRMEPRARWMEQEGPEYWERETQIAKGHEQSFRGSLRTAQYYNQSKGGSHTLQWMYGCDVGSDERLLRGYLQFAYEGRDYIALNEDLKTWTAADMAAQITLHKWEQAGIAERDRAYLEGACVQSLRRYLQLRKETLLCTDPPKAHVTHHPRSYGAVTLRCWALGFYPADITLTWQLNGEELTQDMELVETRPAGDGTFQKWASVVVPLGKEQNYTCHVNHEGLPEPLTLRWGKEEPPPSTVSNMANVAILVVLSLAIIGAVVDFVMKRR

SEQ ID NO: 237 - DNA, 1180 bp, Mus musculus
agtcgacctgaatccccgagaggagcaatggctctaacaacgctgctcttgctggtggcggccgccctgaccctgatcgagacccgcgcgggcccacactcgctgcggtatttccacactgctgtgtcctggcccggcctcggggagccctggttcattgtcggctacgtggacgacacgcagttcgtgcgcttcgacagcgatgcggaaaatccgaggatggagccgcgggcgcggtggatggagcaggaggggccggagtattgggagcgggagacacagatcgccaagggccatgagcagagtttccgagggagcctgaggaccgcacagagctactacaaccagagcaagggcggctctcacacactccagtggatgtatggctgtgacatggggtccgacgggcgcctcctccgcgggtacctgcagttcgcctatgaaggccgcgattacatcgccctgaacgaagacctgaaaacgtggacggcggcggacatggaggcacagatcacccgacgcaagtgggagcaggctggtattgcagagagagaccgggcctacctggaggtcgcatgaggctccgcaaatacctgcagctcgggaaggagacgctgctgcgcacaggtgcaggggccgcggctggggctcagtcctggggaagaagaaaccctcagctggggtggtgcccctggctcagaggggagagagtgaccctgggtctcctgatccctcatcacagtgactgcactgactctcccagggctcagccttctccctggacagtgcccaggctgtctcaggagggaaggagagaatttccctgaggtaacaacagctgctcccttcagttcccctgtagcctctgtcagccatggcctctcccaggccgggttctcagcctacacccactgtctgtagacactgactcctgtcctgctgagtgtgtcagcccttacacctcaggacctgaagtctcctttacccgatgggagacatggacatctacactaggctggttcccccagtttctagaactttccaaagaatacagtctaccagatccttccctgtctgtggggtttgcatcctttgacacccaattctatctattcctgcaatggtgaatagtcacatgagccattatgggttaccctaaacaaatacttttcttgtgttt

SEQ ID NO: 238 - protein, 183 aa, Mus musculus
MALTTLLLLVAAALTLIETRAGPHSLRYFHTAVSWPGLGEPWFIVGYVDDTQFVRFDSDAENPRMEPRARWMEQEGPEYWERETQIAKGHEQSFRGSLRTAQSYYNQSKGGSHTLQWMYGCDMGSDGRLLRGYLQFAYEGRDYIALNEDLKTWTAADMEAQITRRKWEQAGIAERDRAYLEVA

SEQ ID NO: 239 - DNA, 1066 bp, Mus musculus
atggctctaacaacgctgctcttgctggtggcggccgccctgaccctgatcgagacccgcgcgggcccacactcgctgcggtatttccacactgctgtgtcctggcccggcctcggggagccctggttcattgtcggctacgtggacgacacgcagttcgtgcgcttcgacagcgatgcggaaaatccgaggatggagccgcgggcgcggtggatggagcaggaggggccggagtattgggagcgggagacacagatcgccaagggccatgagcagagtttccgagggagcctgaggaccgcacagagctactacaaccagagcaagggcggctctcacacactccagtggatgtatggctgtgacatggggtccgacgggcgcctcctccgcgggtacctgcagttcgcctatgaaggccgcgattacatcgccctgaacgaagacctgaaaacgtggacggcggcggacatggaggcacagatcacccgacgcaagtgggagcaggctggtattgcagagagagaccgggcctacctgggtcgcatgaggctccgcaaatacctgcagctcgggaaggagacgctgctgcgcacagatcccccaaagacacatgtgacccatcaccccatatcttatgatgctgtcaccctgaggtgctgggccctgggcttctaccctgttgacatcaccctgacttggcagttgaatggggaggagctgacccaggacacggagcttgtggagaccaggcctgcaggggatggaaccttccagaagtgggcagctgtgatggtgccttttggggaggagcagaattacacatgccatgtgcaccatgaggggctgcctgagcccctcaccctgagatgggggagatgggagcctcctccatacactgtctccaacatggcgaccattgctgttgtggttgaccttggagctgtggccatcattggagctgtggtggcttttgtgatgaataggaggtgaaacacaggtggacaaggaggggactgtgctccagctccagtgatggggtcgtgtccctcattctctagcatga

SEQ ID NO: 240 - protein, 196 aa, Mus musculus
MALTTLLLLVAAALTLIETRAGPHSLRYFHTAVSWPGLGEPWFIVGYVDDTQFVRFDSDAENPRMEPRARWMEQEGPEYWERETQIAKGHEQSFRGSLRTAQSYYNQSKGGSHTLQWMYGCDMGSDGRLLRGYLQFAYEGRDYIALNEDLKTWTAADMEAQITRRKWEQAGIAERDRAYLGRMRLRKYLQLGKETL

SEQ ID NO: 241 - DNA, 2389 bp, Mus musculus
acccctgcgcagggcggaggagcgcgtcccgcgccgggccgcctcctgcaccgagcgcatctccggagcggtacaggagaatgcaggtccacagggacacgcgcgcggggctcctgctgccatggcgctgggtagctctctgcctgatgagtctgctgcatctaaataacttgacttctgctaccacggagacttctacacaaggaatatccccatcagttcctaccaatgagtctgttgaggaaaatatcacatctagcatccctggaagtaccagccactacttgatctatcaggacagcagtaagaccacaccagccatctcagagactatggtcaactttacagttacctctgggatcccttcaggctctggaactccacacactttttcacaaccacagacttccccaactggcatactgcctactacttcagacagtatttccacttcagagatgacctggaagtccagcctgccatctataaatgtttctgattattcgcctaataatagcagctttgagatgacatcacccaccgagccatatgcttacacatcatcttctgctccgagtgccattaagggagaaatcaaatgctctggaatccgagaagtgaggttggcccagggtatctgcctggaactaagtgaagcatctagttgtgaggagtttaagaaggaaaagggagaagatctaattcaaatactgtgtgaaaaggaggaggctgaggctgatgctggtgctagtgtctgctccctgcttctagcccagtctgaggttaggcctgagtgtttgctgatggtcttggccaatagcacagaacttcccagcaaactccagcttatggaaaagcaccaatctgacttgagaaagctggggatccaaagcttcaataaacaagatatcgggagccaccagagctattcccgaaagactcttattgcattggtcacctctggagttctgctggccatcttgggcaccactggttatttcctgatgaaccgtcgcagttggagccctacaggagaaaggctgggtgaagacccttattacacggagaatggtggaggccagggctatagctcaggacctggggcctcccctgagactcagggaaaggccaatgtgacccgaggggctcaggagaacgggaccggccaggccacttccagaaacggccattcagcaagacaacatgtggtggctgacacagaactgtgatttggttgggtgggcaactgggtggtatgcaggaaagtggcatctcttgtctctgacttcatgctgccttcagctcatgtccggccttctcctattacatacacttctgaaactgttcctgggactcttcaccttggggaaggcagataaactgccttctgcacattcaacttcctgaatccaatctctgacctttgggtcaagttgtggtgggaagaagcctaggtctagaggagctgccaaaaaagttggtggctatgtagcacttgccctggacccatttctcctctctcgcctcttcacgggaactctccggaagactagcttttctaagctaccacttcttcccaggaaactttgctatttttactgcttcttcccctactttatggaaaccaaggtattcactgacatgtgctcccttgcaagggtacagccagaaaagtgctattttaaaatacatccttaaaaaatgcatcccttataacttcaagacactgtggatttagtcaccaacttctatcttgttcacctgttcctgaatgtctgtctacagaggccaggacaactttctgtctggagtctgctcaatgttttagagcaacagctcaatctgatcccttgggcccacacagaaatctcattggttcaacctagacaggacagtggaattagactttgaactgagcctctgttttttgttttattttattgctggggtttgaacccagagcttcacacagcttctttaggcttccaagtagcttgagctaccaggcccagctgagctaaacctcctgacctgagctcttcaaaggaatactcttgctctgaggcccttggccttctctaaattacgtgacttcccccttcctctgactcctgggggagctgtggcctcagtcccctggcagattcctttcagtctgtgcctttcctagtccaaaccccttcactattttataaccctttgtgatcagaggttcagaatatctacaaagactataagcttcctctcctggggttaaggggagaacaggggtcctgattttaatgatggctaggaacaaaactttccagagatgagaggattgggtgtattctcttctgaataaacgtgatgagtgaaaatgatgtaattaaattgatgatgaaatatt

SEQ ID NO: 242 - protein, 382 aa, Mus musculus
MQVHRDTRAGLLLPWRWVALCLMSLLHLNNLTSATTETSTQGISPSVPTNESVEENITSSIPGSTSHYLIYQDSSKTTPAISETMVNFTVTSGIPSGSGTPHTFSQPQTSPTGILPTTSDSISTSEMTWKSSLPSINVSDYSPNNSSFEMTSPTEPYAYTSSSAPSAIKGEIKCSGIREVRLAQGICLELSEASSCEEFKKEKGEDLIQILCEKEEAEADAGASVCSLLLAQSEVRPECLLMVLANSTELPSKLQLMEKHQSDLRKLGIQSFNKQDIGSHQSYSRKTLIALVTSGVLLAILGTTGYFLMNRRSWSPTGERLGEDPYYTENGGGQGYSSGPGASPETQGKANVTRGAQENGTGQATSRNGHSARQHVVADTEL

SEQ ID NO: 243 - DNA, 2264 bp, Mus musculus
agtttttagagaggagttttttttttttttttaatttttttccttttttttttttttttttttttttaaactaacggatcattattgttgttttaaatttagctcttagggcttagctgtttgggtttttctttcggtgtcgggtccctgtctccccggcttctgcggagtagcagagcgaggccgcgctcgccttgtcgccccagcgcctggcgatcgcctccatccacccggcggggagcgcgcccgccgcgccgcctttcaagccaagccaggggcccaggccgtggcgggcggcgatcgggccctcgcctcgtccctcggtggcgctagggctccccggttggccctccgcttcagggcgggcgaagaaccgaaagcagctcgggctcggctgggacaccgcctctgcccgagcgcccacccacttccccactcacccaggaccccgccgggatcctgccaggatgttcgcagccggcctggctcccttctatgcttccaactttagtctctggtcagccgcctactgctcctcggcgggcccgggcggctgctccttcgccctggacccagccgctgtcaagaaaccctctttctgcatcgcggacatcctgcacgccggcgtcggggagccggggcccgctgcagagggactggtgggggcctcggcagccctcaccgcacacttgggctccgtgcacccgcacgcctccttccaagctgccgccagatccccgctccgtcccaccccggtggtggcgccctcagaagtcccggctggcttccctcagcggctgtctccgctctctgccgccttccaccagcatctcccgcagcaatcaccaacgcagcaacagcaaccgcagcagcagcccccgcctccaccccgggcggtctccctgcagccaccgacttcggggacgcgggtggtcccccaccatagcggctccgcccctgccccctccagcaaagacctcaaatttggtatcgatcgaattttgtctgcggaatttgacccaaaagttaaggaaggcaacactctgagagatctcacatcgctgctaaccggtgggcggcctgcaggggtgcatctagctggcctgcagccttcagcgggacagttcttcgcatctctagatcccattagcgaggcgtctgccatcctcagccccttaagctccaacccaagaaattctgttcagcatcaattccaagacacatttccaggtccctatgctgtgctcactaaggacaccatgccacagacatacaagcggaagcgctcgtggtcccgtgctgtcttttccaacctgcaaagaaaaggcctggagaagaggtttgagatccagaagtacgtgaccaagccagaccgaaagcagctggcggccatgctgggcctcacggatgcacaggtgaaggtgtggttccagaaccggaggatgaagtggcggcactctaaggaggcgcaggcgcagaaggacaaggacaaggaagcgggcgagaagccttccggcggagtccccgccgagggtgaacgggaggagaggagccccagccgttctgagggcgaagccgagagcgagagcagtgactcggagtccctggacatggcccccagcgacacggaacggactgagggaacggagaggtccctgcatcaaaccacggtcatcaaggcctcagccgcgggtgccctcatcactgccagcagcagcacgagtggtagcagcttcagtttcagcagcaccagcagcctgggtagcggcaacacccacgtggggagcgccagcagccttggcggcaactgctcggagctgccttcggctcaccagccctcagtcaccagcagtcctcaaagcccggagatcgcccaggccccgcttgcaggtttatagactggaccgagggcatagcgtgcagcttcctctacactggctggactttgtgcctactttaagttggtggcgagggttgcctagattggagccggacgccacgggcagcctcttcggggttcatactttttctcttgctgccccggctgccagagcccccacccccgtccgcccagtggagagttttaaggttccccctcccccgtcacaaagaaagaattcaactgttttccctacctaagcagctcacactgtgaaatgttcggtggaactgttcctctgagcaccaggggtcttggcataaggacttgctgcacttaggaggcctttaacttgtaaataaaatgtttactacggtttgtaaaa

SEQ ID NO: 244 - protein, 476 aa, Mus musculus
MFAAGLAPFYASNFSLWSAAYCSSAGPGGCSFALDPAAVKKPSFCIADILHAGVGEPGPAAEGLVGASAALTAHLGSVHPHASFQAAARSPLRPTPVVAPSEVPAGFPQRLSPLSAAFHQHLPQQSPTQQQQPQQQPPPPPRAVSLQPPTSGTRVVPHHSGSAPAPSSKDLKFGIDRILSAEFDPKVKEGNTLRDLTSLLTGGRPAGVHLAGLQPSAGQFFASLDPISEASAILSPLSSNPRNSVQHQFQDTFPGPYAVLTKDTMPQTYKRKRSWSRAVFSNLQRKGLEKRFEIQKYVTKPDRKQLAAMLGLTDAQVKVWFQNRRMKWRHSKEAQAQKDKDKEAGEKPSGGVPAEGEREERSPSRSEGEAESESSDSESLDMAPSDTERTEGTERSLHQTTVIKASAAGALITASSSTSGSSFSFSSTSSLGSGNTHVGSASSLGGNCSELPSAHQPSVTSSPQSPEIAQAPLAGL

SEQ ID NO: 245 - DNA, 3245 bp, Mus musculus
agaagaaatatcactgaaaaaaattcttcgttttcttgactgggctttccccaccccccaaaaaataacattggaaaattgggagaagtctccttggtttggaaaaaaaggactcttcaacctagctcactttcttatccggactgggatattaaatatacgacacatccaggagtttattggagcgcagactgatggcgcaaaggtacgatgagctgccccattacggcgggatggacggagtaggggttcccgcttccatgtacggagaccctcacgcgccgcggccgatccccccggttcaccacctaaaccacgggccgccgctccacgccacgcagcactacggcgcgcacgccccgcaccccaatgtcatgccagccagcatgggatctgctgtcaacgacgccttgaaaagagacaaggacgcaatctatgggcacccgttgtttcctctgttagctctggtttttgagaagtgcgagctggcgacctgcactccccgggaacccggagtggccggcggagacgtctgttcctctgactccttcaacgaggacatcgcggtcttcgccaagcaggttcgcgccgaaaagcctcttttttcctcaaacccagagctggataatttgatgatacaagcaattcaagtactaaggtttcatcttctggagttagaaaaggtccacgaactatgtgataacttctgccaccggtacattagctgtttgaagggaaaaatgcccattgacctcgtgattgatgagagagatggaagctccaagtcagatcatgaagaactttcaggctcctccacaaatctcgccgaccacaacccttcatcctggcgagaccacgatgacgcaacctcaacgcactccgcaggcaccccaggaccctccagtgggggccatgcttcccagagtggagacaacagcagtgagcaaggcgatgggttagacaacagcgtagcttcacctggcacaggtgatgacgacgatccagacaaggacaaaaaacgccagaagaaaagaggcatattccccaaagtcgcgacaaatatcatgagagcgtggctcttccagcatctcacacacccgtacccttcagaagaacagaagaaacagttagcgcaagacacgggactgacaattctgcaagtgaacaactggtttatcaatgccagaagaagaatagtgcagcccatgattgaccagtcaaatcgagcaggcaatttcttcttgatccttcagtgagccaaggagcagcgtatagtccagagggtcagcccatggggagctttgtgttggatggtcagcaacacatggggatccggcctgcagggtttgcagagcatgccaggggactacgtttctcagggtggtccaatgggaatgggtatggcccagccaagttacactcctccccagatgaccccacaccctactcagttaagacatggacccccaatgcattcatatttgccaagccatccccaccacccagccatggtgatgcacggaggaccccctacccaccctggaatgactatgtcagcacagagccccacaatgttaaattctgtagatcccaatgttggcggacaggttatggacattcatgcccaatagtataagggaactcaaggaagaaggaaacacacgcaaaaactattttaagactctctgaactttgaccagatgtgacacttaatatgaaactccagacagctgtgattattttttactttttgtcatttttcatcaagcaacagaggaccaatgggacaagaacacaaatgtgaagcgacgggctcatcgagacaattttgtccatgcaaagatcctctggagaaagactccgagagttataactactgtagcataaacatagggactaagttaaacttgtacatttctgttgatcactccgttatgttgcctcaaatagttttagaagagaaaaaaaaaatatatccttgttttccacactatgtgtgttgttcccaaaagaatgactgtcttggttcatcagtgaattcactatccagaagagactgtggtatattttaaacctgttgggccaatgagaaaagaaccatgctgcggagcgagatggacacttgtctgaacctcatcactaactccagcggctagaatgtgttttcatgcccggcctttgttccccccgtccatgtgtcctttagtttcaaacagatctttatagtttgtgcttcataagccaattcttattatgattttgggggactgttcttcaaagagcttgccagtgaagatctagagacagagcgaaggcttcttcaagttctgagccttggctgtggacaaaacaatcttaagttgggcagctttcctcaacgcacatacacacacacacacacacaagttattcatggtcgttgcaccataagtaggattctatcaggaactcaaagcttgggggataaaaaggagcaagagaatactgtaacaaacttcgtacagagttcggtcttttaattgtttcatgttagatattctatgtgtttacctcaattgaaaaaaaaaaaaagaatgtttttgctagtatcagatctgctgtggaattggtattgtatgtccatggggtcctcttttctcagcacgtgttcctcactagaagaaaatgctgttacctttaagctttgtcaaatttacattaaaatacttgtatgaggactgtgacgttatgttaaaaaaaaaggtgttaagtcacaaaatgcggtaataaatatttcatttttgattttttgttaggctttggtgttttttaatggtttgaaggttgcaggaggccagctcctgggcactgatgaaagtacctgatggtctcccaccacccccccccccaaggaagttgagcatatttaagatgtaacttagcagcatctgtagcttttcattgtgtgtttggactcttaggtttcatcaacagaaaacttccaaaggtatgaaattacttgtgttatatccagcttgagagatcaccttcaaaaggcccagcctatcttattatagctgcatgatgtttttaaaagcagttgcagattaaacttttgcctatgtacccaccagtagaataaagggtttattccatgttaattttatatcataagaagttatgtgtgtgctcaaacatgatttatctgtactctatcttactcaaatactgttgactctgtacattaaagctcatatatgatgtct

SEQ ID NO: 246 - protein, 353 aa, Mus musculus
MAQRYDELPHYGGMDGVGVPASMYGDPHAPRPIPPVHHLNHGPPLHATQHYGAHAPHPNVMPASMGSAVNDALKRDKDAIYGHPLFPLLALVFEKCELATCTPREPGVAGGDVCSSDSFNEDIAVFAKQVRAEKPLFSSNPELDNLMIQAIQVLRFHLLELEKVHELCDNFCHRYISCLKGKMPIDLVIDERDGSSKSDHEELSGSSTNLADHNPSSWRDHDDATSTHSAGTPGPSSGGHASQSGDNSSEQGDGLDNSVASPGTGDDDDPDKDKKRQKKRGIFPKVATNIMRAWLFQHLTHPYPSEEQKKQLAQDTGLTILQVNNWFINARRRIVQPMIDQSNRAGNFFLILQ

SEQ ID NO: 247 - DNA, 2900 bp, Mus musculus
aagatcaggaggaggaggaagaagaggaaaaaagagaaaaagaagaaatatcactgaaaaaaattcttcgttttcttgactgggctttccccaccccccaaaaaataacattggaaaattgggagaagtctccttggtttggaaaaaaaggactcttcaacctagctcactttcttatccggactgggatattaaatatacgacacatccaggagtttattggagcgcagactgatggcgcaaaggtacgatgagctgccccattacggcgggatggacggagtaggggttcccgcttccatgtacggagaccctcacgcgccgcggccgatccccccggttcaccacctaaaccacgggccgccgctccacgccacgcagcactacggcgcgcacgccccgcaccccaatgtcatgccagccagcatgggatctgctgtcaacgacgccttgaaaagagacaaggacgcaatctatgggcacccgttgtttcctctgttagctctggtttttgagaagtgcgagctggcgacctgcactccccgggaacccggagtggccggcggagacgtctgttcctctgactccttcaacgaggacatcgcggtcttcgccaagcaggttcgcgccgaaaagcctcttttttcctcaaacccagagctggataatttgatgatacaagcaattcaagtactaaggtttcatcttctggagttagaaaaggtccacgaactatgtgataacttctgccaccggtacattagctgtttgaagggaaaaatgcccattgacctcgtgattgatgagagagatggaagctccaagtcagatcatgaagaactttcaggctcctccacaaatctcgccgaccacaacccttcatcctggcgagaccacgatgacgcaacctcaacgcactccgcaggcaccccaggaccctccagtgggggccatgcttcccagagtggagacaacagcagtgagcaaggcgatgggttagacaacagcgtagcttcacctggcacaggtgatgacgacgatccagacaaggacaaaaaacgccagaagaaaagaggcatattccccaaagtcgcgacaaatatcatgagagcgtggctcttccagcatctcacacacccgtacccttcagaagaacagaagaaacagttagcgcaagacacgggactgacaattctgcaagtgaacaactggtttatcaatgccagaagaagaatagtgcagcccatgattgaccagtcaaatcgagcaggcaatttcttcttgatccttcagtgagccaaggagcagcgtatagtccagagggtcagcccatggggagctttgtgttggatggtcagcaacacatggggatccggcctgcagggacccatgagtggaatgggcatgaatatgggcatggatgggcagtggcactatatgtaaccttcgccatgtaaagcaatctcaaggcaaggggaaggtttgcagagcatgccaggggactacgtttctcagggtggtccaatgggaatgggtatggcccagccaagttacactcctccccagatgaccccacaccctactcagttaagacatggacccccaatgcattcatatttgccaagccatccccaccacccagccatggtgatgcacggaggaccccctacccaccctggaatgactatgtcagcacagagccccacaatgttaaattctgtagatcccaatgttggcggacaggttatggacattcatgcccaatagtataagggaactcaaggaagaaggaaacacacgcaaaaactattttaagactctctgaactttgaccagatgtgacacttaatatgaaactccagacagctgtgattattttttactttttgtcatttttcatcaagcaacagaggaccaatgggacaagaacacaaatgtgaagcgacgggctcatcgagacaattttgtccatgcaaagatcctctggagaaagactccgagagttataactactgtagcataaacatagggactaagttaaacttgtacatttctgttgatcactccgttatgttgcctcaaatagttttagaagagaaaaaaaaaatatatccttgttttccacactatgtgtgttgttcccaaaagaatgactgtcttggttcatcagtgaattcactatccagaagagactgtggtatattttaaacctgttgggccaatgagaaaagaaccatgctgcggagcgagatggacacttgtctgaacctcatcactaactccagcggctagaatgtgttttcatgcccggcctttgttccccccgtccatgtgtcctttagtttcaaacagatctttatagtttgtgcttcataagccaattcttattatgattttgggggactgttcttcaaagagcttgccagtgaagatctagagacagagcgaaggcttcttcaagttctgagccttggctgtggacaaaacaatcttaagttgggcagctttcctcaacgcacatacacacacacacacacacaagttattcatggtcgttgcaccataagtaggattctatcaggaactcaaagcttgggggataaaaaggagcaagagaatactgtaacaaacttcgtacagagttcggtcttttaattgtttcatgttagatattctatgtgtttacctcaattgaaaaaaaaaaaaagaatgtttttgctagtatcagatctgctgtggaattggtattgtatgtccatggggtcctcttttctcagcacgtgttcctcactagaagaaaatgctgttacctttaagctttgtcaaatttacattaaaatacttgtatgaggactgtgacgttatgttaaaaaaaaaggtgttaagtcacaaaatgcggt

SEQ ID NO: 248 - protein, 353 aa, Mus musculus; identical to SEQ ID NO: 246

SEQ ID NO: 249 - DNA, 2207 bp, Mus musculus
cactcattcactcagggtccccgggaagggcttgtcagtatgggtgggtccaaggtaggacagtcaaaatgttcagcatggtaggaaacaactccgtgcccgatagtcagcgtgtgtcgggggcaggaaggcagacgtgaagcctagacaggtgtggacacgcacatgtgtgttcctggccacgtgtttgtggaatttgaggcaaaatttttgttttggttcctggggtaaagtttccattcaacattttcctctactgtttaattttttttttaattttaaattacaaaactctgactagaaaaagcgcaatacctttgaaaggactggggcaggcagtggacagcagatggatccagtggccaacagctgtgtgaggaacccccagcccccagcccctgtctggggctgccttcgaaacccccactcagaagatagcagcgcctcagggctgtcccattatcccccaaccccgttttccttccaccaaaaatcagacttcccagcgacagcagcataccccgacttctctgcttcctgcctggcagccaccccacacagcctgccccggactgagcgaatcttcaacgagcagcatcctgccttcccacagacccctgactggcacttccctatctcagaagccgggcagaggctcaacctaggcccagctgggagcgccagggagatgggagccggcagccccggcctggtggatggcacagcaggattgggggaggattgcatggtacttgggacgatcgccaatgagacggagaagaaatcatccagaaggaaaaaagagaggtcagacaaccaggagaacggaggagggaagccagaaggcagcagcaaagcccggaaggagaggacagccttcaccaaggagcagctacgggagctggaggcagagtttgcccaccacaactacctgacccggctccggagatatgagattgcagtcaacctggacctttctgagcggcaggtcaaagtctggttccagaaccggaggatgaagtggaaacgtgtgaaggggggtcagcctgtgtccccacaggagcaggaccgagaggatggggactctgcagcttctccaagttcagagtgagatgctccaaagaccaaaaccaagaaagactgaaggaaccccctctccagttcccaccacccggtcccaccctctcacatctctggacccacccagggcagcctgcacacactctaaggtgtgaagttgcccagtatgtgggagccttgaatttcccagaaggcttagctcagcgtccttacatctcagcagccccttccccaggccttcaacttcccactctctcttgaactccaaaggactgggaaactatagaaacagagcctggggccctcttttctgggtctcttggctactacccacacctagcatccccctcttacatcagggtctcctctgggtctggccccatctggcctatgcagaatccattccttggtaccagctggtgacttgtaaaagcaaacctctctccagatgttcacaccgttgagttgaaggttaggaagtggctcctgtgtctaaggacggagaggatagcacaagagctgatggatgaggactgagatacgtggaccttggaagtagaacgttctcaggctgcagcgtcttgtgttctccaaggactctgactgcagataaggacaggaaaacaacccatcttcctccatgggatgcatttggacctatcctgcgtgttccggaaaaagctttgtgggaagacctcccaggttcacacacatgcgcagctcagatctcagacccaacttctgaggatgctcctgtgaggactggtgggaaaacagcctcaggcaacagtctccttggaagagacccctgtgtgcctcagtattagatggtggatctcccagatcctgctgatgttgcagaaggagggtcagcaagtatttgaatttcttgcatggagatctgattgtgagtgtttaaaaataaccccagttcccttccccaccccatcaagacagaagctgtggaaaatgattgtcaaatgagatggcaagttagagcatgtatcagttttcccctacagcatatttcatatgtttttttttcctaagattacatcaagctaattgtgcaaggtcaattcactttgtaagaaaactctcagagaaataaatcaacaaaaaaatgc

SEQ ID NO: 250 - protein, 253 aa, Mus musculus
MDPVANSCVRNPQPPAPVWGCLRNPHSEDSSASGLSHYPPTPFSFHQKSDFPATAAYPDFSASCLAATPHSLPRTERIFNEQHPAFPQTPDWHFPISEAGQRLNLGPAGSAREMGAGSPGLVDGTAGLGEDCMVLGTIANETEKKSSRRKKERSDNQENGGGKPEGSSKARKERTAFTKEQLRELEAEFAHHNYLTRLRRYEIAVNLDLSERQVKVWFQNRRMKWKRVKGGQPVSPQEQDREDGDSAASPSSE

SEQ ID NO: 251 - DNA, 927 bp, Mus musculus
atggagttcaagctggaggctcaccgcatcgtcagcatctccctgggcaagatctacaactcgcgggtccagcgcggcggcatcaagctgcacaagaacctcttggtgtcgttggtgctgcgcagcgcccgccaagtctacctgagtgacccctgccctggcctctacctggctggccctgcggggaccccggcggtgccgccgcctcagcagcctggagagcctgtagccgggccaccctccggctggggagagccgcccccgccggtcgcccgtgccgcctggccggagcccgagcctcagccgcagcctcagcctcagcgtccctccgtgtgccacacgcccggagcgggaagctcagaaccggtggccgcggtggccggatcgggggaagctctccggggcggagaggaggactcggcggcagctgcttggggccgcgtggagcgtccgcgcgcggcgtcttcaggaggtggctcggacgcgtgccccgaggggccccgggcagtgcgccgcccgtgcggctgtcccccggccgtggaggagcggtcctccgaggacgggtcccccgcgccacccgccccgtgtcccaggaagcgtggcgcagcgggagtgggtggcggccgcgcgagctgctcggcacccggctctacccctctcaagaagccgcgccggaactcggaggagcagccagtcaccggcgaggacgacaccgacgaggagatggagaccgggaacgtggcaaacctcatcagcatcttcgggtctagcttctcgggactcctacggaaaagccccgcaggcggccgagaggaagaggaggcggaggagggcggcccggaagccgccgagccggggcagatctgctgcgacaagccggtgctgagagacatgagcccctggagcacagccatcgtggccttctga

SEQ ID NO: 252 - protein, 308 aa, Mus musculus
MEFKLEAHRIVSISLGKIYNSRVQRGGIKLHKNLLVSLVLRSARQVYLSDPCPGLYLAGPAGTPAVPPPQQPGEPVAGPPSGWGEPPPPVARAAWPEPEPQPQPQPQRPSVCHTPGAGSSEPVAAVAGSGEALRGGEEDSAAAAWGRVERPRAASSGGGSDACPEGPRAVRRPCGCPPAVEERSSEDGSPAPPAPCPRKRGAAGVGGGRASCSAPGSTPLKKPRRNSEEQPVTGEDDTDEEMETGNVANLISIFGSSFSGLLRKSPAGGREEEEAEEGGPEAAEPGQICCDKPVLRDMSPWSTAIVAF

SEQ ID NO: 253 - DNA, 102 bp, Mus musculus
atgcatgagttccagaatcgctactgtttgttcaacaacagagcctcaggcgctgaaaaggaagagcagaagatgcaattgttgaccttggtccagagcatg

SEQ ID NO: 254 - protein, 34 aa, Mus musculus
MHEFQNRYCLFNNRASGAEKEEQKMQLLTLVQSM

SEQ ID NO: 255 - DNA, 2921 bp, Mus musculus
ctggtaaatctttaactctccttgtgtggctcttggccctctttaggatttgcttccactgacctgagggcagagatggcgacttcatcccaccaaggagcagctgcaggaagccaggcagagcacagaagctgtgaagcatcagtaggacagggggaaagaccgagtgccagccagggtcaggagggcaacttcaagcagaaccagggaacgtccacactgcggctcctcctgctagggaaacagggcgcaggcaaaagtgccacaggaaacaccattctgggcaaagccgtgttcgagtccaagttcagtgatcacatggtaaccgacagatgccagagcgagagtgtgtcagtaagagggaaacaggtcattgtcatcgataccccagatcttttctcctcactgagctgttcagaggttaggcagcagaacctgaagcagtgcttggagctcttagctgatgatcactgtgtgctgctcctggtcactcccattggccactatacagaggaggacagggagaccattgaaggcatctggggtaaaattggccctaaagcctacagacacatgattgtggtcttcactcgggaagatgagctggatgaagactccctgtggaactacattgagagcaaggagtctctgaaggagttgattaaaaacattggaagtcgacgatgttgtactttcaacaacaaggcagacaagaagcagcgggaactgcaggtgttcaagctgcttgatgcaattgaacttttgatgatggaaagccctgagccatattttgagcccttaaaaatggaaagcagtggagtccagggttgtgggaatggagtgacatatgaaggggacactctgtgtggttcaaagaagaggcagcctcagatcacaggacccgattgtgatccagacatgccagagctgagggtcctcctgatggggaagcgtggtgttgggaaaagtgcagcaggaaacagcattctggggaagcaggtctttaagactcagttcagtgagaagcagcgggtcaccaaggcctttgcatcccacagcagggtctggcaagggaagaaagttctgattatagattctccagagatctcatcgtggaagcttgatgagtctgctgtcaagaatcacacctttccaggtccccatgcctttctgctggtgacaccactgggttcttctttaaagagtgatgacgatgtgttcagcatcatcaaacgtatttttggagaaaaattcaccaagttcacaattgttctctttaccaggaaagaagattttgaggatcaggctctagataaggttataaaggaaaatgatgctctctataatctcacccagaaatttggagaaagatacgcaatcttcaactaccgggcatctgtggaggaggagcagagccaggtgggcaaactactgagccaaatcgagaagatggtgcagtgccacagcaacaagccttgcgtcatcagagagaaagaacttttaaacatcatcctcttgggaaggagtggggctggaaagagtgcaactgggaacactatcctggggagatctgccttcttctcccagctcagagctcagccggtcaccagtagcagccagagtggtaagaggacactggactggcaggatgttgtggttgtggacactccatcattcatccagacgcctggcactgaaaaggatccctccaggttaaaggaggagatccatcactgtttgagtctctgcgaagaaggcatgaagatttttgtcctggttctccagttgggacggttcacccaggaagatgaggtggtggtggagcaactggaggccagttttgaggaaaacattatgaaatatatgattgtgctgtttacacggaaggaagacctaggggatggggaccttcatgattatactaacaacacaaagaacaaagcccttaaaaaaatacttaaaaagtgcaatgggcgagtttgtgcttttaataacaaagaaactggtgaagaccaggagacccaggtgaaaggtctgttgaaaatagccaatagtctcaaaaagaactatgatgagcattcaaattcatgggtgggtcaattaaaatcaacactaggccaaattactatggcatttaaatgagctcaagtgagcagttttaaggctgggaacagtttagggatgccatcagacagaggagggggtgggtgcgagggggaaggactagtggggtggatcctctcaaagaaggttcatgacttggaaggctgagggataaatgcatctcatgaaggatgtagatattcaggtaaataaattcttaagttaggtcaggcagaaggaaattagaagacaaagagattatggaagagaaaatgtttttctttgatttaagttttattgcattatctcaaattatgttaaacataatagacttacaccacatttttctttcccttttgtaccccaactcctccctgagagccctccccacttcaaaacctgcaatatatttcatctttcatcatattctttaaaatttataaaatattataaaaataaaaatgagtattataaaagttgtttgatataatacaacaatcaattgaacagtcttacgtcgatgtttgtctacatcaatactgaaagtacatacattttcctcaatataaattttaaataactctgaatatattaactgtatgatattttaaaataatatatcactatttgtttttttttaacgaacataaatagataaagtctgtttgtttgttttgttgttttgtagagtttaaaatcttggctcttactgtagtacaaactcaaaataagaacagtttttggatattggagttcattgtaataaggctgtacttgaatgcccctcgcatcaccaaaggattttacctccatagtag

SEQ ID NO: 256 - protein, 688 aa, Mus musculus
MATSSHQGAAAGSQAEHRSCEASVGQGERPSASQGQEGNFKQNQGTSTLRLLLLGKQGAGKSATGNTILGKAVFESKFSDHMVTDRCQSESVSVRGKQVIVIDTPDLFSSLSCSEVRQQNLKQCLELLADDHCVLLLVTPIGHYTEEDRETIEGIWGKIGPKAYRHMIVVFTREDELDEDSLWNYIESKESLKELIKNIGSRRCCTFNNKADKKQRELQVFKLLDAIELLMMESPEPYFEPLKMESSGVQGCGNGVTYEGDTLCGSKKRQPQITGPDCDPDMPELRVLLMGKRGVGKSAAGNSILGKQVFKTQFSEKQRVTKAFASHSRVWQGKKVLIIDSPEISSWKLDESAVKNHTFPGPHAFLLVTPLGSSLKSDDDVFSIIKRIFGEKFTKFTIVLFTRKEDFEDQALDKVIKENDALYNLTQKFGERYAIFNYRASVEEEQSQVGKLLSQIEKMVQCHSNKPCVIREKELLNIILLGRSGAGKSATGNTILGRSAFFSQLRAQPVTSSSQSGKRTLDWQDVVVVDTPSFIQTPGTEKDPSRLKEEIHHCLSLCEEGMKIFVLVLQLGRFTQEDEVVVEQLEASFEENIMKYMIVLFTRKEDLGDGDLHDYTNNTKNKALKKILKKCNGRVCAFNNKETGEDQETQVKGLLKIANSLKKNYDEHSNSWVGQLKSTLGQITMAFK

SEQ ID NO: 257 - DNA, 1900 bp, Mus musculus
gggcagtgtgtattccgtcaccatgggctttcttttcctgccttcggactctggattcatggctctgcatgtagctgttctgtgagagcactgctcagcaggcacaggcccaccgcatacctgtaagggtaaagaggaacccgccagggcgctgacagccgcttgggagccagggagccgctgtgcactcggaagagaatggaacacctttcagaagagcacatatggaactatagttcaaggaccagaagcccactgtgtacaagaatctagctgcctgaggatcctcctggtgggcaaatctggctgcggtaaaagcgccacagggaacagcatcctccgacgaccagcattccagtccaggctcagaggccagtctgtgaccaggaccagccaggcagagacaggcacatgggaggggaggagcatcctagtggtagacacaccccccatctttgagtcaaaggcccagaaccaagacatggacaaggacatcggagactgctacctgctgtgtgccccaggaccccatgtgttgttactggtgacccagctgggacgcttcacagctgaagatgccatggctgtgaggatggtgaaggaggtctttggggtaggggtcatgaggcacatgatcgtcctcttcacccgcaaggaagacctggaagagaagtccttggaagagtttgtgacccacactgacaaccgcagcctgcgcagcctgactcaggagtgtgggaggaggtactgtgccttcaacaacagggcctctggggaggagcagcaggggcagctggcagagctcatggccctggtgaggaggctggaacaggagtgtgagggctccttccacagcaatgacctcttccttcatgctgaggcactccttagagaaggttacagtgtgcaccaggaagcctataggtgctacctggccaaggtgaggcaggaggtggagaagcagaggcgggagctggaggagcaggagggcagctggatagctaaaatgatttgcacagtcaagtcctgctggagctcccacactgcagcatgtgctcttcttattgtgcttggtttgactcttctcaccactttcattaacttgtgtattagcaggtgtaaatgagccttttttgggtgatttcttccatcatccttgtcccccaaagttccccatctcatgtcagggaacctcagtcttcaattaatttcactctcatttgattcccatggatcagacatgccagggaatcttcttttaaatacagttagattaaataaaggatgaaagaaaaatgtatttctctctttgttgaagttgtgaggatagatgatgaagcaagtagctaccattataaaggtctgggggcttgcacaaaggaagacacatggactgttgtggcagtgggtgtatcacttctagatccccacttcctacagatgtgatgtcaagaggagaaatacacaaagctgagagcagagtcatactttagtcaagtataccctgactttcatggtaccaataaagtcagaactccatcataattccaccccgagaaagataaagatggtgtgcatgaagcactgaggtgggagggccaggacatgagtggggaccaagtgaagaggttacaggagcagggtaggtcttatcccagaaaaagcagggtcagcagtcaagaatcacatgagccagaaagtctatggtcagagatacaaagggccagaggtgtgtatcttgggcttggaagattgtgtggtgagcattataggccctcaacaactcatgcaggcaaaagccactatgatacataaacctgatgagcactaagtttttgaagtacatgtaattttcatgtatgacactagaacattgttctcctgaatccttcagctattt

SEQ ID NO: 258 - protein, 304 aa, Mus musculus
QKSTYGTIVQGPEAHCVQESSCLRILLVGKSGCGKSATGNSILRRPAFQSRLRGQSVTRTSQAETGTWEGRSILVVDTPPIFESKAQNQDMDKDIGDCYLLCAPGPHVLLLVTQLGRFTAEDAMAVRMVKEVFGVGVMRHMIVLFTRKEDLEEKSLEEFVTHTDNRSLRSLTQECGRRYCAFNNRASGEEQQGQLAELMALVRRLEQECEGSFHSNDLFLHAEALLREGYSVHQEAYRCYLAKVRQEVEKQRRELEEQEGSWIAKMICTVKSCWSSHTAACALLIVLGLTLLTTFINLCISRCK

SEQ ID NO: 259 - DNA, 2382 bp, Mus musculus
ggtagtgtctccaaccaagcacagagcaacgcagggtcggcctggcggtgtcccctccgggatcgcctagtccctgcgccggtacattcagcttcgttgcaccccactttttccgtcttccataagttgttgcggaaaccctttgggagcttttttatttttttaaaaaaactttaagccacttggtctgtacgagcccggagtccccggggcatgtcgcctgcacgggacctggaagtctgagcaattgcagccgcgaaatcgtttatggagcttggggcgggggccgagcccgcgattttgccctgtgcccgccgcctaggccatgctgctccatcagcgcgcagagctacggccgccgggcctccgggactaagccgagagccgcgggaggaggaggcgccggcggtggagcgggacggagagccgcggcggcgggcggaccctgtactatggctgtgtactgctatgccctcaatagcctggtgatcatgaacagcaccaacgagctcaagagtggcggcccccggcccagcggcagcgagacgccccagccctccgggagggccgcgctgagtcccggcagcgtcttcagccctgggagaggcgcttcctttctcttccccccagcagagtcgctgtccctggaggagcccgggagtcctgggggctggcgcagcggccggcgcaggctgaatagtagcagcggtagcggaggtggcagcagcagcagcaacagcagcagcagcagtggcgtgggcagtcccagttgggctggccgcctgcgaggggacgcgcagcaggtggtggcggcccgcatcctctccccacctgggccagaggaggcccagaggaagctgcggattctgcagcgcgagttgcaaaatgtgcaggtgaaccagaaagtgggcatgttcgaggcgcaaatccaggcacagagctctgccattcaagcgccccgaagcccgcgtttgggtagggctcgttcgccctccccgtgtcccttccgaagtagcagccagccccccgaaagggtcttggctccgtgttctccaagtgaggaacgcagaacaaagtcctggggagaacaatgtacagaaaccccagataccaactctggaaggagaagcagactcagcacacacccctcgaaggacaaggagggagtggcccctcttttaggcccagccagcccgaccaggttagggactcagagtccatctacttccgtgagaatggaaagaggtaccccggccagtccccgctgtggctcacccacacccatggaaactgacaagagggttgctccctcactggagcgctttggaactagcttaacgttggctactaaagtggcagcttcagccgcatccgctggaccacaccctggacatgattctgccctcatggagacaggctgtgagctcgggggcatgcgcccctgggaggcccagatggagagacgggggcagtttctgggcaaggagaccggctcaaccccagagcctgtccggacccacatgagagaaccccctggaagggtgggaagaggaattcattctgttggtgggcagggctcctggacacctgaagtcatcaaaagaccagaagagagggctgtgactgcccaaagctcagagccctcagaggaccccagatggtctagactgcctgtagacctggattccgtaggacctgagaagggaggaaataggatcccagggatgcgagggccccagcagaccctggacagtgagagagaaggctctccagcactgggcttgcttgggggcagccaggcagcacagccaggggctaggggtgtggaggaagacgttcattatggccgaatgctggaacctttaccacctggggaagtaacaacaaaattgaaagaaccccagtgcctccctggggacaggatgggaatgcagcctgagagttccatagtttggcccagtgccttggaggaagctcccctgatctggacacgtgacacgggggtacagtcgaaggggacttggggaagccagctgccagacggagatgctcaccctagctgccaagagatgcccccagaccagaaggacaaggcctccttaaaagaggcctgcagccccagcaacatcccagccatccctgcagtcatcattacagatatgggtgctcaggaggatggagggctagaggagatccaaggaagccctcggggtcccctgcctctgaggaagctgtcctcctcctcagcctcctccactggcttctcctcttcttacgatgactcggaggaggacatctccagtgaccctgagcgcacgctggaccccaactcagcctttttgcataccctggaccagcagaagcccagagtggtaagtgttg

SEQ ID NO: 260 - protein, 640 aa, Mus musculus
MAVYCYALNSLVIMNSTNELKSGGPRPSGSETPQPSGRAALSPGSVFSPGRGASFLFPPAESLSLEEPGSPGGWRSGRRRLNSSSGSGGGSSSSNSSSSSGVGSPSWAGRLRGDAQQVVAARILSPPGPEEAQRKLRILQRELQNVQVNQKVGMFEAQIQAQSSAIQAPRSPRLGRARSPSPCPFRSSSQPPERVLAPCSPSEERRTKSWGEQCTETPDTNSGRRSRLSTHPSKDKEGVAPLLGPASPTRLGTQSPSTSVRMERGTPASPRCGSPTPMETDKRVAPSLERFGTSLTLATKVAASAASAGPHPGHDSALMETGCELGGMRPWEAQMERRGQFLGKETGSTPEPVRTHMREPPGRVGRGIHSVGGQGSWTPEVIKRPEERAVTAQSSEPSEDPRWSRLPVDLDSVGPEKGGNRIPGMRGPQQTLDSEREGSPALGLLGGSQAAQPGARGVEEDVHYGRMLEPLPPGEVTTKLKEPQCLPGDRMGMQPESSIVWPSALEEAPLIWTRDTGVQSKGTWGSQLPDGDAHPSCQEMPPDQKDKASLKEACSPSNIPAIPAVIITDMGAQEDGGLEEIQGSPRGPLPLRKLSSSSASSTGFSSSYDDSEEDISSDPERTLDPNSAFLHTLDQQKPRV

SEQ ID NO: 261 - DNA, 2479 bp, Mus musculus
gccagacggagatgctcaccctagctgccaagagatgcccccagaccagaaggacaaggcctccttaaaagaggcctgcagccccagcaacatcccagccatccctgcagtcatcattacagatatgggtgctcaggaggatggagggctagaggagatccaaggaagccctcggggtcccctgcctctgaggaagctgtcctcctcctcagcctcctccactggcttctcctcttcttacgatgactcggaggaggacatctccagtgaccctgagcgcacgctggaccccaactcagcctttttgcataccctggaccagcagaagcccagagtgagcaagtcatggagaaagataaagaacatggtgcagtggtccccctttgtcatgtccttcaagaagaagtacccctggatccagctggcaggacatgcagggagcttcaaggcagctgcaaatggccgcatccttaagaagcactgtgagtctgagcagcgctgcctggaccggttaatggcggatgtgctgagacccttcgtgccagcctaccatggggacgtggtgaaggatggggaacgctacaaccagatggacgacctgctggctgacttcgattcgccctgcgtgatggactgcaagatgggtgtcaggacatacctggaggaagaactcaccaaggcccggaagaagcctagcttgcggaaggacatgtaccagaagatggtcgaggtggaccctgaggcccccactgaagaggagaaagcccagcgagctgtgaccaagccacgttacatgcagtggcgggaaaccatcagttcgacagccaccctaggcttcaggatcgaaggcatcaagaaggaagatggctctgtgaaccgtgacttcaagaagaccaaaacaagggagcaggtcaccgaggctttcagagaattcactaagggaaaccagaacatcttgatcgcctaccgggaccggctgaaggccattcgagcgaccctggaaatctctcccttcttcaagtgccacgaggtcattggcagctctctcctcttcatccatgacaagaaggagcaagccaaggtgtggatgattgactttgggaaaaccacgccccttccggaaggccagaccctacaacacgacgtcccctggcaggaggggaaccgggaggatggctacctctcagggctggacaacctcatcgacatcctgacggaaatgtcccagggcagcccactcacctgaggccaccgccaccgtgcatagccgtgccactttgcccgccacctctgcctgtcgcctctctcctcccctaattcttccttttcctgtctgagcgcctacctagaacagagcctcccatctgcactacaggacactttggagaaaaaaaagagattttttttttctagatctttacttccccggcctcctacataggggcttggaggtggcgtttctcatgctctctaaatagaaccaccttctcgaagagaattacacaaagctaggccccacatcctgttacactcagagtcggcacgggtccagaaggccgtgtgatccctggttgcctaaagtcttgagagattaagcctccctctgggagacactgcccccctcccagaaaattctggcccacactggctaccagtagggaccttgctgccccctagtggctaatgccatcagtaagcacagtcccatttgtgcctctcaccacgggccctgaagccaggacagggacctgatttctgggagttggaaatacaatctctggggttctgcatctggattatgagcaaagtctcctccagtgggaagtcccagctcccagggacactgagtggcttctctagagatgctaaatcagggccccaccttgccagcctaggaggagtatggagagcagctccatttttaaagaacgtcacccttccatctgggagcattgcccgtgaattcagagaggacattctgcaagcggagtttcaggggatgacgtcacctcctagagctactgattactgcccttaatctgcttgctgtgggaaggtccagagctgggcacaatactcaaggctcacaccaacctccagggagcaatcactaggcagcagttctgagagccagccacacccgggagagcaatcactaggccttagggaaccaggattctggcttcctggaatgatccctgagtttcccttgaaatcactcactctcccagcttgaaggacttagaccggtgtttctccatgtaattcggtagttgccagagttgttcagagggctgcccaagccttcctcttgctcgagttctgagcttcttgaagggctatgggaagatagatcattgttattcgccacttcagctctgaagcaagtagcctctctgattgaaaagagtgtacaacttgtatgactttttaaaagacaaaactcctagctctgttgctgtttggagctatcctcttc

SEQ ID NO: 262 - protein, 403 aa, Mus musculus
MPPDQKDKASLKEACSPSNIPAIPAVIITDMGAQEDGGLEEIQGSPRGPLPLRKLSSSSASSTGFSSSYDDSEEDISSDPERTLDPNSAFLHTLDQQKPRVSKSWRKIKNMVQWSPFVMSFKKKYPWIQLAGHAGSFKAAANGRILKKHCESEQRCLDRLMADVLRPFVPAYHGDVVKDGERYNQMDDLLADFDSPCVMDCKMGVRTYLEEELTKARKKPSLRKDMYQKMVEVDPEAPTEEEKAQRAVTKPRYMQWRETISSTATLGFRIEGIKKEDGSVNRDFKKTKTREQVTEAFREFTKGNQNILIAYRDRLKAIRATLEISPFFKCHEVIGSSLLFIHDKKEQAKVWMIDFGKTTPLPEGQTLQHDVPWQEGNREDGYLSGLDNLIDILTEMSQGSPLT

SEQ ID NO: 263 - DNA, 816 bp, Mus musculus
aagtcatggagaaagataaagaacatggtgcagtggtccccctttgtcatgtccttcaagaagaagtacccctggatccagctggcaggacatgcagggagcttcaaggcagctgcaaatggccgcatccttaagaagcactgtgagtctgagcagcgctgcctggaccggttaatggcggatgtgctgagacccttcgtgccagcctaccatggggacgtggtgaaggatggggaacgctacaaccagatggacgacctgctggctgacttcgattcgccctgcgtgatggactgcaagatgggtgtcaggacatacctggaggaagaactcaccaaggcccggaagaagcctagcttgcggaaggacatgtaccagaagatggtcgaggtggaccctgaggcccccactgaagaggagaaagcccagcgagctgtgaccaagccacgttacatgcagtggcgggaaaccatcagttcgacagccaccctaggcttcaggatcgaaggcatcaagaaggaagatggctctgtgaaccgtgacttcaagaagaccaaaacaagggagcaggtcaccgaggctttcagagaattcactaagggaaaccagaacatcttggtcattggcagctctctcctcttcatccatgacaagaaggagcaagccaaggtgtggatgattgactttgggaaaaccacgccccttccggaaggccagaccctacaacacgacgtcccctggcaggaggggaaccgggaggatggctacctctcagggctggacaacctcatcgacatcctgacggaaatgtcccag

SEQ ID NO: 264 - protein, 272 aa, Mus musculus
KSWRKIKNMVQWSPFVMSFKKKYPWIQLAGHAGSFKAAANGRILKKHCESEQRCLDRLMADVLRPFVPAYHGDVVKDGERYNQMDDLLADFDSPCVMDCKMGVRTYLEEELTKARKKPSLRKDMYQKMVEVDPEAPTEEEKAQRAVTKPRYMQWRETISSTATLGFRIEGIKKEDGSVNRDFKKTKTREQVTEAFREFTKGNQNILVIGSSLLFIHDKKEQAKVWMIDFGKTTPLPEGQTLQHDVPWQEGNREDGYLSGLDNLIDILTEMSQ

SEQ ID NO: 265 - DNA, 1612 bp, Mus musculus
ggtgtcttcatttataccccatttttcactttctcagttactgaattatctgcctacctactcaaaccaagcaggccacttctgttgttgaagatctcagcacctgtacattgctgccgaaattccagggagtataaccaacaacttgaaagatggagaatgaatataagagacttgttctgctggaaggacttgaatgtatcaataagcatcaattcaatttatttaagtcattgatggtcaaagatttaaatctggaagaagacaaccaagagaaatataccacgtttcagattgctaacatgatggtaaagaaatttccagctgatgctggattggacagactgatcaacttttgtgaacgtgtaccaactcttaaaaaacgtgctgaaattcttaaaaaagagagatcagaagtaacagaagaaacatcactggaaataaataggcaagaagcaagtcctgcaacacctacatcaactacaagccacatgttagcatctgaaagaggcaagacttccacaacccaggaagagacttccacagcccagaaaaggaaaggtatgagtgaagaaaagactgacgtgaagaagatcaaggcatctgggaaagcagatcagcctccctgttgtgaaggacccacagccacatgccagtcaccaatatcccaggtctcatcttcggcttcatctaacattccttcggctaagaaccaaaaatcacaaccccagaaccagaacattcccagaggtgctgttctccactcagagcccctgacagtgatggtgctcactgcaacagacccgtttgaatatgaatcaccagaacatgaagtaaagaacatgtttcatgctacagtggctacagtgagccagtatttccatgtgaaagttttcaacatcgatttgaaagagaagttcacaaaaaataattttatcaccatatccaattactttgagagcaaaggcatcctggagatcaatgagacttcctctgtgttagaggctgctcctaaacaaatgattgaagtgcccaactgtattaccagaaatgcaaatgccagtcctaagatctgtgatattcaaaagggtacttctggaacagtgttctatggagtgtttacattacacaagaaaaaagtgaaaacacagaacacaagctatgaaataaaagatggttcaggaagcatagaagtggtggggagtggacaatggcacaacatcaactgtaaggaaggagataagctccacctcttctgctttcacctgaaaagagaaagaggacaaccaaagttagtgtgtggagaccacagtttcgtcaaggtcaccaaggctgggaaaaaaaaagaagcatcaactgtccagtgaagcacaaaaaatgaagaagaaaatgattacccaaaagttggaattaaggtagagatgccaaaatagaaatgtcacctctaaatgacagctttagtagtatatccaaccattgattaatcttcatacctgatttctgattttgtgttttcatttgaaaaaaattcttattgttctgtttttctatgaaaataaaatttgatttcatttctctactgtaaaaataataaacatgtctttttaaaggg

SEQ ID NO: 266 - protein, 404 aa, Mus musculus
MENEYKRLVLLEGLECINKHQFNLFKSLMVKDLNLEEDNQEKYTTFQIANMMVKKFPADAGLDRLINFCERVPTLKKRAEILKKERSEVTEETSLEINRQEASPATPTSTTSHMLASERGKTSTTQEETSTAQKRKGMSEEKTDVKKIKASGKADQPPCCEGPTATCQSPISQVSSSASSNIPSAKNQKSQPQNQNIPRGAVLHSEPLTVMVLTATDPFEYESPEHEVKNMFHATVATVSQYFHVKVFNIDLKEKFTKNNFITISNYFESKGILEINETSSVLEAAPKQMIEVPNCITRNANASPKICDIQKGTSGTVFYGVFTLHKKKVKTQNTSYEIKDGSGSIEVVGSGQWHNINCKEGDKLHLFCFHLKRERGQPKLVCGDHSFVKVTKAGKKKEASTVQ

SEQ ID NO: 267 - DNA, 2073 bp, Mus musculus
ggacgtgctttcacagtctaagccgaaccgaaccgaaccgaaccgaaccgaaccgggccgagttgcgccgaggtcagccgaggtggccagagggaccccagcatctcgggcatctttcgcttcgtgcgcgcatcgcgtacctacaccgcaactccgtgcctcgctctccggcaccctctgcgaatcgctcctgcagcaaagccaccatgccaatcactcgaatgcggatgagaccctggctagagatgcagattaattccaaccaaatcccagggctgatctggatcaataaagaagagatgatcttccagattccatggaagcacgctgctaagcacggctgggacatcaacaaggatgcctgtctgttccggagctgggccattcacacaggccgatacaaagcaggagaaaaagagccagatcccaagacatggaaggcaaacttccgttgtgccatgaactccctgccagacatcgaggaagtgaaggatcagagtaggaacaagggcagctctgctgtgcgggtgtaccggatgctgccacccctcaccaggaaccagaggaaagagagaaagtccaagtccagccgagacactaagagcaaaaccaagaggaagctgtgtggagatgttagcccggacactttctctgatggactcagcagctctaccctacctgatgaccacagcagttacaccactcagggctacctgggtcaggacttggatatggaaagggacataactccagcactgtcaccgtgtgtcgtcagcagcagtctctctgagtggcatatgcagatggacattataccagatagcaccactgatctgtataacctacaggtgtcacccatgccttccacctccgaagccgcaacagacgaggatgaggaagggaagatagccgaagaccttatgaagctctttgaacagtctgagtggcagccgacacacatcgatggcaagggatacttgctcaatgagccagggacccagctctcttctgtctatggagacttcagctgcaaagaggaaccagagattgacagccctcgaggggacattgggataggcatacaacatgtcttcacggagatgaagaatatggactccatcatgtggatggacagcctgctgggcaactctgtgaggctgccgccctctattcaggccattccttgtgcaccatagtttgggtctctgacccgttcttgccctcctgagtgagttaggccttggcatcatggtggctgtgatacaaaaaaagctagactcctgtgggccccttgacacatggcaaagcatagtcccactgcaaacaggggaccatcctccttgggtcagtgggctctcagggcttaggaggcagagtctgagttttcttgtgaggtgaagctggccctgactcctaggaagatggattggggggtctgaggtgtaaggcagaggccatggacaggagtcatcttctagctttttaaaagccttgttgcatagagagggtcttatcgctgggctggccctgaggggaatagaccagcgcccacagaagagcatagcactggccctagagctggctctgtactaggagacaattgcactaaatgagtcctattcccaaagaactgctgcccttcccaaccgagccctgggatggttcccaagccagtgaaatgtgaagggaaaaaaaatggggtcctgtgaaggttggctcccttagcctcagagggaatctgcctcactacctgctccagctgtggggctcaggaaaaaaaaatggcactttctctgtggactttgccacatttctgatcagaggtgtacactaacatttctccccagtctaggcctttgcatttatttatatagtgccttgcctggtgcctgctgtctcctcaggccttggcagtcctcagcaggcccagggaaaaggggggttgtgagcgccttggcgtgactcttgactatctattagaaacgccacctaactgctaaatggtgtttggtcatgtggtggacctgtgtaaatatgtatatttgtctttttataaaaatttaagttgtttac

SEQ ID NO: 268 - protein, 329 aa, Mus musculus
MPITRMRMRPWLEMQINSNQIPGLIWINKEEMIFQIPWKHAAKHGWDINKDACLFRSWAIHTGRYKAGEKEPDPKTWKANFRCAMNSLPDIEEVKDQSRNKGSSAVRVYRMLPPLTRNQRKERKSKSSRDTKSKTKRKLCGDVSPDTFSDGLSSSTLPDDHSSYTTQGYLGQDLDMERDITPALSPCVVSSSLSEWHMQMDIIPDSTTDLYNLQVSPMPSTSEAATDEDEEGKIAEDLMKLFEQSEWQPTHIDGKGYLLNEPGTQLSSVYGDFSCKEEPEIDSPRGDIGIGIQHVFTEMKNMDSIMWMDSLLGNSVRLPPSIQAIPCAP

SEQ ID NO: 269 - DNA, 2067 bp, Mus musculus
cccagagtggccgtcgcgcgcacccgcgagcagcgccgggggactcggatgtccgcctgcgcgcacttttggcggtcgcagcttggctcccagctcttgctttcggacgcgcagtgttcggtgcagaggttggctcgctgccttgactggctggaccgggtcgtgaactactgggctttcgggaggaggtgccacagccaccatgccaatcactcgaatgcggatgagaccctggctagagatgcagattaattccaaccaaatcccagggctgatctggatcaataaagaagagatgatcttccagattccatggaagcacgctgctaagcacggctgggacatcaacaaggatgcctgtctgttccggagctgggccattcacacaggccgatacaaagcaggagaaaaagagccagatcccaagacatggaaggcaaacttccgttgtgccatgaactccctgccagacatcgaggaagtgaaggatcagagtaggaacaagggcagctctgctgtgcgggtgtaccggatgctgccacccctcaccaggaaccagaggaaagagagaaagtccaagtccagccgagacactaagagcaaaaccaagaggaagctgtgtggagatgttagcccggacactttctctgatggactcagcagctctaccctacctgatgaccacagcagttacaccactcagggctacctgggtcaggacttggatatggaaagggacataactccagcactgtcaccgtgtgtcgtcagcagcagtctctctgagtggcatatgcagatggacattataccagatagcaccactgatctgtataacctacaggtgtcacccatgccttccacctccgaagccgcaacagacgaggatgaggaagggaagatagccgaagaccttatgaagctctttgaacagtctgagtggcagccgacacacatcgatggcaagggatacttgctcaatgagccagggacccagctctcttctgtctatggagacttcagctgcaaagaggaaccagagattgacagccctcgaggggacattgggataggcatacaacatgtcttcacggagatgaagaatatggactccatcatgtggatggacagcctgctgggcaactctgtgaggctgccgccctctattcaggccattccttgtgcaccatagtttgggtctctgacccgttcttgccctcctgagtgagttaggccttggcatcatggtggctgtgatacaaaaaaagctagactcctgtgggccccttgacacatggcaaagcatagtcccactgcaaacaggggaccatcctccttgggtcagtgggctctcagggcttaggaggcagagtctgagttttcttgtgaggtgaagctggccctgactcctaggaagatggattggggggtctgaggtgtaaggcagaggccatggacaggagtcatcttctagctttttaaaagccttgttgcatagagagggtcttatcgctgggctggccctgaggggaatagaccagcgcccacagaagagcatagcactggccctagagctggctctgtactaggagacaattgcactaaatgagtcctattcccaaagaactgctgcccttcccaaccgagccctgggatggttcccaagccagtgaaatgtgaagggaaaaaaaatggggtcctgtgaaggttggctcccttagcctcagagggaatctgcctcactacctgctccagctgtggggctcaggaaaaaaaaatggcactttctctgtggactttgccacatttctgatcagaggtgtacactaacatttctccccagtctaggcctttgcatttatttatatagtgccttgcctggtgcctgctgtctcctcaggccttggcagtcctcagcaggcccagggaaaaggggggttgtgagcgccttggcgtgactcttgactatctattagaaacgccacctaactgctaaatggtgtttggtcatgtggtggacctgtgtaaatatgtatatttgtctttttataaaaatttaagttgttt

SEQ ID NO: 270 - protein, 329 aa, Mus musculus; identical to SEQ ID NO: 268

SEQ ID NO: 271 - DNA, 3538 bp, Mus musculus
ctgttattttgtaaatactacattttctcagcatttaatgagattgcaatgcattctggtgtacttttttgagtcatttctctttctactcaaaacagagaaaccccatttcctgacttgctgaagatttatcatctgaacattgctgagaaatttcactgaggttaatctataatttgagagatgatggctgaatacaagaatattgttcttctaaaaggattagagaacatggaggactatcagtttaggacagtcaagtccttactaagaaaagaactaaaacttactaaaaaaatgcaagaagattatgataggattcagctggcggactggattgaggacaagttccccaaagatgctggactagacaaactgataaaagtgtgtgagcacataaaagatcttaaagaccttgctaaaaaacttaaaacagagaaggcaaaagttcaaaagaaaaaggaaggaaaatgcaaaacggctgggaaaaaaaaagggcaagatgaactcagttcttctgaatctcttttcaacaataaagaatcaaacaagagtgtaccgtcttcaaagaaaaagagaaaacagatcacaaaaactgaaggtggaaagaaaaagaagctcacccaggagcaggctcagcttccagaaacttcaggaaccaacataaaaaaagaggaagattgcctccagaatcctcataagtctccaccaacaccatccagcagttcctcaaacaaggcaccaaggagaggaactgtaccaaaggagccttctagagaagaaggtcaccatcaaggtcccaaacaagtgatggtgttgaaagtaacagaaccatttacatatgactttgaagaaacgaaaaggatgtttcatgctacagtggctactgaaactgagttcttcagagtgaaggtttttgacacagctctaatgagcaagttcatcccaggaaagatcattgccatatcacattatggtgcaatgggttttctggagatatacagagcttcctgtgtgtccgatgtgaacattaacccaacaatgattatctcaaatacactggaaagtgctattgcaactccaaaaatttcttatcttctctcacaagcaaaggggacatttgtaaatggagaatttgtagtatttaagaaaagtgagaggcatgagtgcatttgctatggaattggagatgatacaggaaaaatggcagtggtggtttatggacgactcaccaatgtcaggtgtgaaccaggcagtaaacttagacttgtctgctttgaattgacttccactaaagatgtgtgcctcctgaggtctgtaaggcacagttacatgcaggtcataaatgaaggaaagccactcaacccagactcagtcaggagaaactctctggaaccatacttctgataacctggatgccaatgacactgtttgtggagataagattcaagtacagaaaataaatgtgcacaggcctgttgaaataccagtcttataaagaccagctcttaattctaagaaatggtgctttctcatattctttatacattctattatctaaatttcataggttgtctctataactcctttaactgttggtttgtaatttttatacctaaaacttaaaaaataaaatccacacaatttctgttaagcagtgtgcctttggcactatcctttaaccatttgagatgtgctttaaaataaaaacttagtgacccttacataaagctggagaatacaggcttcaaatgtgatgtgtcaggacaaagcatgttcagaaacaaatagactgtgttttctgcccatgaagtcaaggtattaataagatgtggggaaatgttgaactcagccttgagtgtagtttccaaaactaatatgctgagaacaggatcaagttttcacctccactatgcttagtaatgtgactgcattacagagtttaggtattggaaaaaaacttccccagaatgaggtgtttagggcggggcgtactattttcaactataaggaatcccatcttcaattccagaatcaaataaaatcactgcaaacttttaaagcaagatgaagaaggcttatgataaaggaaatcaaagaaattaagaaattagtattctcacagaggcctttctagattatttctcacttctctcactgatggtaagacttacttgataaagcaactgaaggaacaatgggttcattttgcccatatttgaatggtagagaagggtgaggtgactgaccatgtacctgcaggaggaagcagagagaagtgagttctagagtcgatctctctctctctctctttctgtctctgtttctctgtctctgtctctctgtctctctgtctctctgtctctctgtctctctctctgtctctctctctctctctctctctctctccctccctccctccctccctccctctctccctcttttattaaagacatgaacctattcaatgatactctccacatttatgatgagtgtttgcaaattccttaacacagtctagaaacttcctcttgcacagcataaaaggattctcacaagtaattccagatcctgtcaggtttacaatcagtatttacagtcacatgaggcaatgatgtgaaatagaggtaaggagcatacatagggatttggacagctgaaatgtaggcaagaagaggcaagagctaaggatgggtaactctctcatcttctaaatccatgtgttatcccccattctaatgatactggaattttgagcttaatgggatttgtttaattctaaatcacttctcaccaatagattaatgtccctaaaaacatttgtggaaggaaattctatttgtttttagtatttgttttgctttaacatgatcatccagtatgtgagagtgggacagaatattgtttagcaccttgaaactccacttttcttttcctataatcacagtgcaccttccagagagagatcattatccacatctactgtgtacacacaacattcttcaaacaatacacctgaaacctattatcaaagtaggcacccatatacaacagattgcaaatatatatgctatgaaccttgaaaatgattactgtctctagaaataccttcattaaaaccttatttatagtcaaatatgtcaacttttcaataccatgaacaatggactgatccagcctagactagtttgagtaaatgtacatccagacaaactatttctttaaagtgaacttttatgatggatattctgtttaccacctccttcctatgtatacttgtgtgtgtataatcaaagtaaagtgctctatggaaagggacatgcaggaggaagaaatgcctacctaatctatgctgatccaccgaaataaagactcacttgtattacatcccttcagcaaaacaacaactcctcttgaactccatgaaagaaacttcaaggaaaacctggagcctgtaaatacatttacttataaggcccacaattgctttctgatctgtactgacagtttgcatctaataaagtttcactggttctat

SEQ ID NO: 272 - protein, 406 aa, Mus musculus
MAEYKNIVLLKGLENMEDYQFRTVKSLLRKELKLTKKMQEDYDRIQLADWIEDKFPKDAGLDKLIKVCEHIKDLKDLAKKLKTEKAKVQKKKEGKCKTAGKKKGQDELSSSESLFNNKESNKSVPSSKKKRKQITKTEGGKKKKLTQEQAQLPETSGTNIKKEEDCLQNPHKSPPTPSSSSSNKAPRRGTVPKEPSREEGHHQGPKQVMVLKVTEPFTYDFEETKRMFHATVATETEFFRVKVFDTALMSKFIPGKIIAISHYGAMGFLEIYRASCVSDVNINPTMIISNTLESAIATPKISYLLSQAKGTFVNGEFVVFKKSERHECICYGIGDDTGKMAVVVYGRLTNVRCEPGSKLRLVCFELTSTKDVCLLRSVRHSYMQVINEGKPLNPDSVRRNSLEPYF

SEQ ID NO: 273 - DNA, 1841 bp, Mus musculus
gctcaagctaggaacttactttaaccagttctcttgcccccctccctgttattttgtaaatactacattttctcagcatttaatgagattgcaatgcattctggtgtacttttttgagtcatttctctttctactcaaaacagagaaaccccatttcctgacttgctgaagatttatcatctgaacattgctgagaaatttcactgaggttaatctataatttgagagatgatggctgaatacaagaatattgttcttctaaaaggattagagaacatggaggactatcagtttaggacagtcaagtccttactaagaaaagaactaaaacttactaaaaaaatgcaagaagattatgataggattcagctggcggactggattgaggacaagttccccaaagatgctggactagacaaactgataaaagtgtgtgagcacataaaagatcttaaagaccttgctaaaaaacttaaaacagagaaggcaaaagttcaaaagaaaaaggaaggaaaatgcaaaacggctgggaaaaaaaaagggcaagatgaactcagttcttctgaatctcttttcaacaataaagaatcaaacaagagtgtaccgtcttcaaagaaaaagagaaaacagatcacaaaaactgaaggtggaaagaaaaagaagctcacccaggagcaggctcagcttccagaaacttcaggaaccaacataaaaaaagaggaagattgcctccagaatcctcataagtctccaccaacaccatccagcagttcctcaaacaagaagaatcctgttgtggcgtccttcttgctggcaagtcgggcgtctacaagtggtgccaaaacccgggaacaagatatcttaaggcacaaacaaagaccctcaagaaagggaggattcaaaactacattttgtgagagaattaaggcaccaaggagaggaactgtaccaaaggagccttctagagaagaaggtcaccatcaaggtcccaaacaagtgatggtgttgaaagtaacagaaccatttacatatgactttgaagaaacgaaaaggatgtttcatgctacagtggctactgaaactgagttcttcagagtgaaggtttttgacacagctctaatgagcaagttcatcccaggaaagatcattgccatatcacattatggtgcaatgggttttctggagatatacagagcttcctgtgtgtccgatgtgaacattaacccaacaatgattatctcaaatacactggaaagtgctattgcaactccaaaaatttcttatcttctctcacaagcaaaggggacatttgtaaatggagaatttgtagtatttaagaaaagtgagaggcatgagtgcatttgctatggaattggagatgatacaggaaaaatggcagtggtggtttatggacgactcaccaatgtcaggtgtgaaccaggcagtaaacttagacttgtctgctttgaattgacttccactaaagatgtgtgcctcctgaggtctgtaaggcacagttacatgcaggtcataaatgaaggaaagccactcaacccagactcagtcaggagaaactctctggaaccatacttctgataacctggatgccaatgacactgtttgtggagataagattcaagtacagaaaataaatgtgcacaggcctgttgaaataccagtcttataaagaccagctcttaattctaagaaatggtgctttctcatattctttatacattctattatctaaatttcataggttgtctctataactcctttaactgttggtttgtaatttttatacctaaaacttaaaaaataaaatccacacaatttctgtt

SEQ ID NO: 274 - protein, 454 aa, Mus musculus
MAEYKNIVLLKGLENMEDYQFRTVKSLLRKELKLTKKMQEDYDRIQLADWIEDKFPKDAGLDKLIKVCEHIKDLKDLAKKLKTEKAKVQKKKEGKCKTAGKKKGQDELSSSESLFNNKESNKSVPSSKKKRKQITKTEGGKKKKLTQEQAQLPETSGTNIKKEEDCLQNPHKSPPTPSSSSSNKKNPVVASFLLASRASTSGAKTREQDILRHKQRPSRKGGFKTTFCERIKAPRRGTVPKEPSREEGHHQGPKQVMVLKVTEPFTYDFEETKRMFHATVATETEFFRVKVFDTALMSKFIPGKIIAISHYGAMGFLEIYRASCVSDVNINPTMIISNTLESAIATPKISYLLSQAKGTFVNGEFVVFKKSERHECICYGIGDDTGKMAVVVYGRLTNVRCEPGSKLRLVCFELTSTKDVCLLRSVRHSYMQVINEGKPLNPDSVRRNSLEPYF

SEQ ID NO: 275 - DNA, 1970 bp, Mus musculus
cctagtaacaggagaaacatcactggaaaaaaatggtcaagaagcaggtcctgcaacacctacatcaactacaagccacatgttagcatctgaaagaggcgagacttctgcaacccaggaagagacttccacagctcaggcggggacttccacagctcaggcgaggacttccacagctcaggcggggacttctacagcccaggtgagcctgaggaacagtggtgggctggcagtgcagacaggcagagggcagtggatatactttcagaaaagaaaaattatgagagaagaagagactggagtgaaaaagagcaaggcggctaaggaaccagatcagcctccctgttgtgaagaacccacagccaggtgccagtcaccaatactccacagctcatcttcagcttcatctaacattccttcggctaagaaccaaaaatcacaaccccagaatcagaacattcccagaggtgctgttctccactcagagcccctgacagtgatggtgctcactgcaacagacccatttgaatatgaatcaccagaacatgaagtaaagaacatgcttcatgctacagtggctacagtgagccagtatttccatgtgaaagttttcaacatcaacttgaaagaaaagttcacaaaaaagaattttatcatcatatccaattactttgagagcaaaggcatcctggagatcaatgagacttcctctgtgttagaggctgctcctgaccaaatgattgaagtgcccaacagtattatcagaaatgcaaatgccagccctaagatctgtgatattcaaaagggtacttctggagcagtgttctatggagtgtttacattacacaagaaaacagtgaaccgaaagaacacaatctatgaaataaaagatggttcaggaagcatagaagtggtggggagtggaaaatggcacaacatcaactgcaaggaaggagataaactccacctcttctgctttcacctgaaaacaattgacaggcaaccaaagttagtgtgtggagaacacagtttcatcaagatatcaaagagaggaaatgtaccaaaggagcctgctaaggaagaagatcaccatcatggtcccaaacaagtgatggtgctgaaagtaacagaaccatttacatatgacctgaaagaggataaaagaatgtttcatgctaccgtggctactgaaactgagttcttcagagtgaaggtttttgacacggctctaaagagcaagttcatcccaagaaatatcattgccatatcagattattttgggtgcaatgggtttctggagatatacagagcttcctgtgtctctgatgtgaacgttaatccaacaatggttatctcaaatacactgagacaaagagctaatgcaactcctaaaatttcttatcttttctcacaagcaagggggacatttgtgagtggagagtacttagtaaataagaaaacggagaggaataaattcatttactatggaattggagatgatacagggaaaatggaagtggtggtttatggaagactcaccaatgtcaggtgtgaaccaggcagtaaactaagacttgtctgctttgaattgacttccactgaagatgggtggcagctgaggtctgtaaggcacagttacatgcaggtcatcaatgctagaaagtgaaggaaagccactcaacccagactcagtcgggagaacctctctggaaccatacttctgaaaacctgaatgccaatgatatttttttgtggagataagattcaattacagaaaataaatgtgtataagcctattgaaatatcagtcctataaagaccatctcttaattctaggaaatggtgttttcttatattctttacacattttctatatctaaattcatttgttgtctctataacttctataactgttcaatttgcaatttttatgcctaaaacttataaaaataaattcacacaatttctgt

SEQ ID NO: 276 - protein, 554 aa, Mus musculus
LVTGETSLEKNGQEAGPATPTSTTSHMLASERGETSATQEETSTAQAGTSTAQARTSTAQAGTSTAQVSLRNSGGLAVQTGRGQWIYFQKRKIMREEETGVKKSKAAKEPDQPPCCEEPTARCQSPILHSSSSASSNIPSAKNQKSQPQNQNIPRGAVLHSEPLTVMVLTATDPFEYESPEHEVKNMLHATVATVSQYFHVKVFNINLKEKFTKKNFIIISNYFESKGILEINETSSVLEAAPDQMIEVPNSIIRNANASPKICDIQKGTSGAVFYGVFTLHKKTVNRKNTIYEIKDGSGSIEVVGSGKWHNINCKEGDKLHLFCFHLKTIDRQPKLVCGEHSFIKISKRGNVPKEPAKEEDHHHGPKQVMVLKVTEPFTYDLKEDKRMFHATVATETEFFRVKVFDTALKSKFIPRNIIAISDYFGCNGFLEIYRASCVSDVNVNPTMVISNTLRQRANATPKISYLFSQARGTFVSGEYLVNKKTERNKFIYYGIGDDTGKMEVVVYGRLTNVRCEPGSKLRLVCFELTSTEDGWQLRSVRHSYMQVINARK

SEQ ID NO: 277 - DNA, 1081 bp, Mus musculus
aggagtggcagcgcgagggtgaaagagacgcacaagtggatcctaaagtccttcccggaggagaggggctgcccggagggaagggacggagtgcgcggagtcagcgcgggcggctgccactgtcgctgccactcccggggcggccccgggagtggtcaggctgccagggcgtgatggggccgcggccagagcctcgctgactaccggtggcgggaggaagggacccggaacagcccacgggggggatgccaagaggcaggccgtttcctgcacccagcacctaagcagctggggtccgtgcaccccgcggggacggctctggctcggagcgtggcccatgtcctgcgcgggtgaagccctcgctcccgggcccgcggagcagcagtgcccggtcgaggcgggcggcggccggctgggctccccggcccacgaagcatgtaatgaggacaatacggagaaagataaaaggccagctaccagtggccataccaggtgtgggctgatgcgggaccagtccatttggccaaatccttcagctggtgaacttgtcagaacccaacctgaacgtctgcctcaactccagacatcagcacaggaacccggcaaggaggaaacaggcaagataaagaatggcggccacacaaggatgagcaatgggaatggaattcctcacggagccaaacatgtgtccgtggagaatcacaagatatcagcccccgtttctcagaagatgcacagaaaaatccagtccagcttgtctgtaaacaatgacatcagtaagaagagtaaagtaaatgctgtcttttccccaaaagcagcctcctcacccgaagactgctgtgtccactgtatcctggcatgcttgttctgtgaattcctgaccctctgcaacattgtcctgggacaagcttcgtgtggcatctgcacctccgaagcctgctgctgttgctgtggcgatgagatgggtgatgactgtagctgcccctgtgacatggactgcggcatcatggatgcctgttgtgaatcgtcagactgtctagaaatctgcatggaatgctgtggcatctgttttccttcataa

SEQ ID NO: 278 - protein, 247 aa, Mus musculus
MSCAGEALAPGPAEQQCPVEAGGGRLGSPAHEACNEDNTEKDKRPATSGHTRCGLMRDQSIWPNPSAGELVRTQPERLPQLQTSAQEPGKEETGKIKNGGHTRMSNGNGIPHGAKHVSVENHKISAPVSQKMHRKIQSSLSVNNDISKKSKVNAVFSPKAASSPEDCCVHCILACLFCEFLTLCNIVLGQASCGICTSEACCCCCGDEMGDDCSCPCDMDCGIMDACCESSDCLEICMECCGICFPS

SEQ ID NO: 279 - DNA, 774 bp, Mus musculus
aggagtggcagcgcgagggtgaaagagacgcacaagtggatcctaaagtccttcccggaggagaggggctgcccggagggaagggacggagtgcgcggagtcagcgcgggcggctgccactgtcgctgccactcccggggcggcggagtggtcaggctgccagggcgtgatggggccgcggccagagcctcgctgactaccggtggcgggaggaagggacccggaacagcccacgggggggatgccaagaggcaggccgtttcctgcacccagcacctaagcagctggggtccgtgcaccccgcggggacggctctggctcggagcgtggcccatgtcctgcgcgggtgaagccctcgctcccgggcccgcggagcagcagtgcccggtcgaggcgggcggcggccggctgggctccccggcccacgaagcatgtaatgaggacaatacggagaaagataaaaggccagctaccagtggccataccaggtgtgggctgatgcgggaccagtccatttggccaaatccttcagctggtgaacttgtcagaacccaacctgaacgtctgcctcaactccagacatcagcacaggaacccggcaaggaggaaacaggcaagataaagaatggcggccacacaaggatgagcaatgggaatggaattcctcacggagccaaacatgtgtccgtggagaatcacaagatatcagcccccgtttctcagaagatgcacagaaaaatccagtccagcttgtctgtaaacaatgacatcagt

SEQ ID NO: 280 - protein, 258 aa, Mus musculus
RSGSARVKETHKWILKSFPEERGCPEGRDGVRGVSAGGCHCRCHSRGGGVVRLPGRDGAAARASLTTGGGRKGPGTAHGGDAKRQAVSCTQHLSSWGPCTPRGRLWLGAWPMSCAGEALAPGPAEQQCPVEAGGGRLGSPAHEACNEDNTEKDKRPATSGHTRCGLMRDQSIWPNPSAGELVRTQPERLPQLQTSAQEPGKEETGKIKNGGHTRMSNGNGIPHGAKHVSVENHKISAPVSQKMHRKIQSSLSVNNDIS

SEQ ID NO: 281 - DNA, 1785 bp, Mus musculus
gcttttcccgccagaggcaggccgtttcctgcacccagcacctaagcagctggggtccgtgcaccccgcggggacggctctggctcggagcgtggcccatgtcctgcgcgggtgaagccctcgctcccgggcccgcggagcagcagtgcccggtcgaggcgggcggcggccggctgggctccccggcccacgaagcatgtaatgaggacaatacggagaaagataaaaggccagctaccagtggccataccaggtgtgggctgatgcgggaccagtccatttggccaaatccttcagctggtgaacttgtcagaacccaacctgaacgtctgcctcaactccagacatcagcacaggaacccggcaaggaggaaacaggcaagataaagaatggcggccacacaaggatgagcaatgggaatggaattcctcacggagccaaacatgtgtccgtggagaatcacaagatatcagcccccgtttctcagaagatgcacagaaaaatccagtccagcttgtctgtaaacaatgacatcagtaagaagagtaaagtaaatgctgtcttttccccaaaagcagcctcctcacccgaagactgctgtgtccactgtatcctggcatgcttgttctgtgaattcctgaccctctgcaacattgtcctgggacaagcttcgtgtggcatctgcacctccgaagcctgctgctgttgctgtggcgatgagatgggtgatgactgtagctgcccctgtgacatggactgcggcatcatggatgcctgttgtgaatcgtcagactgtctagaaatctgcatggaatgctgtggcatctgttttccttcataaaagatttatctcttgtttttactaaaactggagacaactttacaatatttcttgtaggggaaagaaaggcgcatggtaagactcccatgaaacaactcagtatttgcactgttttttgtagacccattccttctaagtaagctctgaaattcttcctttcgccggatgtatgtggtttaatatgtgaagttttgactgtctaattggttttttgaaacttcttcatagatgacaataattggaagacattttgacacacacagcctaaaatgttaaatgtcttctttctcttgacatgtctgttttcgctaaccattctgagcagctctttgctctaaacacaacattgctcagtatgtatttaagccagatcactttgatgtttatctattggaggttaaaagcaaacttttttttaattctaagtaagcacaaacattgggcagagccgtaaacagatgtgggactctccgtgttggtctcctctgggcttttcagctctcttgttctgccagagtgctctgaagaagatcacattgctctcatccagagcggcaggaagtgtaatggaagcaagcaggatgggagctgtaaaggatgaaccaggtttcaaagcatgctggcttcaagactgtaaaggcaagaggccataggaacatacagaagtgaataacaggttacagaagaaggcctggaggaagatatggcactgtggatgctctaggaccagctacttgaatttaaggaaatgttgaaggtacacagcctagactgtcagtgctttggacaagtgaaaaggatttgccttgtatatcgcagcaacacagctttcttagaactgtaaaatctcaactaatgcaaatacgcactttcctacatgtaatttaagtgttataaattttaatgaaaacataataccttgttaacataactatattttacc

SEQ ID NO: 282 - protein, 247 aa, Mus musculus; identical to SEQ ID NO: 278

SEQ ID NO: 283 - DNA, 2078 bp, Mus musculus
gagtcccagcatcagagcgcgtggaccttttcccgcgtcccgcagcatgcaggtctcccgtgtgctggccgcgctgtgcggcatgctactctgcgcctctggcctcttcgccgcgtctggtgacttctgtgactccagcctgtgcctgaacggtggcacctgcttgacgggccaagacaatgacatctactgcctctgccctgaaggcttcacaggccttgtgtgcaatgagactgagagaggaccatgctccccaaacccttgctacaatgatgccaaatgtctggtgactttggacacacagcgtggggacatcttcaccgaatacatctgccagtgccctgtgggctactcgggcatccactgtgaaaccgagaccaactactacaacctggatggagaatacatgttcaccacagccgtccccaatactgccgtccccaccccggcccccacccccgatctttccaacaacctagcctcccgttgttctacacagctgggcatggaagggggcgccattgctgattcacagatttccgcctcgtctgtgtatatgggtttcatgggcttgcagcgctggggcccggagctggctcgtctgtaccgcacagggatcgtcaatgcctggacagccagcaactatgatagcaagccctggatccaggtgaaccttctgcggaagatgcgggtatcaggtgtgatgacgcagggtgccagccgtgccgggagggcggagtacctgaagaccttcaaggtggcttacagcctcgacggacgcaagtttgagttcatccaggatgaaagcggtggagacaaggagtttttgggtaacctggacaacaacagcctgaaggttaacatgttcaacccgactctggaggcacagtacataaagctgtaccctgtttcgtgccaccgcggctgcaccctccgcttcgagctcctgggctgtgagttgcacggatgttctgagcccctgggcctgaagaataacacaattcctgacagccagatgtcagcctccagcagctacaagacatggaacctgcgtgcttttggctggtacccccacttgggaaggctggataatcagggcaagatcaatgcctggacggctcagagcaacagtgccaaggaatggctgcaggttgacctgggcactcagaggcaagtgacaggaatcatcacccagggggcccgtgactttggccacatccagtatgtggcgtcctacaaggtagcccacagtgatgatggtgtgcagtggactgtatatgaggagcaaggaagcagcaaggtcttccagggcaacttggacaacaactcccacaagaagaacatcttcgagaaacccttcatggctcgctacgtgcgtgtccttccagtgtcctggcataaccgcatcaccctgcgcctggagctgctgggctgttaatgctcagtcctgccagcccaaacgatgaggatggccagaggctgaggggcctcctggccctgcctcccaggccctgctgccttctgtggctgacgaccttcttggccttcccttctgattgtactggggctggaggcaggaagggccaggggatttcagagttgcccttcaccctttccctcaccctgcagcccccacaggcctcctgctagcccccttctctcaggcattctgggggagttggacaggtctgagatgaatagagaagaagagtgaagttggggtatgtgggctatctgtaccaaccaccccaagtcctaaacttcctgccagggcttgactcaggactgaagggagcccctgactgcccatccctctctgcacaccacacattcctccatgttccattccgggaaggagaggcccacgtccgcttgctgtcccttgggtcaccaggtcctgcctcttatctcctgagacgcctcttgacccttgcactggagcctcagttgacaaggagactggcgggtctggagaggtcggtggctctgggtggttgacaggttggctgtgggacctctgctggcttgctacccaagttaacaagcagattccaaaatacattcgtgttctccactgg

SEQ ID NO: 284 - protein, 463 aa, Mus musculus
MQVSRVLAALCGMLLCASGLFAASGDFCDSSLCLNGGTCLTGQDNDIYCLCPEGFTGLVCNETERGPCSPNPCYNDAKCLVTLDTQRGDIFTEYICQCPVGYSGIHCETETNYYNLDGEYMFTTAVPNTAVPTPAPTPDLSNNLASRCSTQLGMEGGAIADSQISASSVYMGFMGLQRWGPELARLYRTGIVNAWTASNYDSKPWIQVNLLRKMRVSGVMTQGASRAGRAEYLKTFKVAYSLDGRKFEFIQDESGGDKEFLGNLDNNSLKVNMFNPTLEAQYIKLYPVSCHRGCTLRFELLGCELHGCSEPLGLKNNTIPDSQMSASSSYKTWNLRAFGWYPHLGRLDNQGKINAWTAQSNSAKEWLQVDLGTQRQVTGIITQGARDFGHIQYVASYKVAHSDDGVQWTVYEEQGSSKVFQGNLDNNSHKKNIFEKPFMARYVRVLPVSWHNRITLRLELLGC

SEQ ID NO: 285 - DNA, 1996 bp, Mus musculus
attccggagtgagaggagcggacgcaggaactctcgagtcccagcatcagagcgcgtggaccttttcccgcgtcccgcagcatgcaggtctcccgtgtgctggccgcgctgtgcggcatgctactctgcgcctctggcctcttcgccgcgtctggtgacttctgtgactccagcctgtgcctgaacggtggcacctgcttgacgggccaagacaatgacatctactgcctctgccctgaaggcttcacaggccttgtgtgcaatgagactgagagaggaccatgctccccaaacccttgctacaatgatgccaaatgtctggtgactttggacacacagcgtggggacatcttcaccgaatacatctgccagtgccctgtgggctactcgggcatccactgtgaaaccggttgttctacacagctgggcatggaagggggcgccattgctgattcacagatttccgcctcgtctgtgtatatgggtttcatgggcttgcagcgctggggcccggagctggctcgtctgtaccgcacagggatcgtcaatgcctggacagccagcaactatgatagcaagccctggatccaggtgaaccttctgcggaagatgcgggtatcaggtgtgatgacgcagggtgccagccgtgccgggagggcggagtacctgaagaccttcaaggtggcttacagcctcgacggacgcaagtttgagttcatccaggatgaaagcggtggagacaaggagtttttgggtaacctggacaacaacagcctgaaggttaacatgttcaacccgactctggaggcacagtacataaagctgtaccctgtttcgtgccaccgcggctgcaccctccgcttcgagctcctgggctgtgagttgcacggatgttctgagcccctgggcctgaagaataacacaattcctgacagccagatgtcagcctccagcagctacaagacatggaacctgcgtgcttttggctggtacccccacttgggaaggctggataatcagggcaagatcaatgcctggacggctcagagcaacagtgccaaggaatggctgcaggttgacctgggcactcagaggcaagtgacaggaatcatcacccagggggcccgtgactttggccacatccagtatgtggcgtcctacaaggtagcccacagtgatgatggtgtgcagtggactgtatatgaggagcaaggaagcagcaaggtcttccagggcaacttggacaacaactcccacaagaagaacatcttcgagaaacccttcatggctcgctacgtgcgtgtccttccagtgtcctggcataaccgcatcaccctgcgcctggagctgctgggctgttaatgctcagtcctgccagcccaaacgatgaggatggccagaggctgaggggcctcctggccctgcctcccaggccctgctgccttctgtggctgacgaccttcttggccttcccttctgattgtactggggctggaggcaggaagggccaggggatttcagagttgcccttcaccctttccctcaccctgcagcccccacaggcctcctgctagcccccttctctcaggcattctgggggagttggacaggtctgagatgaatagagaagaagagtgaagttggggtatgtgggctatctgtaccaaccaccccaagtcctaaacttcctgccagggcttgactcaggactgaagggagcccctgactgcccatccctctctgcacaccacacattcctccatgttccattccgggaaggagaggcccacgtccgcttgctgtcccttgggtcaccaggtcctgcctcttatctcctgagacgcctcttgacccttgcactggagcctcagttgacaaggagactggcgggtctggagaggtcggtggctctgggtggttgacaggttggctgtgggacctctgctggcttgctacccaagttaacaagcagattccaaaatacattcgtgttctc

SEQ ID NO: 286 - protein, 426 aa, Mus musculus
MQVSRVLAALCGMLLCASGLFAASGDFCDSSLCLNGGTCLTGQDNDIYCLCPEGFTGLVCNETERGPCSPNPCYNDAKCLVTLDTQRGDIFTEYICQCPVGYSGIHCETGCSTQLGMEGGAIADSQISASSVYMGFMGLQRWGPELARLYRTGIVNAWTASNYDSKPWIQVNLLRKMRVSGVMTQGASRAGRAEYLKTFKVAYSLDGRKFEFIQDESGGDKEFLGNLDNNSLKVNMFNPTLEAQYIKLYPVSCHRGCTLRFELLGCELHGCSEPLGLKNNTIPDSQMSASSSYKTWNLRAFGWYPHLGRLDNQGKINAWTAQSNSAKEWLQVDLGTQRQVTGIITQGARDFGHIQYVASYKVAHSDDGVQWTVYEEQGSSKVFQGNLDNNSHKKNIFEKPFMARYVRVLPVSWHNRITLRLELLGC

SEQ ID NO: 287 - DNA, 1180 bp, Mus musculus
gcgggcggccggacgagcgcggctccaagaccggtcccgcagcagctgtgcgccgtggccgatggacatgggcacgcagggatcggggcgcaagcggctccccaaccgggagcggctgacggcggaggacgacgcgctgaaccagatcgcgcgcgaggcggaggccaggctcgcagcgaagcgtgcagcccgagccgaggctcgagagatccggatgaaggagctggaacggcagcagaaagaggtagaagaaagaccagacaaagactttgctgagaagggctcccgtaacatgcctagcctgtctgcagccacactggcatctctgggtgggacttcctcccggagagggagtggagatacctccatctccatggacaccgaagcatccatcagggaaatcaaggaacttaatgagttaaaggaccagattcaggatgtagaaggcaaatacatgcagggactgaaagagatgaaggactcgctggccgaagttgaggagaagtacaagaaagctatggtctccaacgcccagctagacaatgagaagaccaacttcatgtaccaggtggacacactgaaggacatgctgctggagctggaagagcagctggccgagtctcagcggcaatacgaggagaagaacaaggagttcgagagggagaagcatgcccacagcatcctgcagttccagtttgccgaagtgaaagaggccctgcggcaaagggaagagatgctcgaggtgagccactgccttcttcccttcctgtggatccctcgctgttttagcctaggctgcttgacaaaatactgcagacctcgtagccctgacaacaaatgcatatttcctcactgttctgggtaccagagaccaggtcgagacgttaggttgaaaaagctcattgatgaacgggaatgtctgttggaacagattaagaagctcaaagggcagctggagggaagacagaagaacaacaagctggaccttcttcgagccgaggacggtatcttggagaatgggacagacgcgcatgtcatggatctgcaaagagatgccaacagacagatcagcgacctcaaatttaaacttgcaaaatctgagcaagagataactgccttagaacaaaatgtaataaggttagagagccaagtaacgcgctatcgatcagccgccgaaaat

SEQ ID NO: 288 - protein, 371 aa, Mus musculus
MGTQGSGRKRLPNRERLTAEDDALNQIAREAEARLAAKRAARAEAREIRMKELERQQKEVEERPDKDFAEKGSRNMPSLSAATLASLGGTSSRRGSGDTSISMDTEASIREIKELNELKDQIQDVEGKYMQGLKEMKDSLAEVEEKYKKAMVSNAQLDNEKTNFMYQVDTLKDMLLELEEQLAESQRQYEEKNKEFEREKHAHSILQFQFAEVKEALRQREEMLEVSHCLLPFLWIPRCFSLGCLTKYCRPRSPDNKCIFPHCSGYQRPGRDVRLKKLIDERECLLEQIKKLKGQLEGRQKNNKLDLLRAEDGILENGTDAHVMDLQRDANRQISDLKFKLAKSEQEITALEQNVIRLESQVTRYRSAAEN

SEQ ID NO: 289 - DNA, 969 bp, Mus musculus
atgggcacgcagggatcggggcgcaagcggctccccaaccgggagcggctgacggcggaggacgacgcgctgaaccagatcgcgcgcgaggcggaggccaggctcgcagcgaagcgtgcagcccgagccgaggctcgagagatccggatgaaggagctggaacggcagcagaaagaggtaatgggggctgagtgttccgagaaatattatgggctggatacaaaatggggcgacatcgagcagtggatggaagacagcgagcgctactctcgtagattccggagaaacacgtcggcttctgacgaagacgagcgcttgtccgtgggtagtcgcggcagcctaaggactaacggttatgacggagactattgtggatcccagtccctaagtagaagatctggcaggccctcagaatatggcagccacctcaactccagctcccgggcctcttctagggccagctctgcaagggccagtcctgtggtagaagaaagaccagacaaagactttgctgagaagggctcccgtaacatgcctagcctgtctgcagccacactggcatctctgggtgggacttcctcccggagagggagtggagatacctccatctccatggacaccgaagcatccatcagggaaatcaaggactcgctggccgaagttgaggagaagtacaagaaagctatggtctccaacgcccagctagacaatgagaagaccaacttcatgtaccaggtggacacactgaaggacatgctgctggagctggaagagcagctggccgagtctcagcggcaatacgaggagaagaacaaggagttcgagagggagaagcatgcccacagcatcctgcagttccagtttgccgaagtgaaagaggccctgcggcaaagggaagagatgctcgaggaaatccgacagctgcagcagaaacaggcgggttttatcagggagatttctgatcttcag

SEQ ID NO: 290 - protein, 323 aa, Mus musculus
MGTQGSGRKRLPNRERLTAEDDALNQIAREAEARLAAKRAARAEAREIRMKELERQQKEVMGAECSEKYYGLDTKWGDIEQWMEDSERYSRRFRRNTSASDEDERLSVGSRGSLRTNGYDGDYCGSQSLSRRSGRPSEYGSHLNSSSRASSRASSARASPVVEERPDKDFAEKGSRNMPSLSAATLASLGGTSSRRGSGDTSISMDTEASIREIKDSLAEVEEKYKKAMVSNAQLDNEKTNFMYQVDTLKDMLLELEEQLAESQRQYEEKNKEFEREKHAHSILQFQFAEVKEALRQREEMLEEIRQLQQKQAGFIREISDLQ

SEQ ID NO: 291 - DNA, 1851 bp, Mus musculus
atgaccagcccagagggcgcgcaaaacaaggaaatcgactgtctgagtccagaggcgcaaagactggcggaggccaggctcgcagcgaagcgtgcagcccgagccgaggctcgagagatccggatgaaggagctggaacggcagcagaaagaggtaatgggggctgagtgttccgagaaatattatgggctggatacaaaatggggcgacatcgagcagtggatggaagacagcgagcgctactctcgtagattccggagaaacacgtcggcttctgacgaagacgagcgcttgtccgtgggtagtcgcggcagcctaaggactaacggttatgacggagactattgtggatcccagtccctaagtagaagatctggcaggggactctcctgctccaaccttggccttcccagcagtggccttgcttccaaacccctgtctacccagaatggatcccgggcgtccatgctggatgagagcagcctctatggggctcgaaggggaagcgcctgtggttctcgagcaccctcagaatatggcagccacctcaactccagctcccgggcctcttctagggccagctctgcaagggccagtcctgtggtagaagaaagaccagacaaagactttgctgagaagggctcccgtaacatgcctagcctgtctgcagccacactggcatctctgggtgggacttcctcccggagagggagtggagatacctccatctccatggacaccgaagcatccatcagggaaatcaaggaacttaatgagttaaaggaccagattcaggatgtagaaggcaaatacatgcagggactgaaagagatgaaggactcgctggccgaagttgaggagaagtacaagaaagctatggtctccaacgcccagctagacaatgagaagaccaacttcatgtaccaggtggacacactgaaggacatgctgctggagctggaagagcagctggccgagtctcagcggcaatacgaggagaagaacaaggagttcgagagggagaagcatgcccacagcatcctgcagttccagtttgccgaagtgaaagaggccctgcggcaaagggaagagatgctcgaggaaatccgacagctgcagcagaaacaggcgggttttatcagggagatttctgatcttcaggaaacgatagaatggaaagacataaagataggggcattagaaagacagaaagagttctttgattccataaggagcgaacgagatgaccttagagaagaaacagtcaagctgaaggaggagttgaaggtacgaaaccgaagcgcagctaacagctccacggtgacaacttccatgggcactggctctgtgatacagattcacctatatgtctttctgatttcttcagacgttaggttgaaaaagctcattgatgaacgggaatgtctgttggaacagattaagaagctcaaagggcagctggagggaagacagaagaacaacaagctggaccttcttcgagccgaggacggtatcttggagaatgggacagacgcgcatgtcatggatctgcaaagagatgccaacagacagatcagcgacctcaaatttaaacttgcaaaatctgagcaagagataactgccttagaacaaaatgtaataaggttagagagccaagtaacgcgctatcgatcagccgccgaaaatgcagaaaaaatagaagatgaactaaaggcagaaaaacggaagctccagagagagcttcgctctgcactggacaaaacagaagagctcgaggtgagcaacggccacctcgtaaagcgactggaaaagatgaaagccaaccgcagcgctctcttgtcccagcaataa

SEQ ID NO: 292 - protein, 616 aa, Mus musculus
MTSPEGAQNKEIDCLSPEAQRLAEARLAAKRAARAEAREIRMKELERQQKEVMGAECSEKYYGLDTKWGDIEQWMEDSERYSRRFRRNTSASDEDERLSVGSRGSLRTNGYDGDYCGSQSLSRRSGRGLSCSNLGLPSSGLASKPLSTQNGSRASMLDESSLYGARRGSACGSRAPSEYGSHLNSSSRASSRASSARASPVVEERPDKDFAEKGSRNMPSLSAATLASLGGTSSRRGSGDTSISMDTEASIREIKELNELKDQIQDVEGKYMQGLKEMKDSLAEVEEKYKKAMVSNAQLDNEKTNFMYQVDTLKDMLLELEEQLAESQRQYEEKNKEFEREKHAHSILQFQFAEVKEALRQREEMLEEIRQLQQKQAGFIREISDLQETIEWKDIKIGALERQKEFFDSIRSERDDLREETVKLKEELKVRNRSAANSSTVTTSMGTGSVIQIHLYVFLISSDVRLKKLIDERECLLEQIKKLKGQLEGRQKNNKLDLLRAEDGILENGTDAHVMDLQRDANRQISDLKFKLAKSEQEITALEQNVIRLESQVTRYRSAAENAEKIEDELKAEKRKLQRELRSALDKTEELEVSNGHLVKRLEKMKANRSALLSQQ

SEQ ID NO: 293 - DNA, 1727 bp, Mus musculus
agagggagtcccgctctccaattaaagcgggcagcggcgcggctctgagcacagagccgccggctgcacacaggcaaaggaacctgaacttggccattcagcagcgctgtccaggctgcgcgctccctctggcccctgcctgagaagccaggtgctgtttctgcaccgccaggatggcaaaagtggctaaggacctcaaccctggagtgcaaaagatgtccttgggccagcagcagtccgcaagaggagtggcttgtctgcggtgcaagggaatgtgctccggcttcgagcctcactcgtggaggaaaatatgcaagtcttgtaaatgcagccaggaggagcactgcctaagctctgacctggacgatgatcggaaaattgggcgcctgctgatggactccaagtatgccactctcaccgccagggtgaaaggcggagacggcatccgcatctataagaggaaccgcatgatcatgaccaaccccatcgccaccggcaaagaccccacctttgacactatcacctacgagtgggctcccccaggagtcacccagaaactgggcctgcagtacatggaactcatccccaaggagaggcagcctgtgacaggcactgagggtgccctctaccgccgacgccagctcatgcatcagctccctatctatgaccaggacccctctcgatgccgtggacttgtggagaatgagctgaaagctatggaggagttcgtcaagcactacaagagcgaggcccttggggtgggcgaggtggccctcccagggcagggaggcttgcccaaggaagaaaacaagacacaggaaaagccagagggcacagagaccactgccccaaccaccaatggcagcctgggtgatccatccaaagaagtggaatacgtctgtgagctctgcaagggagcagccccagttgacagccctgtggtctacgctgacagggctggatacagcaaacagtggcaccccacgtgctttcagtgtatcaagtgctcagagccactggtggacctcatctacttctggaaggatggtgcaccctggtgtggccgccactactgtgagagtgtgcggccccggtgctcaggctgtgatgagatcatcttctcagaagactaccagcgtgtggaagacctggcctggcatcggaagcacttcatttgcgagggctgtgagcagctgctgagcggccgtgcgtacatcgtcaccaagggtcagctcctgtgccccacatgcagcaagtcaaaacgctcctgaaaggctgcccgcccacagccagcagagtctatcggatcccaccaggagactgaagccatcctatggggcggatgccacggccagcaagcagtgcatattctaggttgagcagtggtagatcttagagggtcagtagtttcaaaaacagaggtattctaagaagtcttagaatggatttattgtttcctagctgcaaccaactaaagacacactggtatcctgccagggagccctaggagaaatttcccagaatgcatttctgagggatccaatcaagaagtagatgtaggatatgcttttttttttctctcgtggacatgggatctctccagggggcaggatgagattctcaactcccatttgtttgcctctttctcaagtggaatctgaatcttcaataaacaatgtttttggcatgataaacatatcaataaaaggtttatgaatttcacacac

SEQ ID NO: 294 - protein, 365 aa, Mus musculus
MAKVAKDLNPGVQKMSLGQQQSARGVACLRCKGMCSGFEPHSWRKICKSCKCSQEEHCLSSDLDDDRKIGRLLMDSKYATLTARVKGGDGIRIYKRNRMIMTNPIATGKDPTFDTITYEWAPPGVTQKLGLQYMELIPKERQPVTGTEGALYRRRQLMHQLPIYDQDPSRCRGLVENELKAMEEFVKHYKSEALGVGEVALPGQGGLPKEENKTQEKPEGTETTAPTTNGSLGDPSKEVEYVCELCKGAAPVDSPVVYADRAGYSKQWHPTCFQCIKCSEPLVDLIYFWKDGAPWCGRHYCESVRPRCSGCDEIIFSEDYQRVEDLAWHRKHFICEGCEQLLSGRAYIVTKGQLLCPTCSKSKRS

SEQ ID NO: 295 - DNA, 2174 bp, Mus musculus
gggtgctggcagggagagggggtcggctgtttttctggagagttagagctgagtaagacaaagcacgtcccccgcaggcgccatggagctgctgtcccgcgtcctgctgtggaaactgctgcttcttcagagctctgcagtcctgtcctcagggccttcagggaccgcagcagccagcagctctctggtgtctgagtctgtggtgagcttggcagccggaacccaggctgtgctacgctgccagagcccccgcatggtgtggacccaagaccggctgcatgatcgccagcgcgtggtccactgggacctcagcgggggcccgggcagccaacggcgccgacttgtggatatgtattcggcgggtgaacagcgcgtgtacgagccgcgcgatcgcgaccgcctcctgctgtcgccttctgctttccacgacggcaacttctcgctgctcattcgcgctgtggacagaggcgatgaaggggtgtacacctgcaacctgcaccatcactactgccacctcgatgagagcctggctgtgcgcctcgaggttacagaggatcccctattaagtcgcgcatactgggacggtgagaaggaagtgttggtggtggcccatggcgcgccggcactgatgacctgcatcaaccgtgcgcacgtgtggactgaccgccatttagaggaggcgcagcaggtggtccattgggaccgacagctacctggggtgtcacacgaccgcgccgaccgcctgcttgacctgtatgcatctggcgagcgccgcgcctatgggccacccttcctgcgtgatcgcgtgtcagtgaacaccaacgcttttgcacgcggtgacttctccctacgcatcgatgagctggagcgagctgatgagggcatctattcctgccacctgcaccatcactactgtggcctccacgagcgccgagtcttccacctacaggtcacagagcctgcctttgagccaccagctcgtgcttctcctggcaatgggtctggtcacagcagtgctcctagcccagatcccaccctgacccgaggccacagcatcatcaatgtcattgtcccagaggaccacacacatttcttccagcaactgggctatgtgttggccacgctgctgctcttcatcttgctgctcatcactgtagtcctggctacacgatatcgtcacagcggaggatgcaagacgtcggacaaaaaagctgggaagtcaaaggggaaggatgtgaacatggtggagtttgctgtagccacaagggatcaggctccatataggactgaggacatccagctagattacaaaaacaacatcctgaaggagagggctgagctggcccatagtcctctgcctgccaaggatgtggatctggataaagagttcaggaaggagtactgcaaataaatggaccctgagcttctggctgggccagcagctctgtatcaaaggacatctccctgaccctcctgcggtattcctggctcttctcagcggctggtccgacttacctagaaacttggcagagcagctgcctgtactttgcccttcctagaatcgccacccctcatcttggtgagcaactgtgggttccctagagactctggtatagtacgattgctgcccttcacctgtgcccactgatggttgtacccccaacttaaacacaacaaagatcccttgttaatatccaccaaatgcaaagtccctcgtggcctcttactgctagggtcaggaagacacttaaaaattccagttaagactccctagccaccagttaaacacattagccattgtcctggggggtcttcctgagctgcattgtgcctgtgtactgttcagagccctgctgttataggttctgactcatgggcccgccttgctgctttgggcaacttgaggctagcccagggccctttctctgcttctgattcctttctgccgaatgcctcccaagagctacaccagcagttactgggtaccgtatgactcttggccttgacatccctccctaggctggagtctggggttggggccccatttgtcctctgttttggctgaagatggggcgaagatttggctgagtggcctatgctgtcacatcaaacagctatcatttactcctacttgggaagttttcatgtgacaataaaagatacatctgattttt

SEQ ID NO: 296 - protein, 442 aa, Mus musculus
MELLSRVLLWKLLLLQSSAVLSSGPSGTAAASSSLVSESVVSLAAGTQAVLRCQSPRMVWTQDRLHDRQRVVHWDLSGGPGSQRRRLVDMYSAGEQRVYEPRDRDRLLLSPSAFHDGNFSLLIRAVDRGDEGVYTCNLHHHYCHLDESLAVRLEVTEDPLLSRAYWDGEKEVLVVAHGAPALMTCINRAHVWTDRHLEEAQQVVHWDRQLPGVSHDRADRLLDLYASGERRAYGPPFLRDRVSVNTNAFARGDFSLRIDELERADEGIYSCHLHHHYCGLHERRVFHLQVTEPAFEPPARASPGNGSGHSSAPSPDPTLTRGHSIINVIVPEDHTHFFQQLGYVLATLLLFILLLITVVLATRYRHSGGCKTSDKKAGKSKGKDVNMVEFAVATRDQAPYRTEDIQLDYKNNILKERAELAHSPLPAKDVDLDKEFRKEYCK

SEQ ID NO: 297 - DNA, 1897 bp, Mus musculus
agactctcgatttctcctcctactcctcctccgaggaattctgccccttgtaactgttctgccctcccctttaaaggttgacttgccctacggcgctccaccgcgctccagtcctcttgcgcctcctgctcaacccgctcctgactgccccacgccgcgtagttccagcagcaaagcagaagggtgcaccgggagatggagagcaaagccctgctcctggtggtcctgggagtttggctccagagtttgaccgccttccgaggaggggtggccgcagcagacgcgggaagagatttctcagacatcgaaagcaaatttgccctaaggacccctgaagacacagctgaggacacttgtcatctcattcctggattagcagactctgtgtctaactgccacttcaaccacagcagcaagaccttcgtggtgatccatggatggacggtaacgggaatgtatgagagttgggtgcccaaacttgtggccgccctgtacaagagagaacctgactccaatgtcattgtagtagactggttgtatcgggcccagcaacattatccagtgtcagctggctacaccaagctggtgggaaatgatgtggccagattcatcaactggatggaggaggagtttaactaccccctagacaacgtccacctcttagggtacagccttggagcccatgctgctggcgtagcaggaagtctgaccaataagaaggtcaatagaattactggtttggatccagctgggcctaactttgagtatgcagaagcccccagtcgcctttctcctgatgacgctgattttgtagatgtcttacacacatttaccagggggtcacctggtcgaagtattggaatccagaaaccagtagggcatgttgacatttatcccaatggaggcactttccagccaggatgcaacattggagaagccatccgtgtgattgcagagagaggactcggagacgtggaccagctggtgaagtgctcgcacgagcgctccattcatctcttcattgactccctgctgaatgaagaaaaccccagcaaggcatacaggtgcaactccaaggaagcctttgagaaagggctctgcctgagttgtagaaagaatcgctgtaacaatctgggctatgagatcaacaaggtcagagccaagagaagcagcaagatgtacctgaagactcgctctcagatgccctacaaagtgttccattaccaagtcaagattcacttttctgggactgaggatggcaagcaacacaaccaggccttcgagatttctctgtacggcacagtggccgagagcgagaacattcccttcaccctgcccgaggtttccacaaataaaacctactccttcttgatttacacggaggtggacatcggagaactgctcatgatgaagcttaagtggataagcgactcctacttcagctggcctgactggtggagcagccccagcttcgtcatcgagaggatccgagtgaaagccggagagactcagaaaaaggtcatcttctgtgctagggagaaagtttctcatctgcagaagggaaaggactcagcagtgtttgtgaaatgccatgacaagtctctgaagaagtctggctgacactggacaaacaaacaagagaagaaagcatctgagttctttgaagacagaagaaaacaaaatgggacaccgcatctggagactaagcatatatgcacatacacagaacaacgggaccaggaccagagcagaaatcagtttccacagttgctccaatgactgctgacccttggtgtcaatacccgaatatgtgtagtctctccctcatagatatatgtgaccaagagcatgctgaataagttatagcatattgttctaaaaactcaggttattgtag

SEQ ID NO: 298 - protein, 474 aa, Mus musculus
MESKALLLVVLGVWLQSLTAFRGGVAAADAGRDFSDIESKFALRTPEDTAEDTCHLIPGLADSVSNCHFNHSSKTFVVIHGWTVTGMYESWVPKLVAALYKREPDSNVIVVDWLYRAQQHYPVSAGYTKLVGNDVARFINWMEEEFNYPLDNVHLLGYSLGAHAAGVAGSLTNKKVNRITGLDPAGPNFEYAEAPSRLSPDDADFVDVLHTFTRGSPGRSIGIQKPVGHVDIYPNGGTFQPGCNIGEAIRVIAERGLGDVDQLVKCSHERSIHLFIDSLLNEENPSKAYRCNSKEAFEKGLCLSCRKNRCNNLGYEINKVRAKRSSKMYLKTRSQMPYKVFHYQVKIHFSGTEDGKQHNQAFEISLYGTVAESENIPFTLPEVSTNKTYSFLIYTEVDIGELLMMKLKWISDSYFSWPDWWSSPSFVIERIRVKAGETQKKVIFCAREKVSHLQKGKDSAVFVKCHDKSLKKSG

SEQ ID NO: 299 - DNA, 2118 bp, Mus musculus
gatttctcctcctactcctcctccgaggaattctgccccttgtaactgttctgccctcccctttaaaggttgacttgccctacggcgctccaccgcgctccagtcctcttgcgcctcctgctcaacccgctcctgactgccccacgccgcgtagttccagcagcaaagcagaagggtgcaccgggagatggagagcaaagccctgctcctggtggtcctgggagtttggctccagagtttgaccgccttccgaggaggggtggccgcagcagacgcgggaagagatttctcagacatcgaaagcaaatttgccctaaggacccctgaagacacagctgaggacacttgtcatctcattcctggattagcagactctgtgtctaactgccacttcaaccacagcagcaagaccttcgtggtgatccatggatggacggtaacgggaatgtatgagagttgggtgcccaaacttgtggccgccctgtacaagagagaacctgactccaatgtcattgtagtagactggttgtatcgggcccagcaacattatccagtgtcagctggctacaccaagctggtgggaaatgatgtggccagattcatcaactggatggaggaggagtttaactaccccctagacaacgtccacctcttagggtacagccttggagcccatgctgctggcgtagcaggaagtctgaccaataagaaggtcaatagaattactggtttggatccagctgggcctaactttgagtatgcagaagcccccagtcgcctttctcctgatgacgctgattttgtagatgtcttacacacatttaccagggggtcacctggtcgaagtattggaatccagaaaccagtagggcatgttgacatttatcccaatggaggcactttccagccaggatgcaacattggagaagccatccgtgtgattgcagagagaggactcggagacgtggaccagctggtgaagtgctcgcacgagcgctccattcatctcttcattgactccctgctgaatgaagaaaaccccagcaaggcatacaggtgcaactccaaggaagcctttgagaaagggctctgcctgagttgtagaaagaatcgctgtaacaatctgggctatgagatcaacaaggtcagagccaagagaagcagcaagatgtacctgaagactcgctctcagatgccctacaaagtgttccattaccaagtcaagattcacttttctgggactgaggatggcaagcaacacaaccaggccttcgagatttctctgtacggcacagtggccgagagcgagaacattcccttcaccctgcccgaggtttccacaaataaaacctactccttcttgatttacacggaggtggacatcggagaactgctcatgatgaagcttaagtggataagcgactcctacttcagctggcctgactggtggagcagccccagcttcgtcatcgagaggatccgagtgaaagccggagagactcagaaaaaggtcatcttctgtgctagggagaaagtttctcatctgcagaagggaaaggactcagcagtgtttgtgaaatgccatgacaagtctctgaagaagtctggctgacactggacaaacaaacaagagaagaaagcatctgagttctttgaagacagaagaaaacaaagtaaatttaatttaaaaaaataatacccttgtttgggtgtttgaaagtgggttttcctgagtattaatcccagctctatcttgttagttaaacagaagacagtctcaaatattaaacggtggctaacccagggtgaggaatctaatggcccatagcaggtcttccagcattagaagacagcaggcaggagaaacatgctgtcttgtatcccttaagaaggaatcatttgctcccaacaatataagactccatcatgtgacccatttggtcatggtctaaaattagtaagaactctgaggttttatattgagaccttttcaaagttttctcaaagtctaatatagacaatattttttgtggcataagtcaggtccatttctttagtgattgaaacacctggcctttgcaactagtttttttaccattgggatatattccccccccc

SEQ ID NO: 300 - protein, 474 aa, Mus musculus; identical to SEQ ID NO: 298

SEQ ID NO: 301 - DNA, 2481 bp, Mus musculus
atgggctcgggccgtcgcctccgcctggccgctctccagcccagactgtcacgggccacacggggtccacatcggcggcggcagcagcagcagcgtcctggggacggcccgaggccgcgtcccccggctgctgtcaggagctggcggcggaaatgaggcgctggccgttttccgagccggggtttcctgcctgagcgccgagaggccgtgcgacgccatgggccggccgggccccgacccgcagcttgcgcgcccggccgccccgcctcgctctccaccatgaacgagcccaccgtgcagccgtcccgcacatcctccgcacccgcctcgccggcatccccacgcggctggagcgacttctgcgagcagcacgcagcagcggcggcccgggagctggcccgccagtactggttgtttgcgcgcgcgcacccacagccgccgcgcgcggacctggtgtcgctgcagttcgcggagctcttccagcgccacttctgccgggaggtgcgcgagagcctcgcaggaccgccgggtcacgactaccgcgccactgctccgccccgccccgcgctgcccaaggcacgcagctccgaggacctgggcccgcggcccgcctgtgccctgcagcacctgcgccgcggcctgcgccagctcttccgccgccgctcggcaggggagctgcccggggctaccagtgacaccaatgacatcgacaccaccgcagccagcaggccgggcccggcccgcaagttgctaccctggggcctgcgagagccgcccactgaggcgctcaaggaggtcgtattgcgctatagcctggcggacgaggcagcaatggacagcggcgcacgctggcagcggggtcgcctggtgcttcggtctccaggtccgggccacagccactttctgcagctcttcgatccgcccaagagctcaaagcccaagctccaagaggcctgttccagcatccgggaggtccgaccatgtacacgcctggagatgcctgacaacctctacacctttgtgttgaaggtgcaggaccagacagacatcatctttgaggtgggagatgaacagcagctgaactcatggctggcagagctcagggcaagcacaggccttgggctggagcacccggacaccgagttacctctttccttagcggcagagcctggcccagctagatccccaaggggaagcactgactccctggaccaaggtgcttcacctggggtgttgctggacccagcctgccagaaaacagatcacttcctatcctgctacccctggttccacggccccatctccagggtgagggctgcacagctggtccagctccagggccctgatgcccacggcgtgttcctggtgcggcagagtgagtcccggagaggagagtatgtactcacattcaacttacagggcagagccaagcacttacgcctggtgctcacagagcgtggacagtgccgggtgcaacacctgcacttcccctcggtggtagatatgctccgccacttccagcgttctcctatcccactggaatgtggagcagcttgtgacgtccgactctctggctatgtggtagtcctctctcaggcaccaggttcctccaacaccgtcctcttccctttttcccttcctcactgggattcggagctgggtcatccccacctcagctctgttggctgtccccccagccatggtgcagaggctctccctggccaagtgacaccacctgagcagatcttccacctggtgccttctcctgaggaactggccaacagtctgcggcagctggagctcgagtctgtgagcagtgcccgggactcggactatgacatggactcctcttcacggggccaccttcgggccattgacaaccagtacacccctctctcacagctgtgcagagaggcagacgtgtgaatggaaccattttcctcccctccagagaactataggctgctgtcagccttccccagctcagatgtgccccgcttccaacacacacaaggctgtcacaggcttcctgtcagccagagctagcccccggctttctcccactgtttacagatgtagttcttgtgcacaggtgccactagctggtaccctaggcctagtccccaacccaaaaggaggtggggctacaggcccagagctggcagtggaaactgacagagctgatgacagacttcttaccaggcagggtcatcgggaagcacaaaacactaacagtccctggattctcacatggtgtccttccctgtagcttcagatctgtggcaagtcctcatgggttccatgccacaggcgatggatgcttcatgatcctgctcctactcttagctttacgacagaagctctgccagagggacaagcttaaagatcaaaattgatttaaacattttacctcagagtacttttttttgttttgttttaaaggattcaggtttccatttaatattaaagcttattcactgc

SEQ ID NO: 302 - protein, 548 aa, Mus musculus
MNEPTVQPSRTSSAPASPASPRGWSDFCEQHAAAAARELARQYWLFARAHPQPPRADLVSLQFAELFQRHFCREVRESLAGPPGHDYRATAPPRPALPKARSSEDLGPRPACALQHLRRGLRQLFRRRSAGELPGATSDTNDIDTTAASRPGPARKLLPWGLREPPTEALKEVVLRYSLADEAAMDSGARWQRGRLVLRSPGPGHSHFLQLFDPPKSSKPKLQEACSSIREVRPCTRLEMPDNLYTFVLKVQDQTDIIFEVGDEQQLNSWLAELRASTGLGLEHPDTELPLSLAAEPGPARSPRGSTDSLDQGASPGVLLDPACQKTDHFLSCYPWFHGPISRVRAAQLVQLQGPDAHGVFLVRQSESRRGEYVLTFNLQGRAKHLRLVLTERGQCRVQHLHFPSVVDMLRHFQRSPIPLECGAACDVRLSGYVVVLSQAPGSSNTVLFPFSLPHWDSELGHPHLSSVGCPPSHGAEALPGQVTPPEQIFHLVPSPEELANSLRQLELESVSSARDSDYDMDSSSRGHLRAIDNQYTPLSQLCREADV

SEQ ID NO: 303 - DNA, 3041 bp, Mus musculus
gtctcactttgcccgggtcccgggaggccgtcgacttatcctaggagctcggagcttttcttctgggcaaccagggcgcttccagacagagttcctgctgccacccaccacccccctctcagcacaggacaaggatggagctccattttggctcctgcctctccggctgtttggctctgcttgtcttgctgccttccctgagcctagcacagtacgagggctggccctaccagctccagtaccctgagtacttccagcagcccgctcctgagcaccatcagcggcaggtgccctccgatgtggtcaagatccaggtccgcctggcgggccagaagaggaagcacaatgagggccgcgtggaggtctactacgaaggccagtggggcacggtgtgcgacgatgacttctcgatccatgccgcccatgtggtctgccggcaagtgggctatgtagaggccaagtcctgggctgccagctcctcctacggtccaggcgaaggccccatctggttggacaatatctactgtactggcaaagagtcgaccctggcatcttgctcctccaatggctggggtgtcactgactgcaagcacactgaagacgttggagtggtgtgtagtgagaaaagaattcctggcttcaaatttgacaattcgttgatcaaccaaatagagagcctaaatatacaggtggaagacatccggattcggcccatcctttctgcctttcgccatcgcaagcctgtgacagagggctacgtggaggtgaaggagggcaaggcttggaagcagatctgcaacaaacactggacagccaagaattcccacgtggtctgtggcatgttcggcttccctgcagagaagacctacaaccccaaagcctataaaacctttgcctcgcggaggaagctgcgttactggaagttttctatgaactgcacgggcactgaagcgcatatctccagctgcaagctgggcccttccgtgacccgggaccctgtgaagaacgccacctgtgagaacgggcagccagctgtggtcagttgtgtgcctagccagatcttcagccccgatggaccctcaaggttccggaaagcctacaagccagagcaacccttggtgcgcctgagaggtggagcccaggtcggggagggccgagtggaggtgctgaagaatggagaatggggaaccatctgcgatgacaagtgggacctggtatctgccagtgtggtctgccgagagctgggctttgggaccgctaaagaggccatcacaggctccagactagggcaagggattgggcccatccatctcaatgaagtccagtgcacagggactgagaagtccatcatagactgcaaattcaacacagagtctcaaggctgcaaccatgaagaagatgccggggtgcgatgcaacatccccatcatgggtttccagaaaaaggtgcgcctgaatggaggccgcaatccttatgagggccgagtggaggtgctaacagagagaaatgggtcccttgtttgggggactgtatgcggccagaactggggcattgtggaagccatggtggtctgccggcagctaggcctgggctttgccagcaatgcctttcaggagacctggtactggcatggaaatatcttcgccaacaacgtggtcatgagtggagtgaagtgctcaggaacggagctgtccctagcacactgccgccatgacgaggaggtggcctgccccgagggcggggtgcggtttggtgctggagtcgcctgctcggaaactgcacctgacctggtgcttaatgctgagattgtccagcagactgcctacctggaggacaggcccatgtccttgctgcagtgtgccatggaggagaactgcctctccgcctccgctgtgcacaccgaccccaccagaggccaccggcgccttttacgcttctcctcccagatccacaacaatggccagtctgacttccgccccaagaatggccgccatgcgtggatttggcacgactgccacaggcactaccacagcatggaagtcttcacttactatgacctgctgagcctcaacggcaccaaggtggctgagggccacaaggccagcttctgcctggaggacactgagtgtgagggagacattcagaagagttacgagtgtgccaactttggagaacaaggcatcaccatgggctgctgggacatgtaccgtcatgacattgactgccagtggatagacatcaccgatgtgccccctggagactacctgttccaggttgtcattaaccccaactatgaagtgccagaatcagatttctctaacaacatcatgaagtgcaggagccgctatgatggctaccgcatctggatgtacaactgtcacgtaggtggagccttcagtgaggagacagaacagaagttcgaacacttcagtggacttctaaataaccagctctctgtacagtaaagaagatcctgggccaggcatgatggctcatgcctgtaatccctgcactcatgctgaggcaggaggattgccacaagatttccactctggacattaaaccaagcttcagtttcaaaagaaatgaatgaaagaaaggaaggaaggaaggaaggaaggaaggaaggaaggaaggaaggaaggaagaaaggggaaagggaaagggaagaaaaatgacttaatggtcacttactgactcctgggggaatactgattaccacctcttttctagccagatccagctgagaagaaaggtgctcattcactccccagacactgccgtgtgtccctgtcctgaggccttaggggcagggctcgggcacatggccatggaaacttgatgacaagcttagagcagcttatcccatccgagctttggcatgtcccaagtgtgacatcatctgtgctctgcacagaggggccgttttcttctgggaacacagcaggcatgaactcagcaactgcagaggtgatcgggctgaactccgtttttccccttcttaggtcatttctggaaaacttgaatatcaagacctctgt

SEQ ID NO: 304 - protein, 776 aa, Mus musculus
MELHFGSCLSGCLALLVLLPSLSLAQYEGWPYQLQYPEYFQQPAPEHHQRQVPSDVVKIQVRLAGQKRKHNEGRVEVYYEGQWGTVCDDDFSIHAAHVVCRQVGYVEAKSWAASSSYGPGEGPIWLDNIYCTGKESTLASCSSNGWGVTDCKHTEDVGVVCSEKRIPGFKFDNSLINQIESLNIQVEDIRIRPILSAFRHRKPVTEGYVEVKEGKAWKQICNKHWTAKNSHVVCGMFGFPAEKTYNPKAYKTFASRRKLRYWKFSMNCTGTEAHISSCKLGPSVTRDPVKNATCENGQPAVVSCVPSQIFSPDGPSRFRKAYKPEQPLVRLRGGAQVGEGRVEVLKNGEWGTICDDKWDLVSASVVCRELGFGTAKEAITGSRLGQGIGPIHLNEVQCTGTEKSIIDCKFNTESQGCNHEEDAGVRCNIPIMGFQKKVRLNGGRNPYEGRVEVLTERNGSLVWGTVCGQNWGIVEAMVVCRQLGLGFASNAFQETWYWHGNIFANNVVMSGVKCSGTELSLAHCRHDEEVACPEGGVRFGAGVACSETAPDLVLNAEIVQQTAYLEDRPMSLLQCAMEENCLSASAVHTDPTRGHRRLLRFSSQIHNNGQSDFRPKNGRHAWIWHDCHRHYHSMEVFTYYDLLSLNGTKVAEGHKASFCLEDTECEGDIQKSYECANFGEQGITMGCWDMYRHDIDCQWIDITDVPPGDYLFQVVINPNYEVPESDFSNNIMKCRSRYDGYRIWMYNCHVGGAFSEETEQKFEHFSGLLNNQLSVQ

SEQ ID NO: 305 - DNA, 1495 bp, Mus musculus
agggaagccaagacttcacacagttctgattgtcccagaagccttgcgtttgtcaaaacatgacaatgagatatgaaaacttccagaacttggagcgggaagagaaaaaccaggagatgagaaatggtgacaagaaaggaggaatggagtctccaaagtttgctctaattccttcccagtccttcctgtggcgcatcctctcttggacccacctcctcctgttctccctgggcctcagcctcctgctactggtggtcatctccgtgattggatcccaaaattcccagttaaggagggacctaggcaccctaagagccattttagacaacaccacctccaagataaaggctgaattccagtccctggactccagggctgacaacttcgaaaaagggatcagttctctgaaagtggatgtggaggatcacaggcaggaactgcaggcaggccgagacttgagccagaaggtgacttctctggagagcacactggagaagagggagcaggctctcaaaacagatctgtctgatttaaccgaccatgtacaacagctggagacagacttgaaggccttgacgtgccagctggccaacctcaagaacaatggctcggaagtggcctgctgcccgcttcactggacggagcatgaaggcagctgctattggttctctgagtctgagaagtcgtggcctgaagctgacaagtactgccggctggagaattctcacctggtggtggtcaactccctggaggagcagaattttctacagaatcgcttagccaatgtgcttagctggatgggcctaacggaccaaaatgggccctggcgatgggtggatgggaccgactttgacaaaggtttcaagaattggaggccactgcagccggataactggcatggacatatgctaggtggaggcgaggactgtgcccacttttcttacgatggtcgttggaatgacgatgtctgccagaggcattaccattggatctgtgaaacagagctgggcaaagccagctcagcccactccccacaacttatagcctcagttccataagcctcagatacctgacgttggtaatcactctatcttggtatctccaccatctgggggaggggtgttttttgctagtactttaaggggtagataaaggatggtatctgaggaatgtgttatggtgattagaaagctgacactgtgtacagtgttcagcctgtgattgtcaagtaattttttagagtaaaaagaaagaaatataggggggctgtgtagtctcccctcccccagcctgaaacctgcttgctcaggggtggagcttcctgctcattcgttctatcacgcccactgttggaacctgccactttgctgttcagagccacacacgtgctcacctttctactggaccagagattattcggcgggaatcgggtcccctcctccttccttcataactagtgtcgcaacaataaaatttgagctttaatcaaaataaa

SEQ ID NO: 306 - protein, 332 aa, Mus musculus
MTMRYENFQNLEREEKNQEMRNGDKKGGMESPKFALIPSQSFLWRILSWTHLLLFSLGLSLLLLVVISVIGSQNSQLRRDLGTLRAILDNTTSKIKAEFQSLDSRADNFEKGISSLKVDVEDHRQELQAGRDLSQKVTSLESTLEKREQALKTDLSDLTDHVQQLETDLKALTCQLANLKNNGSEVACCPLHWTEHEGSCYWFSESEKSWPEADKYCRLENSHLVVVNSLEEQNFLQNRLANVLSWMGLTDQNGPWRWVDGTDFDKGFKNWRPLQPDNWHGHMLGGGEDCAHFSYDGRWNDDVCQRHYHWICETELGKASSAHSPQLIASVP

SEQ ID NO: 307 - DNA, 5084 bp, Mus musculus
gaccttggactgagcaaaggggcaacctggggacctggttgtattctttgcctttcccagtctccctcttctccctcattggaagatccactctgggccatgaggcttctcctgcttctggcttttatctctgtcatccctgtctctgttcagctattggacgcgaggcaatttttaatctataatgaagatcacaagcgctgcgtggacgctctaagtgccatctcagttcagacggcaacttgcaacccggaagctgaatcccagaaattccgctgggtgtcagattctcagatcatgagtgttgctttcaaattatgtttgggagtgccatcaaaaactgactgggcttccgtcaccctgtatgcctgtgattcgaaaagtgaatatcagaaatgggagtgtaagaatgacacactctttggaatcaagggcacagagttatattttaattatggcaacagacaagagaagaatatcaagctttacaaaggttcgggattgtggagcagatggaaggtctatggaaccacggatgacctgtgctcgagaggatatgaagccatgtactccttactgggcaatgcaaatggagccgtctgtgcatttccattcaagtttgaaaacaagtggtatgcagactgcacctctgccgggcgctcggacggatggctctggtgtggaaccaccactgactacgacaaagacaagctgtttggattttgtccattgcactttgagggaagcgagagattatggaacaaagatccactgactggcattctttaccagataaactccaagtctgctttaacctggcatcaggcaagggcaagctgcaagcagcagaatgctgacctcctgagtgtcacggagatccacgagcaaatgtacctcacaggattaaccagttccttgagctcgggactctggattggactcaacagtctgagtgtacgcagtggttggcagtgggctggaggaagcccattccggtatctgaactggctaccaggaagtccatcatcagagcctggaaagagctgtgtgtcactaaaccctggaaaaaatgccaagtgggaaaatctggaatgtgttcagaagcttggctacatttgtaaaaagggaaacaataccttgaacccatttatcattccctcagcaagcgatgtgcctaccggctgccctaatcagtggtggccctatgcaggccactgctacaggatccatagggaagagaagaagatccagaaatatgctttgcaagcttgtaggaaggagggtggggacctggcaagtatccacagcattgaggagtttgacttcatcttctcccagctcggatatgagccaaatgatgagctgtggattggtttaaatgacatcaagattcagatgtactttgagtggagtgatggaaccccagtgacatttactaaatggcttcctggagagccaagccatgagaacaacagacaggaggactgcgtggttatgaaaggcaaggatggatactgggcggacagagcctgtgagcaaccactaggttacatctgtaagatggtatcacaaagccatgctgtagtaccggagggtgcagacaaaggctgccggaaaggctggaaacggcatgggttttactgctacttgattggatccactctatccaccttcactgatgcaaaccacacatgcacaaatgaaaaggcttatttaacaacagttgaagacagatatgaacaagcattcctgactagtttggttggattgaggcctgaaaaatatttttggacaggactctcagatgttcaaaacaaagggacgtttcggtggactgtggacgagcaggtgcagtttacacactggaatgccgacatgccaggacgaaaggcgggatgtgttgccatgaaaaccggagtggcaggtggcttatgggatgttttgagttgtgaagaaaaggcaaaatttgtgtgcaaacattgggcagaaggagtgactcgcccaccagagcccacaacaactcctgaacccaaatgtccagaaaactggggtaccaccagtaaaaccagcatgtgtttcaaactgtatgcaaaaggaaagcatgaaaagaaaacgtggtttgaatctcgagatttttgcaaagctataggtggagagctggcgagcatcaagagtaaagatgaacagcaagtgatttggaggctgattacgagcagtggaagctaccatgagctgttttggttgggactgacctatggaagtccttcagaggggttcacctggagtgatggttctcccgtttcctatgaaaattgggcttacggtgaaccaaataattaccaaaatgttgaatattgtggtgagctgaaaggtgaccctggcatgtcctggaatgatatcaactgtgaacacctcaacaactggatttgtcagatacaaaaagggaaaacactactacctgagcccacacctgctccacaagacaatccaccagttactgcagatgggtgggttatttacaaagactaccagtactattttagcaaagagaaggaaaccatggacaacgcgcgagcattttgcaagaagaattttggtgatcttgctacaattaaaagtgaaagtgaaaagaagtttctatggaaatatataaacaagaatggtgggcagtcaccatattttattggcatgttaatcagcatggataagaaattcatttggatggatgggagcaaagtagattttgtggcttgggctacaggagaacccaactttgcaaatgatgatgaaaactgtgtaacgatgtacacaaattcagggttctggaatgacatcaactgtggttatccaaataacttcatctgccagagacataacagcagcatcaatgccactgccatgcctaccacacccacgacaccaggtggctgcaaggaaggttggcatttgtacaagaacaagtgctttaaaatttttggatttgctaatgaagaaaaaaaaagctggcaagacgcacggcaagcttgcaaaggactgaaaggaaacctggtgtccatagaaaatgcacaagagcaagcatttgttacctatcacatgagagactccactttcaatgcctggactgggctgaatgatatcaacgcagaacacatgttcctgtggacagctggacaaggagttcattatacaaactgggggaaaggctatcctggtggaagaagaagtagcctatcttatgaagatgctgactgtgtagttgtgattggtggcaattcacgagaggcagggacctggatggatgacacctgtgacagtaaacaaggctatatatgtcaaacacagactgacccttccctgcctgtttctccaaccactactccaaaagatggctttgttacatatgggaaaagcagctattcccttatgaaattgaagctaccatggcatgaagcagagacatattgcaaggatcatacttccctgcttgctagcattctagacccctacagtaatgcatttgcatggatgaaaatgcacccatttaatgtacccatatggattgccctgaacagcaacttgaccaataatgaatatacttggacggatagatggagggtgcggtacactaactggggtgctgacgagccgaagcttaagtcagcatgtgtttacatggatgttgatggctactggagaacatcatactgcaatgaaagtttttattttctctgcaaaaaatcagacgaaatccctgctactgaacctcctcaactgcctggcaagtgtccagagtcagaacagactgcgtggattcctttctatggccattgctactattttgaatcttcttttacgagaagttggggtcaggcttctctggaatgccttcgaatgggtgcctccctggtttccatcgagactgctgctgagtccagttttctgtcataccgtgttgaacctcttaaaagtaaaaccaatttttggataggcatgttccgaaatgttgaagggaagtggctttggttgaacgacaatcctgtctcctttgtcaactggaaaacaggcgatccctctggtgaacggaatgattgtgtagttctagcttcatcttcgggcctttggaataatatccactgttcttcgtacaaaggatttatttgtaaaatgccaaaaattattgatcctgtaactacacactcatccattacaaccaaagctgaccaaaggaagatggatcctcaacccaagggctcttctaaagcagcaggagtggtcaccgtggtcctcctgattgtgataggtgccggcgttgcagcctatttcttttataagaaaaggcatgcgttgcacatacctcaagaggccacctttgaaaacactctctacttcaacagtaatctgagtccaggaacaagtgacacgaaagatctcatgggcaacatcgagcagaatgagcatgcgatcatttagcatcctaatctgactgtctcatattcgaagttcaagaagtctgaactaaagttttcaattttttaattcaatatgattgtttctttttttaaaaaaaattagcactgggttgcattggtttgtcctttttcttcgcctaattgaacaataattgctcatttactatcctggcaagattagagaaacaaaaaacagaagagggataataatgttgattgttgattgccacttttgaagatacctttgatgaatacacagcactagcgtcttaacactgctacactggtggtaggtctcatgtcaaccctgcagatttcaagagttctagaaacaaccacgtaagccactcagggtattttcaggacctcccagagatatgttatacaccgaattgtaattcaacatttaaaagtccatgttaaaatagacaagtccacataaccccagattgaataagaatgtattcaggtctttttcagcagtcctgattcatgtcagttattgagaactgtatttatccacatgtagaataataaagctactgagaatcttgtttgtcccaggcaaggtttgacaggctgaatattgcaaatgtgttctgtgttctgttgtat

SEQ ID NO: 308 - protein, 1456 aa, Mus musculus
MRLLLLLAFISVIPVSVQLLDARQFLIYNEDHKRCVDALSAISVQTATCNPEAESQKFRWVSDSQIMSVAFKLCLGVPSKTDWASVTLYACDSKSEYQKWECKNDTLFGIKGTELYFNYGNRQEKNIKLYKGSGLWSRWKVYGTTDDLCSRGYEAMYSLLGNANGAVCAFPFKFENKWYADCTSAGRSDGWLWCGTTTDYDKDKLFGFCPLHFEGSERLWNKDPLTGILYQINSKSALTWHQARASCKQQNADLLSVTEIHEQMYLTGLTSSLSSGLWIGLNSLSVRSGWQWAGGSPFRYLNWLPGSPSSEPGKSCVSLNPGKNAKWENLECVQKLGYICKKGNNTLNPFIIPSASDVPTGCPNQWWPYAGHCYRIHREEKKIQKYALQACRKEGGDLASIHSIEEFDFIFSQLGYEPNDELWIGLNDIKIQMYFEWSDGTPVTFTKWLPGEPSHENNRQEDCVVMKGKDGYWADRACEQPLGYICKMVSQSHAVVPEGADKGCRKGWKRHGFYCYLIGSTLSTFTDANHTCTNEKAYLTTVEDRYEQAFLTSLVGLRPEKYFWTGLSDVQNKGTFRWTVDEQVQFTHWNADMPGRKAGCVAMKTGVAGGLWDVLSCEEKAKFVCKHWAEGVTRPPEPTTTPEPKCPENWGTTSKTSMCFKLYAKGKHEKKTWFESRDFCKAIGGELASIKSKDEQQVIWRLITSSGSYHELFWLGLTYGSPSEGFTWSDGSPVSYENWAYGEPNNYQNVEYCGELKGDPGMSWNDINCEHLNNWICQIQKGKTLLPEPTPAPQDNPPVTADGWVIYKDYQYYFSKEKETMDNARAFCKKNFGDLATIKSESEKKFLWKYINKNGGQSPYFIGMLISMDKKFIWMDGSKVDFVAWATGEPNFANDDENCVTMYTNSGFWNDINCGYPNNFICQRHNSSINATAMPTTPTTPGGCKEGWHLYKNKCFKIFGFANEEKKSWQDARQACKGLKGNLVSIENAQEQAFVTYHMRDSTFNAWTGLNDINAEHMFLWTAGQGVHYTNWGKGYPGGRRSSLSYEDADCVVVIGGNSREAGTWMDDTCDSKQGYICQTQTDPSLPVSPTTTPKDGFVTYGKSSYSLMKLKLPWHEAETYCKDHTSLLASILDPYSNAFAWMKMHPFNVPIWIALNSNLTNNEYTWTDRWRVRYTNWGADEPKLKSACVYMDVDGYWRTSYCNESFYFLCKKSDEIPATEPPQLPGKCPESEQTAWIPFYGHCYYFESSFTRSWGQASLECLRMGASLVSIETAAESSFLSYRVEPLKSKTNFWIGMFRNVEGKWLWLNDNPVSFVNWKTGDPSGERNDCVVLASSSGLWNNIHCSSYKGFICKMPKIIDPVTTHSSITTKADQRKMDPQPKGSSKAAGVVTVVLLIVIGAGVAAYFFYKKRHALHIPQEATFENTLYFNSNLSPGTSDTKDLMGNIEQNEHAII

SEQ ID NO: 309 - DNA, 4582 bp, Mus musculus
tgcgatcccctcgccggcggtcatctgagcacagcgctagggctgtctctgcacgcagccctgccgtgcgccctccgtactctcgtcctccgagcgccgcagggatggtacccatccgacctgccctcgcgccctggcctcgtcacctgctgcgctgcgtcttgcttctcgggggactgcgtctcggccacccggcggactccgccgccgccctcctggagcctgatgtcttcctcatcttcagccaggggatgcagggctgtctggaggcccagggtgtgcaggtccgagtcaccccagtctgcaatgccagtctccctgcccagcgctggaagtgggtctcccggaaccgactcttcaacctgggtgccacacagtgcctgggtacaggctggccagtcaccaacaccacagtttccttgggcatgtatgagtgtgacagagaggccttgagtcttatggcagtgtcgtacactaggggaccagttgtccctgcttctgggggctcgtgcaagcaatgcatccaagcctggcacgagcgcggtgaccagacccgcagtggccattggaacatctatggcagtgaagaagacctatgtgctcgaccttactatgaggtctacaccatccagggaaactcacacggaaagccgtgcactatccccttcaaatacgacaaccagtggttccacggctgcaccagcactggcagagaagatgggcacctgtggtgtgccaccacccaggactacggcaaagatgagcgctggggcttctgccccatcaagagtaacgactgtgagaccttctgggacaaagaccagctgactgacagctgttaccagtttaacttccaatccacactgtcctggagggaggcctgggccagctgcgagcagcagggtgcagacttgctgagtatcacggagatccacgagcagacctacatcaacgggctcctcacgggctacagctccacgctatggattggccttaatgacctggataccagtggaggctggcagtggtcagacaactcacccctcaagtacctcaactgggagagtgatcagccggacaacccaggtgaggagaactgtggagtgatccggactgagtcctcaggcggctggcagaaccatgactgcagcatcgccctgccctatgtttgcaagaagaaacccaacgctacggtcgagcccatccagccagaccggtggaccaatgtcaaggtggaatgtgaccccagctggcagcccttccagggccactgctaccgcctgcaggccgagaagcgcagctggcaggagtccaagagggcgtgtctgcggggtgggggtgacctccttagcatccacagcatggctgagctggagttcatcaccaaacagatcaagcaagaggtggaggagctatggattggcctcaatgatttgaaactgcagatgaattttgagtggtccgacgggagcctcgtgagcttcacccactggcacccctttgagcccaacaactttcgtgacagcctggaggactgtgtcaccatctgggggccggaaggacgctggaacgacagtccctgtaaccagtccttgccatccatttgcaagaaggcaggccggctgagccagggcgctgcggaggaggaccacggctgccggaagggttggacgtggcatagcccatcctgctactggctgggagaggaccaagtgatctacagtgatgcccggcgcctgtgtactgaccatggctctcagctggtcaccatcaccaacaggtttgagcaggccttcgtcagcagcctcatctataactgggagggcgaatacttctggacagccctgcaagacctcaacagtactggctccttccgttggctcagtggggatgaagtcatatatacccattggaatcgagaccagcctgggtacagacgtggaggctgtgtggctctggccactggcagtgccatgggactgtgggaggtgaagaactgcacatcgttccgggctcgctacatctgccgacagagcctgggcacaccggtcacaccagagctgcctgggccagaccccacgcccagcctcactggctcctgtccccagggctgggtctcagaccccaaactccgacactgctataaggtgttcagctcagagcggctgcaggagaagaagagttggatccaggccctgggggtctgccgggagttgggggcccagctgctgagtctggccagctatgaggaggagcactttgtggcccacatgctcaacaagatctttggtgagtcagagcctgagagccatgagcagcactggttttggattggcctgaaccgcagagaccctagagagggtcacagctggcgctggagcgacggtctagggttttcctaccacaattttgcccggagccgacatgatgacgatgatatccgaggctgtgcagtgctggacctggcctccctgcagtgggtacccatgcagtgccagacgcagcttgactggatctgcaagatccctagaggtgtggatgtgcgggaaccagacattggtcgacaaggccgtctggagtgggtacgctttcaggaggccgagtacaagttttttgagcaccactcctcgtgggcgcaggcacagcgcatctgcacctggttccaggcagatctgacctccgttcacagccaagcagaactggacttcctggggcaaaacctgcagaagctgtcctcagaccaggagcagcactggtggatcggcctgcacaccttggagagtgacggacgcttcaggtggacagatggttctattataaacttcatctcttgggcaccgggaaaacctagacccattggcaaggacaagaagtgtgtatacatgacagccagacaagaggactggggggaccagaggtgccatacggctttgccctacatctgtaagcgcagcaatagctctggagagactcagccccaagacttgccaccttcagccttaggaggctgcccctccggttggaaccagttcctcaataagtgtttccgaatccagggccaggacccccaggacagggtgaaatggtcagaggcacagttctcctgtgaacagcaagaagcccagctggtcaccattgcaaaccccttagagcaagcatttatcacagccagcctccccaacgtgacctttgacctttggattggcctgcatgcctctcagagggacttccagtggattgaacaagaacccctgctctataccaactgggcaccaggagagccctctggccccagccctgctcccagtggcaccaagccgaccagctgtgcggtgatcctgcacagcccctcagcccacttcactggccgctgggatgatcggagctgcacagaggagacgcatggcttcatctgccagaagggcacagacccctcgctaagcccatccccagcagcaacaccccctgccccgggcgctgagctctcctatctcaaccacaccttccggctgctgcagaagccactgcgctggaaagatgctctcctgctgtgtgagagccgaaatgccagcctggcacacgtgcccgatccctacacacaagccttcctcacacaggctgcacgggggctgcaaacaccactgtggatcgggctggccagtgaggagggctcacggaggtattcctggctctcagaggagcctctgaattatgtgagctggcaagatgaggagccccagcactcgggaggctgtgcctacgtggatgtggatggaacctggcgcaccaccagctgtgataccaagctgcagggggcagtgtgtggggtgagcagggggcccccaccccgaaggataaactaccgtggcagctgtcctcagggcttggctgactcgtcctggattcccttcagggagcattgctattctttccacatggaggtgctgttgggccacaaggaggcgctgcagcgctgtcagaaagctggtgggacggttctgtccattcttgatgagatggagaatgtgtttgtctgggagcacctgcagacagctgaagcccaaagtcgaggtgcctggttgggcatgaacttcaaccccaaaggaggcacgctggtctggcaagacaacacagctgtgaactattctaactgggggccccctggcctgggccctagcatgctaagccacaacagctgctactggatccagagcagcagcggactgtggcgccccggggcttgtaccaacatcaccatgggagttgtctgcaagctccctagagtggaagagaacagcttcttgccatcagcagccctccccgagagcccggttgccctggtggtggtgctgacagcggtgctgctcctcctggccttgatgacggcagccctcatcctctaccggcgccgacagagtgcggagcgtgggtccttcgagggggcccgctacagtcgcagcagccactctggccccgcagaggccaccgagaagaacattctggtgtctgacatggaaatgaacgaacagcaagaatagagccaagggcgtggtcggggtggagccaaagcgggggaggcagg

SEQ ID NO: 310 - protein, 1477 aa, Mus musculus
MVPIRPALAPWPRHLLRCVLLLGGLRLGHPADSAAALLEPDVFLIFSQGMQGCLEAQGVQVRVTPVCNASLPAQRWKWVSRNRLFNLGATQCLGTGWPVTNTTVSLGMYECDREALSLMAVSYTRGPVVPASGGSCKQCIQAWHERGDQTRSGHWNIYGSEEDLCARPYYEVYTIQGNSHGKPCTIPFKYDNQWFHGCTSTGREDGHLWCATTQDYGKDERWGFCPIKSNDCETFWDKDQLTDSCYQFNFQSTLSWREAWASCEQQGADLLSITEIHEQTYINGLLTGYSSTLWIGLNDLDTSGGWQWSDNSPLKYLNWESDQPDNPGEENCGVIRTESSGGWQNHDCSIALPYVCKKKPNATVEPIQPDRWTNVKVECDPSWQPFQGHCYRLQAEKRSWQESKRACLRGGGDLLSIHSMAELEFITKQIKQEVEELWIGLNDLKLQMNFEWSDGSLVSFTHWHPFEPNNFRDSLEDCVTIWGPEGRWNDSPCNQSLPSICKKAGRLSQGAAEEDHGCRKGWTWHSPSCYWLGEDQVIYSDARRLCTDHGSQLVTITNRFEQAFVSSLIYNWEGEYFWTALQDLNSTGSFRWLSGDEVIYTHWNRDQPGYRRGGCVALATGSAMGLWEVKNCTSFRARYICRQSLGTPVTPELPGPDPTPSLTGSCPQGWVSDPKLRHCYKVFSSERLQEKKSWIQALGVCRELGAQLLSLASYEEEHFVAHMLNKIFGESEPESHEQHWFWIGLNRRDPREGHSWRWSDGLGFSYHNFARSRHDDDDIRGCAVLDLASLQWVPMQCQTQLDWICKIPRGVDVREPDIGRQGRLEWVRFQEAEYKFFEHHSSWAQAQRICTWFQADLTSVHSQAELDFLGQNLQKLSSDQEQHWWIGLHTLESDGRFRWTDGSIINFISWAPGKPRPIGKDKKCVYMTARQEDWGDQRCHTALPYICKRSNSSGETQPQDLPPSALGGCPSGWNQFLNKCFRIQGQDPQDRVKWSEAQFSCEQQEAQLVTIANPLEQAFITASLPNVTFDLWIGLHASQRDFQWIEQEPLLYTNWAPGEPSGPSPAPSGTKPTSCAVILHSPSAHFTGRWDDRSCTEETHGFICQKGTDPSLSPSPAATPPAPGAELSYLNHTFRLLQKPLRWKDALLLCESRNASLAHVPDPYTQAFLTQAARGLQTPLWIGLASEEGSRRYSWLSEEPLNYVSWQDEEPQHSGGCAYVDVDGTWRTTSCDTKLQGAVCGVSRGPPPRRINYRGSCPQGLADSSWIPFREHCYSFHMEVLLGHKEALQRCQKAGGTVLSILDEMENVFVWEHLQTAEAQSRGAWLGMNFNPKGGTLVWQDNTAVNYSNWGPPGLGPSMLSHNSCYWIQSSSGLWRPGACTNITMGVVCKLPRVEENSFLPSAALPESPVALVVVLTAVLLLLALMTAALILYRRRQSAERGSFEGARYSRSSHSGPAEATEKNILVSDMEMNEQQE

SEQ ID NO: 311 - DNA, 3025 bp, Mus musculus
gtgccgatgagaagcagcgctgaggacttgaagtagagggaggagggcaggcctcggagcagcgggagcagcgggagcagcgggagcagcgggagcagcgggagcagcgggagcagcgggagcagcgggcccgggctcgggccgcccccgcgagcaaggcgccgccattccgctgctcggggcgccgccgccgccgccgccgcgtccgggggccatgctcccgccgcccccgcgccagccgccgccccaggcgcgcacggcccgcggctccctgcgcctgcagcgggctttcctgcgcggcccgctgggcgtgctgcggctgctgcagctgctggccggagccgccttctggatcaccattgccaccagcaagtaccagggcccggtgcacttcgcgctcttcgtgtccgtgctcttctggctgctcaccctggggctctacttcatcacgctgttgggcaagcaggagctggtgcccgtgctgggctcgcgctggctcgtggtcaacgtggcgcacgacctgctggcggctgctctctacggggcggcgacgggcatcatgatcgaccagacgcagcgccacagctactgcaacctcaagaactaccggctgccctgcgcctaccatgccttcctggcggcctctgtctgcggcggcctctgcctcggcctctacctactctcggcactctacggctgctgccgtcgctaccagggcaaggaggaggtggtgtgaggccacccgctccaccgcggcccagatcggtttagggaatccctcccgaacccttcctgccgccgcctagtgccggtgtgcccctgcaccctctccctgcctgcgtttccactgcccgcgccctggatccccgacgttcagttctagtctgactgctgtaccgcagctcagcccagatatcagcttccagggacccacgcagccatccgaggcgccgacgcacacacccagttgggccgcttcaggcgaagcctggaagtccctttcctcattccctgtcgagagctagacgtggacaggcgccgccgcgtagatccgggggaggctcccaaattggaaccagtctttggactgcgccattgccccctccctcctgccctgcagtcggaagagcatcccttccctgccccctcttccagcctagggaggtgtagaatgcagtcaggcagctgcaagaggagctggggacaggctttagctagtgctaggatggatgatggatgacgtctttagttgtagtttggctctctccctgcgcagccctacgtctacgaagtctttgggtggagtcagctacagaagtggtggatagcaaaggcctgctggctataccttacttaacgacgcaagtcttctctccgcctaaatccttggtgttcattcagattgggccaactgtactaacttccctggcctctcagatgtcactcactagcttccgccgcactccacctataaatatgtttgcattggggatcccacgtggccaacggcgatcattaaggtgctgcccacctctttgggaacccagatcccgctcttccaaacagctgttctaatattagaagcacactctttcctctaaagcagtgggttgtctagggagccagtactgtgttacttcccaaagaaggggtagaaggcaaacgggtctgtcaatggtgctgccttcccgagcacattcacaatgtttgttagcacaatgcggtctctctgagaagttctgcaggtatcgcagccacacatggtaattcagttcactggagtaactattgggcctaagccatccccaccgcaagactgtgtctatgctgtctaggtcatgcctacaggttgacccactgaaaattaggaagctcttttttccctaactctaactgggggtccacccagtgacaaaggagctaggaccccctccctagctagagacctgagaagagttgaatattcattcacgttgttggaaacaagaagccaaggatatccagatgatcccccaattcaaagagatcctggcattgactctgagcagctggtgcggtgagttctgtctgccaccaaattgagaactatctggacctggggtggacagctggtgccacctctaaggtttccatgttgctgaggcctccaagattctcagagcagtcagaatggccctgcctgattggctgaactggtctccctgggaccagcagaaggtttggcagtcttcgctgcttcggggcagtggggaacaaacagtctcttttgcaagtgtctagtggaagagccgtggtagagaagacttgatttctttcttgatacaagaggattcccaagctcttatgttatcatttaggcacaagatctggtcacttgggactgaactctgcccatctcccattgcctaaatgacaggtgtcagttctggctcccattccttacctgtttgcctttcttagatcaccgtctaagctcaggtccagtcccctcaggataggctcagtcccagcgctctgggtctgaggccagcacaccttactcaggagcacacgtcttggcctctctggtgcctcatctaccctcgcgtgcctatagcactcgggagctcacgagctcttctccacgtgccttccagctttgactccagcagcgggcatggcggtccctccgtttgccactcgtgagaagcacagataagattattataatacccacctttcctcaaacggcatagtatgatcgccctgctgtggcccagagcatttggaaactggtagcactctccctggcttatctctctgacaccaggactggggccaggccaagaccacccagacagctccccaccataagtctggggtctcttgtgggcccaggagacaatttctacagtgtggacaaaggccaggcagggtgggttttggtgtagggagggtagttacagagaggggccatgtgccttatccagtagtgtattcatggtcaccccagtatgcttttttggaataaagtttgttttgtctg

SEQ ID NO: 312 - protein, 173 aa, Mus musculus
MLPPPPRQPPPQARTARGSLRLQRAFLRGPLGVLRLLQLLAGAAFWITIATSKYQGPVHFALFVSVLFWLLTLGLYFITLLGKQELVPVLGSRWLVVNVAHDLLAAALYGAATGIMIDQTQRHSYCNLKNYRLPCAYHAFLAASVCGGLCLGLYLLSALYGCCRRYQGKEEVV

SEQ ID NO: 313 - DNA, 1434 bp, Mus musculus
tggaatcgcaccgggggatgcggacggttccagacttaacgagtcggttccttatttgagccagcgcagccgggtcctctcttcaccatagggctgtaactcgagccgtccgccgcccatccccttcccactccgccccagctctgcgatccaggtccctacgtcgcgcggccccttgtggccctaacccgactggagtctgccatgggctgccgggcctgtctccgtccggaggcgtccggcgcggtacagggccgctggttgggggctgccctgagcgggttgtgccttctctccgcgttggcgttgctggagtggctaggggcgccgaccgagaccgcctggagggcagctcagggaaatgtagatgcgccaaatgtgggcagctccactgcccaggtacccagactgttgaccatgtcggtaacccgaagacgccgctacacgctgacaccggccaggctgcgctgggaccacttcaacctcacatacagagttctttccttcccccggaatcttttaagcccggaagagacgcgaaggggcctggctgctgcctttcgaatgtggagtgatgtttccccattcagtttccgtgaggtggcccctgaacgtcccagtgacctcaagataggtttctacccagtcaaccacaccgactgcttggtctctgcagtgcaccactgctttgatggtcccacaggtgaactggcccacgctttcttcccaccccacggtggcattcactttgatgacagcgagtactgggtcttgggccccacacgctacagttggaagaaaggtgtttggctcacaaacctggtgcacgtggcagcccatgagattggccatgcactgggcctgatgcactcacagcaagatcaggcgctcatgcacctcaatgccacattgcgaggctggaaggcactgtcccaggatgaactgtgggggttacaccgactctatggctgcctggaccggatttttgtgtgtgcatcctgggcacgaaagggattttgtgatgtccgccagaggctcatgaagaggctctgccccagaagctgtgatttctgttatgaattcccatttcccacggtggccaccaccacatcacccaccagaacgaaaacaaggttggtgagagagggtaggaacatgaccttccactgtggacagaagatcctacacaagaaagggaaagtatactggtacaaggaccaggaacccctggagttctcctaccctggctatctggccctgggtgaggcacagctgagcatcattgccaacgcagtcaacgaaggcacctacacatgtgtggtacgccggcaccagcgtgttctcagcacctactcctggagggtccgagtgaggaattgacactgctcagagcctctgtgctggaaggcagcagataaagcactttctctctga

SEQ ID NO: 314 - protein, 391 aa, Mus musculus
MGCRACLRPEASGAVQGRWLGAALSGLCLLSALALLEWLGAPTETAWRAAQGNVDAPNVGSSTAQVPRLLTMSVTRRRRYTLTPARLRWDHFNLTYRVLSFPRNLLSPEETRRGLAAAFRMWSDVSPFSFREVAPERPSDLKIGFYPVNHTDCLVSAVHHCFDGPTGELAHAFFPPHGGIHFDDSEYWVLGPTRYSWKKGVWLTNLVHVAAHEIGHALGLMHSQQDQALMHLNATLRGWKALSQDELWGLHRLYGCLDRIFVCASWARKGFCDVRQRLMKRLCPRSCDFCYEFPFPTVATTTSPTRTKTRLVREGRNMTFHCGQKILHKKGKVYWYKDQEPLEFSYPGYLALGEAQLSIIANAVNEGTYTCVVRRHQRVLSTYSWRVRVRN

SEQ ID NO: 315 - DNA, 3490 bp, Mus musculus
gcgggcgcggagccgagcgaggcgcggagctggctgctggcgggtgcggggaccctcgccacccgacctgggagagcgggatgggacgccgcccgcggggacctgggtccccccggggacctggccctccacgccccgggccggggctgccaccactgctgcttgtactggcgctggcggcccatgggggctgcgcagcgcccgcgccccgcgcggaggacctcagcctcggggtggagtggctaagcaggtttggctacctgccgcctgcagatccggcatcagggcagctacagacccaggaggaactgtccaaagcgattactgccatgcagcagtttggtggtctggagaccactggcatcctagatgaggccactctggccctgatgaaaacccctcgatgctcccttccggacctgccccctggggcccaatcgagaaggaagcggcagactccacccccaaccaaatggagcaagaggaacctttcttggagggtccggacattcccacgggactcacccctgggccgggatactgtgcgtgcactcatgtactacgccctcaaagtctggagtgacatcacacccttgaacttccacgaggtagcgggcaacgcggcggacatccagatcgacttctccaaggccgaccacaatgacggctaccccttcgatggccctggtggcacggtggcccacgcattcttccctggtgaccaccacacggcaggggacacccactttgatgacgatgagccatggaccttccgttcctcagatgcccacgggatggacctgtttgcagtggccgtccatgagtttggtcatgccattggtctgagccatgttgccgccccaagctccatcatgcaaccgtactaccagggccccgtgggtgacccgctacgctatggacttccctatgaggacagggtgcgtgtctggcagttgtacggtgtgcgggaatccgtgtcccctactgcccagctggataccccagagcccgaggagccacccctcctgccagagccccccaacaatcggtctagcactccgccccagaaggacgtgcctcacaggtgcactgcccactttgatgctgtggcccagattcgaggcgaagcattctttttcaaaggcaagtatttctggaggctgacccgggaccgacacttggtgtcgctgcagccggctcaaatgcatcgcttctggcggggcctgccgctgcacctggacagtgtggacgccgtgtatgagcgtaccagtgaccacaagattgtcttcttcaaaggagacagatactgggtgtttaaggacaacaacgtagaggaagggtacccgcgacctgtctccgacttcagcctcccgccaggtggcatcgatgctgtcttctcctgggcccacaatgacaggacttatttctttaaggaccagctgtactggcgctatgatgaccacacacggcgcatggaccctggctaccctgcccagggacccctgtggagaggtgtccccagcatgttggatgatgccatgcgctggtctgatggtgcatcctatttcttccgaggccaggagtactggaaagtgctggatggcgagctggaagcagcccccgggtacccacagtctacagcccgcgactggctggtatgcggtgagccgctggcggatgcggaggatgtagggcctggaccccagggccgcagtggggcccaagatggtctggcagtatgttcctgcacttcagacgcacacaggttggcactgccatctctgctgcttctgactccactgctgtggggcctgtgaacctcagtctctgccaaggcatcctgagggcagtgctagccttgcggatcaaggagccaaggggagcagggacacactggccagtactcagcaggacttgtgctccaagcttccggtccctcgctccttccttccttccttccttgaacccaggggtgctgtgccatctgctggagtggtctccagctgggacaggacgtcccaccaagggcatccatgcacaccttgcctacctggagcagccataggcagctccccttccctcctctgcacatcatgctgcttcgttgcaccttgccgggctgcccaagcccagctgtcacaaccccaggatgccttgtctgcacctgagcggctctgatggcatctgcacgtgggctgatgaggggcaaacaggggttcctcgtggtatccgtaggggccaccatgcctgtttcacaagtaagagagttgatgccccgatgggggaacagggtgggagaaaggcacctacccagaagtctgatccactgccgtttgcagcagccagcgccgtatctgctgggataggggaccagtcacactcaggatctgcccacagattcccagatgctggccaggggccttgctccaaccaccaggagcacagccacctctccccgtcctagataggttagccatggaggctgtgtcctgttatctccctctctttggccaggagagcattgtgggtctccctcgggtgctgttgatgggggtggggggcgcccatagagatatttcttcatctgtcagtacccattgcttcagcaagatgcccccatatagttctggcctgagaccctgcagcttggactcacagctgtcccctccccagctgcagaagggcttctaacacctggaataaaggtgggcgttcagtttagggaaggaggatggttgggggagcccagggtgatagcaagggggagctgcagggataagtgtcagggtcctcggggagtcatgacaatgttaccgcctaacttggagatgtaggagctgtgcacggattgattaaaatgggtgacaaacctccatggtccagaaaggggctgaggttgaacccaagatgggttaatgagctccagaaaggaacagccaagttcaaaggttctgggacaagacgggcctgaggaacagggccacccaggtaggcgtggctgtagggtaagcagtttctgtcattgggcacgagatgaaaattagtgatcacacgcacatacccccctccccaactggcccggtcccatctcaggtaagaaaggcttctgtctaccccaggccaggtttgagtgttgtcaggatgagtgagcagctagcggggcctaagtttctaccctccatttcccaagcctggccacaccctagacccacctgtcagactaggcaggacagagtcaggggtaggggcatctgaggtttccctgtcttggaagccaccctactctgccctcatatcaaagcacgctcctatgatgtcccatgttgtccaccagcctgcaggacacagatgtcctatacagcaacagggaagggtccaaaaatctttgtcacatagcactgaaagccaggcccgcaggctggagctgtctagatgctggtgtcacactcattttaaaacccaaactcttaataaaaattttgtacactgg

SEQ ID NO: 316 - protein, 578 aa, Mus musculus [sequence omitted]

SEQ ID NO: 317 - DNA, 1089 bp, Mus musculus
atggctagcggcagcgccgggaagcccactggcgaggcggcttctccggctcctgggagcgccgtcggcggggccagctcgcagccgcggaagaggctggtatctatctgtgatcactgcaagggcaagatgcagctggtggccgacctgctgctgctgtctagcgaggcgcggccggtgctcttcgaaggccccgcctcccctggcgctggtgcggagtccttcgagcagtgccgggacaccatcatcgcgcgcactaaggggctgtccatcctcacccacgacgtgcagagccagctcaacatgggccgcttcggagaggcgggagacagtcttgtggaactgggcgacttggtggtgtcgctgaccgagtgttctgcacatgcggcctacctggcagccgtggccacaccgggcgctcaacctgcacagccaggccttgtggaccgctaccgtgtgacacgctgccgccacgaggtagaacaaggctgtgctgtgctgcgagccaccccactggcggacatgaccccacagctgttgctggaggtgtcgcagggcctgtctcgaaacctcaagttcctgacggatgcgtgcgccctggccagtgacaagtcacgggaccgcttctctcgcgaacagttcaagctgggcgtcaagtgcatgagcacaagtgcatccgcgctgttagcatgcgtacgcgaagtgaaggcggcacccagcgagctggcccgcagtcgttgcgcgctcttcagtgggcccttggtgcaggcggtgagcgctttggtgggctttgccaccgagcctcaattcctgggtcgcgcagctgccgtgagcactgagggcaaggcggtgcagaccgccatcctgggaggtgccatgagtgtggtgtcggcctgcgtgctcttgacccagtgcctcagggatctggcgcagcacccagatgggagcgccaagatgtcggaccacagggagaggctgaggaactcggcctgcgccgtgtctgaaggctgcaccctgctatctcaggctttaagggaaaggtcttcacccaggactttaccgccagtgaattccaattctgtgaattag

SEQ ID NO: 318 - protein, 362 aa, Mus musculus
MASGSAGKPTGEAASPAPGSAVGGASSQPRKRLVSICDHCKGKMQLVADLLLLSSEARPVLFEGPASPGAGAESFEQCRDTIIARTKGLSILTHDVQSQLNMGRFGEAGDSLVELGDLVVSLTECSAHAAYLAAVATPGAQPAQPGLVDRYRVTRCRHEVEQGCAVLRATPLADMTPQLLLEVSQGLSRNLKFLTDACALASDKSRDRFSREQFKLGVKCMSTSASALLACVREVKAAPSELARSRCALFSGPLVQAVSALVGFATEPQFLGRAAAVSTEGKAVQTAILGGAMSVVSACVLLTQCLRDLAQHPDGSAKMSDHRERLRNSACAVSEGCTLLSQALRERSSPRTLPPVNSNSVN

SEQ ID NO: 319 - DNA, 1262 bp, Mus musculus
ggccacgtgaccggagccaacatggcggcgcccatcggcgtccccctgctcgtccgtggaggttgtcagagaattctgtcttcgccactcaatcatatctacttacacaagcggtcaggcagtcaacaaagaagacatttctttttctggagacaaagggatatctcccacagtgtggtttcaccggctgccgtctctcccgcacatcctgtccccaagcgcataaagaagccagactacgtgacgacaggcattgtgccggactggggagacagcatagaagtgaaggatgaagatcagattcaagggcttcgtgaggcttgtcggctggcgagacacgtcctcctcctggctgggaagagtttaaaggtggttgacatgacaactgaagagatagatgcgcttgttcattgggaaatcatcaggcatgacgcatatccctcacctctgggctatggacgctttccaaaatctgtttgcacctctgtaaacaacgtgctctgtcatggcattcctgacagccgacctcttcaggatggagatattatcaacattgatgtcacggtctattacaatggctaccatggagacacctctgaaacctttctggtgggcaatgtggatgaaagtggtaaaaagttagtggaggttgccaggaggtgtagagatgaagcgattgcagcctgcagagctggggcccccttctctgtaattggaaacacaatcagccgcataactcatcagaatggtttgcaagtctgtccacattttgtgggacatgggataggatcatactttcatggacacccagaaatttggcatcatgcaaatgacaatgatctgcccatggaggagggcatggctttcaccatagagccaatcatcactgaaggttccccagaatttaaagtccttgaggacgcatggaccgtggtctccctagacaaccaaaggtctgcgcagttcgagcacacagtcctcatcacgccaaggggagtggagatactgaccaaactgccacaagaagcctgagaatcggccagaaggccaccaagacccagaggactgagaaagcatccccaggccacacacaagtctgcagtgtctaggagaaaacgcagagaggacgggctctggggactcaggtccaacaggacagcccttgtggctagaaaaacaaacctcccttcctgggcaggtggttcgcccttttcctgtccatattccgcccaagtttaaaaaaaaaaaaaaaaaaaactctc

SEQ ID NO: 320 - protein, 336 aa, Mus musculus
MAAPIGVPLLVRGGCQRILSSPLNHIYLHKRSGSQQRRHFFFWRQRDISHSVVSPAAVSPAHPVPKRIKKPDYVTTGIVPDWGDSIEVKDEDQIQGLREACRLARHVLLLAGKSLKVVDMTTEEIDALVHWEIIRHDAYPSPLGYGRFPKSVCTSVNNVLCHGIPDSRPLQDGDIINIDVTVYYNGYHGDTSETFLVGNVDESGKKLVEVARRCRDEAIAACRAGAPFSVIGNTISRITHQNGLQVCPHFVGHGIGSYFHGHPEIWHHANDNDLPMEEGMAFTIEPIITEGSPEFKVLEDAWTVVSLDNQRSAQFEHTVLITPRGVEILTKLPQEA

SEQ ID NO: 321 - DNA, 1616 bp, Mus musculus
aaggctaggcctagtccacaaatcctcaataatatggcaagatcaatcaatcaatcaatcaatcaatctatctatcgctctatctatctatctatctatgatatatatacatatacatatacatatacatatacatatacatatacatatacatatacatatacatatacatatacatatatatatatgtctgtcacttctttccgaataacccaaaacatcctgccatttacagttcataaagaaaatataaatgtagtttcaaagtggggggctcaagggtgagtttgcttactatgtcgtctgtgtaaccaacctgttatccagacgacaacctgttattgtggtgcggttttatggaaatattcttcatgtgcttatgaaactcagtttccaaactcagggtatatagttgaacagcagaacattacctagcataggggaggccccaggatcagtctccaacaatgcaaagcaaaaacaaaacaagacccctcaatctcagttatctttgttggaaaataattgggtcttttctagtacagggaaaaaaatgttaaaaaacatttatctaggcatgaaagaagtcaaactaattgaaaataaaatctctataaaagatgtcggagactaagtttttaaaatgatggtccatcacctctctgctgttgctgcaaagctcgcccatgcaatatttcaacaagatacaaaggtgtgagtaagccttcctttctggctcctcggggccagcattctgctgggacacttacttgtatgctcctgttagccagagctctgacccttgagggacaggaaggaattgatgagagatggattgttgagatcaggttaacagggactcaccattaacgactctctctattccctaatgatatgcatataacaccgccatatacccgaagggtcaataggacttgccctattccttaatggtatatagcaccaccctttactcaaatcaacatcaaaagagcttggttgaggacggtggtgagatcacaagtaattagtgttatcctctgaatccatcatggttatatggtctcaccttggcagcgccgttgttgtgggcatagtcagtaggcaaaggaaatgtcttcagctgttgctgcacactttatttcctgtttcaggttgacatgacaactgaagagatagatgcgcttgttcattgggaaatcatcaggcatgacgcatatccctcacctctgggctatggacgctttccaaaatctgtttgcacctctgtaaacaacgtgctctgtcatggcattcctgacagccgacctcttcaggatggagatattatcaacattgatgtcacggtctattacaatggctaccatggagacacctctgaaacctttctggtgggcaatgtggatgaaagtggtaaaaagttagtggaggttgccaggaggtgtagagatgaagcgattgcagcctgcagagctggggcccccttctctgtaattggaaacacaatcagtcgaagggggcagagaacactggattcttattcaggcattctgtggagttctgcattcatggctgtgtctaaagggcatgtcagcctttgattctctctgagaggt

SEQ ID NO: 322 - protein, 146 aa, Mus musculus
MTTEEIDALVHWEIIRHDAYPSPLGYGRFPKSVCTSVNNVLCHGIPDSRPLQDGDIINIDVTVYYNGYHGDTSETFLVGNVDESGKKLVEVARRCRDEAIAACRAGAPFSVIGNTISRRGQRTLDSYSGILWSSAFMAVSKGHVSL

SEQ ID NO: 323 - DNA, 10141 bp, Mus musculus
gctccataaaaatacagactcaccagttcctgctttgatgtgacatgtgactccccagaatacaccttgcttctgtagaccagctccaacaggattccatggtagctgggatgttagggctcagggaggaaaagtcagaagaccaggatctccagggcctcagagacaagccactgaagtttaagaaggcgaagaaagacaagaaggaggacaaagaaggcaagcatgagccactacaaccttcagcccaccattctgcagagccagcagaggcaggcaaagcagaaacatcagaaagctcaggctctgccccagcagtgccagaagcctcggcttcccccaaacagcggcgctccattatccgtgaccggggacctatgtatgatgaccccaccttgcctgaaggttggacacgaaagcttaaacaaaggaagtctggccgatctgctggaaagtatgatgtatatttgatcaatccccagggaaaagcttttcgctctaaagtagaattgattgcatactttgaaaaggtgggagacacctccttggaccctaatgattttgacttcacggtaactgggagagggagcccctccaggagagagcagaaaccacctaagaagcccaaatctcccaaagctccaggaactggcaggggtcggggacgccccaaagggagcggcactgggagaccaaaggcagcagcatcagaaggtgttcaggtgaaaagggtcctggagaagagccctgggaaacttgttgtcaagatgcctttccaagcatcgcctgggggtaagggtgagggaggtggggctaccacatctgcccaggtcatggtgatcaaacgccctggcagaaagcgaaaagctgaagctgacccccaggccattcctaagaaacggggtagaaagcctgggagtgtggtggcagctgctgcagctgaggccaaaaagaaagccgtgaaggagtcttccatacggtctgtgcatgagactgtgctccccatcaagaagcgcaagacccgggagacggtcagcatcgaggtcaaggaagtggtgaagcccctgctggtgtccacccttggtgagaaaagcgggaagggactgaagacctgcaagagccctgggcgtaaaagcaaggagagcagccccaaggggcgcagcagcagtgcctcctccccacctaagaaggagcaccatcatcaccaccatcactcagagtccacaaaggcccccatgccactgctcccatccccacccccacctgagcctgagagctctgaggaccccatcagcccccctgagcctcaggacttgagcagcagcatctgcaaagaagagaagatgccccgaggaggctcactggaaagcgatggctgccccaaggagccagctaagactcagcctatggtcgccaccactaccacagttgcagaaaagtacaaacaccgaggggagggagagcgcaaagacattgtttcatcttccatgccaaggccaaacagagaggagcctgtggacagccggacgcccgtgaccgagagagttagctgactttacatagagcggattgcaaagcaaaccaacaagaataaaggcagctgttgtctcttctccttatgggtagggctctgacaaagcttcccgattaactgaaataaaaaatatttttttttctttcagtaaacttagagtttcgtggcttcggggtgggagtagttggagcattgggatgtttttcttaccgacaagcacagtcaggttgaagacctaaccagggccagaagtagctttgcacttttctaaactaggctccttcaacaaggcttgctgcagatactactgaccagacaagctgttgaccaggcactccccccaacaatatcctccctcttccccccccccacccccgccccgtgtgctcgttagggcaattgagaggacactcccatttttggtgccattgatgccctgtccataatagcttccctgacttttacaccaccccaactcccaatctgaaggactgggaggtgtgatgcaggagaaactatgggactcttgggagaagactatggagttggccagtgattaaggcccagtaattccaactgtggtagcacagatctggctccacatcaacccaatccaaaactgacaaggatattttgcaaaaaaagaaagtggcacctgtctgatccagctctgacatggctagaggtgagtcctaaactgatggcttataaactagcctgagccacagaagagtatggcccagagtgaagtgtcatcatctgttcacaaggcatgctcccctagaagataatgctaaagaggtgccatggaggcagcaggacaaagtacaggcaggctaggtggagtcaagccaggcctagtgccacagaacaagagagcagtctgactagtaattaagagggaagaaaggaaaatattcttccaattactttccagttctcctttagggacagcttagaattatttgcactattgagtcttcatgttcccacttcaaaacaaacagatgctctgaaagcaaactggcttgaaatggtgacactgtcccacaagccaccagacatggcagtgttcagaactacctgtatctgtatatacctgcgcttgttttaaagtgggctcagcacataggattcccaagaagctccgaaactctaagtgtttgctgcaattttataaggacttcctgattgctttctctctcgtccttccatttcttccttccttccatttcatgctttcatttcttcccctagcttctagttgtttcttctgttccaggcagctgcagtgctgaaccacatggttacctaacagcagtcagctgcagccctaggattcttcctgccctttaacttcccattgccagtgccaggtatcatatttaaccttgagcaagagctgggctcttttgagccctccctaacctctgtgaagaagaacaagaaggtaggaagctcttgctcttgctaagaaaaatgtcaaaaggctttcagaccttaaacaatgagccttttcaccttttactctagaaaagtggactagaaaatctgggtcacattgggtagctgaaggagatacagaggcccctatggcctgccagagtcgttgcatggcccaacaggggctccatgcccactacccttgaccctactcagaaatctaatgtcatacttagtgtgggcaggggacctgtcaggacagatgcagacctaagcagggagtgacaccagggcccttggcccttcttctgacaaacatacacatcccaagtctttttctagtggaattcttaacctcttgctcactggggactgggaagcatcagcacatcccatatttcaaactctgctccataagtacagtggtgaattttatagacttgactttgctgtggggttttaattggtcagttttaatttgggatcccaaagttttaacctccattcaggaagtccttatctagctgcatatcttcatcatattggtatatccttttctgtgtttacagagatgtctcatatctatcgaaatctgtctgagaagtaccttatcaaagtagcaaatgagacagcagtcttatgcttccagaaacacccacaggcacgtcccatgtgagctgctgccatgaactgtcgagtgtgtattgtcttgtgtattttcgttaacgttccccagcttccttcctgcggtgtaatcatggaagagtgaaacatcatagaaatcgtctagcacttcctggccagtccttagtgatcaggaaccgtagttgacagttccaattgatagcttaagataaaaccatgtttgtctcttatggaatggttagaactaagtgagagatcttgccccattctgtttgccgaatcatagttggacttttagtgtatttgtatccatttccttgtgctataaaagcaaaccctgcaaccagctttctgtcaggcagtccttttgcctgctctgcttttgatcctcttagtcttgcttctggttcctccctggagagggaggaggggtcagaagaggaattctggaggatccaggatatgtccttctgaactcctgcttcttccagtgacaaaaggcccctactgccccaccccaacctgccccatgcactcctctaggacacctttccatacttttcacaacacctagccaggttgacaccaagttgtttattgtggtctgcttggaattttacctgttaggcttacttagtccaatcaaatggactccaagttgggtatccctcatctttggaagacaacctaggctgattagatatttacttttgggattgcagcactttgggtgccgtttttcttttacttgggttttatctgcagctccctcaccaccaccaccaccccccacttacctgtatgtagaactgatttcaaaactgcaggtggtggtaactgcagcttcttagggttttcttcacttcttgcttctttccccattccctcatccacaaataagggcatcacaagtcagtctcctttaagcaggcagctttggtggggtttttcccctggaagccagggaccctgtcaggctgcctctgccttgtggtcaggttgacaggaggttggagggaaaagccttaagtcatgggattctcaccagctgtgtctggctcagacctggaatgtgacctttattttgttgtatttgaacattgtaaagtgtgggtggtaccttaaactgaatatgtgaagaatccagaaactgaccaacagctttcagatacctggggctaggtcactaaggtcacatccagtcttccctaccctgttctagttgttagctactacctctcccagatagattgctgtatatcctccaactatgatcatcctggcccaagcttgcctgttcttgagtctgtcttaaccagtggaactgctgcccttggtgtgcagtgagttgaggactcttggtcacagccaggctctagtagtacagctcctttctgctggtgctgtatttccatatcaaaaggcacaggggagatctagaaatgccatctcccccagtccatcagtgccaaacaagcccatgatcccagcatgggtacagacaactctgttcagtgctatcacaacagactagaggccatgaacattggacgtgggaaccagagcaacccgaattgctgctgctttattcagctttccgttgctctgacaatgataaaacaaggcagtaacttaaaacagactgccaggtttggcagagaaaggaaattccttagctgacagcacctctggattttaaataggttgtaataagtggctcaaacccatccaggaaaaagcaaaagggttagaactgaccagatgagaccagcctgatttcatgcagcccaaatggagtccagctgtctgaactctgcagcacttctctactacagtctcctagagcattccagccaggctcttcaggctgaggagacatcacaggtgccagttcttcaagaagacttttgtgcatcagttcatagcctatatctttgcccaagattgtagattcaggttaacactacagattctagggcagatgactgagactcagaaaaaaagcccctgtggactgtggtatagcgaagtacaaaaactgaagggggctagggcagatgccgcatgcctcatgccagagccaagccctctgctccatccacatccttttctggctccttcttcctgctctctgcttcagtgaaccagccccactctgaagagatttgttgattctctccatttttatgtctttctcttttaggtactatatagaaaaggcttagtctaattgttataaattgctagaatactgcctcccccagggtctaaaaatatatgctaaaggggaaaacttgaacactgaaaccagttctgaacaatttagaaggaaaaccttgaaaacatttaacaaaaaattatattttaatgtttatgaataagaggaggcttttgaaaaaatgttgatctataaatacttactttaggcctgaggtgtctaatgagtgaactgagcaatgggaactcaaggctgaagcctcctgcatcagaggaggtagaaccaggagcctcttgagatttgaggtgttttagcattggaaagccactctttgggtagctggccccagaaactacttctgaccttgtcatttggaatggaggttagtggtctgccagatgccaaagctgcatgagaccagctcttggtttatcaatttgaacactcagtaacctagaaggcccagcacaaagtgtctgctctcttcttaactgagcctgccccagcactactgcacaaattagggagggtctacttcctacagagcatccctccctgggccccctcccatcctttgtactctacctacctgaccttcaggatcttggcacatacgaaatggctgtgtagcaagcactttggcatgccctcctaaacttaccccagagcctctccctgcctccttaagccagtctgcctgtcttctggggaggtgttagagcccatagaatggagaggagaaagaaaagaggaagaggcaggcaggtagtaaaaaggctctgggaggaaagacagcctcctaggctttgcacaagcaggactcagccccttgtgggaactaagtgccatcttggagtttaagaacatttggacaagttgcaaatgacctttgctccttgctcctctcaccttttatggggccctgcttagcactgaaagcaaatgcgctgaaaaggcaaagaggtttggctcctgcccactgatagtcctttccctgcagtgtttgtgtgtcaagtggcaaagctgttcttcctggtgactctgattagatccagtaacttaagagatttgtatgcataggtctgctttgactcttctattctgggcttttgatttgtttttcagttttgcttttagttttcctatttttattttatgcaccaactagacacacaaagcagttgaatttatatatatatatatatatatatatctgtatatttcacaattataaactcattttgcttgtgacgccacacacacacaaaaagaaaaaccttttaaaattatacctgttgcttaattacaatatttctgataaccatagagtaggacaagggaaaaaatttaaaaagaaaaaaaaaaaaagaaaaaacacatctgtctgctggtcacttcttcaatccaagcagatctgtgatctttcctcgcgtctttcaaagacttccctgtgctaagtgaaggaagctccaggctgcacccaggttttgtgctttgtttctcctctgttgtgaaaggggccccaagattctgggtacaggacagttcatttcagcatggggtcaggagacaagagcactccctttacatgctgacgtacagaacttagtgggaatagcctagtccccacctctagggatggggagctagcatgcatgggggtgacccaactccctccacctttccctggccaggaagagcctgtgtacagtaagtctgacaagctttccccagttagcagggctcagagcatttaaaaaccctccaaactttgctgagtctagggactagagagaagatagaagatttggtctatctccaaggtgtgtaagctgtaccaggtagaatgccagggaccccagaaccacatccaacagcccaatgggtctcctccagaaagtagtgaagactccagaaacatccctttctcttctccctgctcccatgagtaactgcatttgcttttgtaatccttaatgagcattatctgctaaaaaaaaaaaattagctgtaacagttctttttgcaaaaggatcattcttaaataattaaaaacacccccccccaaaaaaaagtccagaaccttgttcttccaaagcagagagcattataatcagggccaaaatctgtcccacacctctaccccatctcctcatgattgctgcttctaaggccagaatacagcaaagatatttgtaggccctttgggtgactgggctacccttggagctcttggaagatgggctggggaagcctctgagaccctatcctagggccttgctctagggagtaatcagtattagtagagtgtcacaacattattccccagccggcatgagatgggggcagaagaagccaaagggttgtctccactgctacttacttggccactgacaggtaggtgaccatgtatgtccatatgcatgttttatggctgatgtgagatcagcacccaagttagcttcacctggtgacctctaaccctgcctggatggagcaggccacctggttcaatgtttctgggcagctggacaatggagtgcaaaaggcttacagaacttgaagccttttccttactttgctagcacggcctccttttccatttgatttgtcactgcttcagtcaataacagccgctccagagtcagtagttgatgaatatatgaccaaatatcaccaggactgttactcaacgtgtgccgagccctttccttgtgctgggctccctgtgtacctggacactgtaatgtgtgctgtgtttgctctccttcctcttccttccttgccctttccttgtctttctggggtttttctgttgggtttggtttggttttatttttccttttgtgttccaaacatgaggttttctctactggtcctctttaactgtggtgttgaggcttctatttgtgtaatttttggtgggtgaaaggaactttgctaagtaaatctcttctgtgtttgaaatgaagtctgtattgtaactatgtttaaagtaattgttccagagacaaatgcttctaggtacattttcattacaaacaaagcatttgaagggagggaagtggtgaataagacaagaggggcaatctgaattgatccctgcccagatcagccagaagctaccaaaagttaagcactggttttccattccaagtcaagagactgaagctgatgttttgccattttcaaagtcaaagcaaaaccagcttttccacccaatggattctttgcttctccttcccagattattactactgctgtaataatctaggagtgccaggagggaaaggagtattaacacagagctgtgctcactgagtatggaaaggcttggtctgagttttcaggaggatgacccactgtggacatggggagaagacagaagataaattagccgctccctgcctaagatacctcttaatagataagtcaaggccatggacattattgtctacaaggcatgtttcaaagacatgaccagtcaggacacttctgtcatactccatgttgccccctagtacacagtactaatctgatatctctgttcccgccatgcctgggggataaaatgatagcagagactcctttccttcaatgtgatctaattcccaacaaaatctgggcctgagataccacctgtttctatggcaaacatcctcagtaaagtgttattctcattgcagattgttccagcctaatgtaagaggaacagagcagtgttcccttggagcctcatgtggacagttctacctgtagtgaccagttggctatagtagttattagctggaacaaccagacagggtacatgccccctccaaaatccatgttgtactcccctctgccagccagggggggtgagatctgtagaatagtgcagccagtgacaagccaccttgtgtttgtcaccagctcaaaaactcatctaaggttgggagcaggcagacaaggcagagagaaagatccaggacagacctagctgggctggaggggtcttgaaaagccctctgtcgtattcaccttcagtttttgtgctttgggacaattactttagaaaataagtaggtcgttttaaaaacaaaatattgattgcttttttgtagtgttcaaaacaaaaggttctttgtgtatagccaaatgactgaaagcactgatatatttaaaaacaaaaggcaatttattaaggaaatttgtaccatttcagtaaacctgtctgaatgtacctgtatacgtttcaaaaacacaccccactgaacccctgtaacctatttattatataaagagtttgccttataaattta

SEQ ID NO: 324 - protein, 484 aa, Mus musculus
MVAGMLGLREEKSEDQDLQGLRDKPLKFKKAKKDKKEDKEGKHEPLQPSAHHSAEPAEAGKAETSESSGSAPAVPEASASPKQRRSIIRDRGPMYDDPTLPEGWTRKLKQRKSGRSAGKYDVYLINPQGKAFRSKVELIAYFEKVGDTSLDPNDFDFTVTGRGSPSRREQKPPKKPKSPKAPGTGRGRGRPKGSGTGRPKAAASEGVQVKRVLEKSPGKLVVKMPFQASPGGKGEGGGATTSAQVMVIKRPGRKRKAEADPQAIPKKRGRKPGSVVAAAAAEAKKKAVKESSIRSVHETVLPIKKRKTRETVSIEVKEVVKPLLVSTLGEKSGKGLKTCKSPGRKSKESSPKGRSSSASSPPKKEHHHHHHHSESTKAPMPLLPSPPPPEPESSEDPISPPEPQDLSSSICKEEKMPRGGSLESDGCPKEPAKTQPMVATTTTVAEKYKHRGEGERKDIVSSSMPRPNREEPVDSRTPVTERVS

SEQ ID NO: 325 - DNA, 1409 bp, Mus musculus
cacggagggagacaagatggcagcgtcggcgtcgcagggtgggagaagcggcggtggcggaggcagtagtggggctggcggcggccccagctgcgggacaagcagcagccgcagtggtttgttggataagtggaagattgatgataagcctgtaaaaattgataagtgggatggatcagctgtgaagaactctctggatgactctgccaaaaaggtacttctggaaaagtacaagtatgtggagaactttggtctcattgacggtcgcctcaccatctgtaccatctcctgcttttttgccatcgtggctttgatttgggattacatgcacccctttcctgagtccaagccagttttggctttgtgcgtcatatcatatccttttcaatgctatgattttgtgatgatggggattctgaccatttatacctcatataaagagaagagcatcttccttgtggcccacagaaaagaccccacaggaatggatcctgatgatatttggcagctgtcctccagcctcaaaaggtttgatgacaaatacaccctgaagttgaccttcatcagtgggaggacaaagcagcagcgggaagccgagttcaccaagtccattgctaagttctttgaccacagcgggacattggtcatggatgcatatgaacctgaaatatccaggctccatgacagtctcgccacagaaagaaaaataaaatagccacttgtaaaagctctccttctgctggatcatacgactcactggtgggtaggggaggagacagaaagcttaagcttggtcaagtaagaaatgttaaagatgcccctgtctaatccaccctggatgaatagagttttctagttcagatatgcagttgtccctttgatggctgtagcctccctggtctgctgagtggttttctgttgctttccttaagcgtttttgtaagagctaagcatatttttcctttgtgcttaatagtactttatgcagtctagctttgtgccatgcagcgtttgaatgctcagttcttaagaactactaaccttgctggggcacagtagtgttcacccagaatcccagcacttcccaggctgaggaagggggaatgatgtgaggccatcctgggctgtagagccaggccctggcttggggagtgggcattgttaacttgttgctgactttgtgttgacccctgcatcagcaactatttccttaaatccaggatacaacttgttaagtgtgacagctttcctttacacaccatttttgtgggtgtatatatatatttgacttggggagaattattttttacaaaaatacaaaatagctttttaatttgtttaaaatagacctgcctgttactttttgtgctcttaaccaattaaagaagccggtggcattttttagtttt

SEQ ID NO: 326 - protein, 232 aa, Mus musculus
MAASASQGGRSGGGGGSSGAGGGPSCGTSSSRSGLLDKWKIDDKPVKIDKWDGSAVKNSLDDSAKKVLLEKYKYVENFGLIDGRLTICTISCFFAIVALIWDYMHPFPESKPVLALCVISYPFQCYDFVMMGILTIYTSYKEKSIFLVAHRKDPTGMDPDDIWQLSSSLKRFDDKYTLKLTFISGRTKQQREAEFTKSIAKFFDHSGTLVMDAYEPEISRLHDSLATERKIK

SEQ ID NO: 327 - DNA, 1253 bp, Mus musculus
ggccgcgcgcgctctcagtctccgccacccaccagctccagcaccagcagcagcgccgccgccaccgcccaccttctgccgccgccgccacaaccaccttctcctccgctgtcctcttctgtcctcgccttctgtcgattatcaggctttgaaccagtatggctgaccctcgccaggagtttgacacaatggaagaccatgctggagattacactctgctccaagaccaagaaggagacatggaccatggcttaaaagccgaagaagcaggcatcggagacaccccgaaccaggaggaccaagccgctgggcatgtgactcaagctcgtgtggccagcaaagacaggacaggaaatgacgagaagaaagccaagggcgctgatggcaaaaccggggcgaagatcgccacacctcggggagcagcctctccggcccagaagggcacgtccaacgccaccaggatcccggccaagaccacgcccagccctaagactcctccagggtcaggtgaaccaccaaaatccggagaacgaagcggctacagcagccccggctctcccggaacgcctggcagtcgctcgcgcaccccatccctaccaacaccgcccacccgggagcccaagaaggtggcagtggtccgcactccccctaagtcaccatcagctagtaagagccgcctgcagactgcccctgtgcccatgccagacctaaagaatgtcaggtcgaagattggctctactgagaacctgaagcaccagccaggaggtggcaaggtgcaaatagtctacaagccggtggacctgagcaaagtgacctccaagtgtggctcgttagggaacatccatcacaagccaggaggtggccaggtggaagtaaaatcagagaagctggacttcaaggacagagtccagtcgaagattggctccttggataatatcacccacgtccctggaggagggaataagaagattgaaacccacaagctgaccttcagggagaatgccaaagccaagacagaccatggagcagaaattgtgtataagtcacccgtggtgtctggggacacatctccacggcacctcagcaatgtgtcttccacgggcagcatcgacatggtggactcaccacagcttgccacactagccgatgaagtgtctgcttccttggccaagcagggaaaagctgctttactgagttctcaagtttggaactacagccatgatttggccaccattacagacctgggactttag

SEQ ID NO: 328 - protein, 364 aa, Mus musculus
MADPRQEFDTMEDHAGDYTLLQDQEGDMDHGLKAEEAGIGDTPNQEDQAAGHVTQARVASKDRTGNDEKKAKGADGKTGAKIATPRGAASPAQKGTSNATRIPAKTTPSPKTPPGSGEPPKSGERSGYSSPGSPGTPGSRSRTPSLPTPPTREPKKVAVVRTPPKSPSASKSRLQTAPVPMPDLKNVRSKIGSTENLKHQPGGGKVQIVYKPVDLSKVTSKCGSLGNIHHKPGGGQVEVKSEKLDFKDRVQSKIGSLDNITHVPGGGNKKIETHKLTFRENAKAKTDHGAEIVYKSPVVSGDTSPRHLSNVSSTGSIDMVDSPQLATLADEVSASLAKQGKAALLSSQVWNYSHDLATITDLGL

SEQ ID NO: 329 - DNA, 1296 bp, Mus musculus
ctccagcaccagcagcagcgccgccgccaccgcccaccttctgccgccgccgccacaaccaccttctcctccgctgtcctcttctgtcctcgccttctgtcgattatcaggctttgaaccagtatggctgaccctcgccaggagtttgacacaatggaagaccatgctggagattacactctgctccaagaccaagaaggagacatggaccatggcttaaaagccgaagaagcaggcatcggagacaccccgaaccaggaggaccaagccgctgggcatgtgactcaagctcgtgtggccagcaaagacaggacaggaaatgacgagaagaaagccaagggcgctgatggcaaaaccggggcgaagatcgccacacctcggggagcagcctctccggcccagaagggcacgtccaacgccaccaggatcccggccaagaccacgcccagccctaagactcctccagggtcaggtgaaccaccaaaatccggagaacgaagcggctacagcagccccggctctcccggaacgcctggcagtcgctcgcgcaccccatccctaccaacaccgcccacccgggagcccaagaaggtggcagtggtccgcactccccctaagtcaccatcagctagtaagagccgcctgcagactgcccctgtgcccatgccagacctaaagaatgtcaggtcgaagattggctctactgagaacctgaagcaccagccaggaggtggcaaggtgcagataattaataagaagctggatcttagcaacgtccagtccaagtgtggctcgaaggataatatcaaacacgtcccgggtggaggcagtgtgcaaatagtctacaagccggtggacctgagcaaagtgacctccaagtgtggctcgttagggaacatccatcacaagccaggaggtggccaggtggaagtaaaatcagagaagctggacttcaaggacagagtccagtcgaagattggctccttggataatatcacccacgtccctggaggagggaataagaagattgaaacccacaagctgaccttcagggagaatgccaaagccaagacagaccatggagcagaaattgtgtataagtcacccgtggtgtctggggacacatctccacggcacctcagcaatgtgtcttccacgggcagcatcgacatggtggactcaccacagcttgccacactagccgatgaagtgtctgcttccttggccaagcagggtttgtgatcaggctcccagggcagtcaataatcatggagagaagagagagtgagagtgtgg

SEQ ID NO: 330 - protein, 372 aa, Mus musculus
MADPRQEFDTMEDHAGDYTLLQDQEGDMDHGLKAEEAGIGDTPNQEDQAAGHVTQARVASKDRTGNDEKKAKGADGKTGAKIATPRGAASPAQKGTSNATRIPAKTTPSPKTPPGSGEPPKSGERSGYSSPGSPGTPGSRSRTPSLPTPPTREPKKVAVVRTPPKSPSASKSRLQTAPVPMPDLKNVRSKIGSTENLKHQPGGGKVQIINKKLDLSNVQSKCGSKDNIKHVPGGGSVQIVYKPVDLSKVTSKCGSLGNIHHKPGGGQVEVKSEKLDFKDRVQSKIGSLDNITHVPGGGNKKIETHKLTFRENAKAKTDHGAEIVYKSPVVSGDTSPRHLSNVSSTGSIDMVDSPQLATLADEVSASLAKQGL

SEQ ID NO: 331 - DNA, 2303 bp, Mus musculus
acaaccaccttctcctccgctgtcctcttctgtcctcgccttctgtcgattatcaggctttgaaccagtatggctgaccctcgccaggagtttgacacaatggaagaccatgctggagattacactctgctccaagaccaagaaggagacatggaccatggcttaaaagagtctcccccacagccccccgccgatgatggagcggaggaaccagggtcggagacctccgatgctaagagcactccaactgctgaagacgtgactgcgcccctagtggatgagagagctcccgacaagcaggccgctgcccagccccacacggagatcccagaaggaattacagccgaagaagcaggcatcggagacaccccgaaccaggaggaccaagccgctgggcatgtgactcaagggcgtcgtgaaggccaggccccagatttggggacctcagactggacccgccaacaggtgtctagcatgtctggggctcccctcctgccacaaggcctcagagaggctacatgtcaaccttcgggaacaagacctgaggacatagagaaaagccacccggcctctgagctgctgcggcgagggccacctcagaaggaaggctggggccaagacaggctggggagtgaggaagaggtggatgaagatctcaccgtggatgaatcatcccaggattcccctccctcccaggcctccctgacccctggcagggcagcccctcaggccggctccggctctgtctgcggggagaccgccagcgtgcctgggctcccaactgagggttccgtcccacttcctgctgatttcttctccaaagtctccgcagagacccaggcctcacagcccgaagggcctggcacggggcccatggaggaagggcacgaggctgcccctgagttcacgttccacgtggaaatcaaagccagcacgccgaaggaacaggatttggaaggggctacagtggtgggggtccccggagaggagcaaaaggcccagacccagggcccctctgtgggaaagggcaccaaagaggctagccttcaggaacctcctggcaagcaacctgcagccggcctgcccgggaggccagtcagtcgggttcctcaacttaaagctcgtgtggccagcaaagacaggacaggaaatgacgagaagaaagccaagacatccacaccttcctgtgctaaagccccgagccataggccctgccttagccccacacgccccactcttggtagctcagaccctttgatcaaaccctccagccctgccgtgtgccctgaaccagccacctctcctaaacacgtctcttctgtcacaccccgaaatggcagtcctggaacaaagcagatgaaactcaagggcgctgatggcaaaaccggggcgaagatcgccacacctcggggagcagcctctccggcccagaagggcacgtccaacgccaccaggatcccggccaagaccacgcccagccctaagactcctccagggtcaggtgaaccaccaaaatccggagaacgaagcggctacagcagccccggctctcccggaacgcctggcagtcgctcgcgcaccccatccctaccaacaccgcccacccgggagcccaagaaggtggcagtggtccgcactccccctaagtcaccatcagctagtaagagccgcctgcagactgcccctgtgcccatgccagacctaaagaatgtcaggtcgaagattggctctactgagaacctgaagcaccagccaggaggtggcaaggtgcagataattaataagaagctggatcttagcaacgtccagtccaagtgtggctcgaaggataatatcaaacacgtcccgggtggaggcagtgtgcaaatagtctacaagccggtggacctgagcaaagtgacctccaagtgtggctcgttagggaacatccatcacaagccaggaggtggccaggtggaagtaaaatcagagaagctggacttcaaggacagagtccagtcgaagattggctccttggataatatcacccacgtccctggaggagggaataagaagattgaaacccacaagctgaccttcagggagaatgccaaagccaagacagaccatggagcagaaattgtgtataagtcacccgtggtgtctggggacacatctccacggcacctcagcaatgtgtcttccacgggcagcatcgacatggtggactcaccacagcttgccacactagccgatgaagtgtctgcttccttggccaagcagggtttgtgatcaggctcccagggcagtcaataatcatggag

SEQ ID NO: 332 - protein, 733 aa, Mus musculus
MADPRQEFDTMEDHAGDYTLLQDQEGDMDHGLKESPPQPPADDGAEEPGSETSDAKSTPTAEDVTAPLVDERAPDKQAAAQPHTEIPEGITAEEAGIGDTPNQEDQAAGHVTQGRREGQAPDLGTSDWTRQQVSSMSGAPLLPQGLREATCQPSGTRPEDIEKSHPASELLRRGPPQKEGWGQDRLGSEEEVDEDLTVDESSQDSPPSQASLTPGRAAPQAGSGSVCGETASVPGLPTEGSVPLPADFFSKVSAETQASQPEGPGTGPMEEGHEAAPEFTFHVEIKASTPKEQDLEGATVVGVPGEEQKAQTQGPSVGKGTKEASLQEPPGKQPAAGLPGRPVSRVPQLKARVASKDRTGNDEKKAKTSTPSCAKAPSHRPCLSPTRPTLGSSDPLIKPSSPAVCPEPATSPKHVSSVTPRNGSPGTKQMKLKGADGKTGAKIATPRGAASPAQKGTSNATRIPAKTTPSPKTPPGSGEPPKSGERSGYSSPGSPGTPGSRSRTPSLPTPPTREPKKVAVVRTPPKSPSASKSRLQTAPVPMPDLKNVRSKIGSTENLKHQPGGGKVQIINKKLDLSNVQSKCGSKDNIKHVPGGGSVQIVYKPVDLSKVTSKCGSLGNIHHKPGGGQVEVKSEKLDFKDRVQSKIGSLDNITHVPGGGNKKIETHKLTFRENAKAKTDHGAEIVYKSPVVSGDTSPRHLSNVSSTGSIDMVDSPQLATLADEVSASLAKQGL

SEQ ID NO: 333 - DNA, 1394 bp, Mus musculus
acaaccaccttctcctccgctgtcctcttctgtcctcgccttctgtcgattatcaggctttgaaccagtatggctgaccctcgccaggagtttgacacaatggaagaccatgctggagattacactctgctccaagaccaagaaggagacatggaccatggcttaaaagagtctcccccacagccccccgccgatgatggagcggaggaaccagggtcggagacctccgatgctaagagcactccaactgctgaagacgtgactgcgcccctagtggatgagagagctcccgacaagcaggccgctgcccagccccacacggagatcccagaaggaattacagccgaagaagcaggcatcggagacaccccgaaccaggaggaccaagccgctgggcatgtgactcaagctcgtgtggccagcaaagacaggacaggaaatgacgagaagaaagccaagggcgctgatggcaaaaccggggcgaagatcgccacacctcggggagcagcctctccggcccagaagggcacgtccaacgccaccaggatcccggccaagaccacgcccagccctaagactcctccagggtcaggtgaaccaccaaaatccggagaacgaagcggctacagcagccccggctctcccggaacgcctggcagtcgctcgcgcaccccatccctaccaacaccgcccacccgggagcccaagaaggtggcagtggtccgcactccccctaagtcaccatcagctagtaagagccgcctgcagactgcccctgtgcccatgccagacctaaagaatgtcaggtcgaagattggctctactgagaacctgaagcaccagccaggaggtggcaaggtgcagataattaataagaagctggatcttagcaacgtccagtccaagtgtggctcgaaggataatatcaaacacgtcccgggtggaggcagtgtgcaaatagtctacaagccggtggacctgagcaaagtgacctccaagtgtggctcgttagggaacatccatcacaagccaggaggtggccaggtggaagtaaaatcagagaagctggacttcaaggacagagtccagtcgaagattggctccttggataatatcacccacgtccctggaggagggaataagaagattgaaacccacaagctgaccttcagggagaatgccaaagccaagacagaccatggagcagaaattgtgtataagtcacccgtggtgtctggggacacatctccacggcacctcagcaatgtgtcttccacgggcagcatcgacatggtggactcaccacagcttgccacactagccgatgaagtgtctgcttccttggccaagcagggtttgtgatcaggctcccagggcagtcaataatcatggag

SEQ ID NO: 334 - protein, 430 aa, Mus musculus
MADPRQEFDTMEDHAGDYTLLQDQEGDMDHGLKESPPQPPADDGAEEPGSETSDAKSTPTAEDVTAPLVDERAPDKQAAAQPHTEIPEGITAEEAGIGDTPNQEDQAAGHVTQARVASKDRTGNDEKKAKGADGKTGAKIATPRGAASPAQKGTSNATRIPAKTTPSPKTPPGSGEPPKSGERSGYSSPGSPGTPGSRSRTPSLPTPPTREPKKVAVVRTPPKSPSASKSRLQTAPVPMPDLKNVRSKIGSTENLKHQPGGGKVQIINKKLDLSNVQSKCGSKDNIKHVPGGGSVQIVYKPVDLSKVTSKCGSLGNIHHKPGGGQVEVKSEKLDFKDRVQSKIGSLDNITHVPGGGNKKIETHKLTFRENAKAKTDHGAEIVYKSPVVSGDTSPRHLSNVSSTGSIDMVDSPQLATLADEVSASLAKQGL

SEQ ID NO: 335 - DNA, 1154 bp, Mus musculus
acaaccaccttctcctccgctgtcctcttctgtcctcgccttctgtcgattatcaggctttgaaccagtatggctgaccctcgccaggagtttgacacaatggaagaccatgctggagattacactctgctccaagaccaagaaggagacatggaccatggcttaaaagctcgtgtggccagcaaagacaggacaggaaatgacgagaagaaagccaagggcgctgatggcaaaaccggggcgaagatcgccacacctcggggagcagcctctccggcccagaagggcacgtccaacgccaccaggatcccggccaagaccacgcccagccctaagactcctccagggtcaggtgaaccaccaaaatccggagaacgaagcggctacagcagccccggctctcccggaacgcctggcagtcgctcgcgcaccccatccctaccaacaccgcccacccgggagcccaagaaggtggcagtggtccgcactccccctaagtcaccatcagctagtaagagccgcctgcagactgcccctgtgcccatgccagacctaaagaatgtcaggtcgaagattggctctactgagaacctgaagcaccagccaggaggtggcaaggtgcagataattaataagaagctggatcttagcaacgtccagtccaagtgtggctcgaaggataatatcaaacacgtcccgggtggaggcagtgtgcaaatagtctacaagccggtggacctgagcaaagtgacctccaagtgtggctcgttagggaacatccatcacaagccaggaggtggccaggtggaagtaaaatcagagaagctggacttcaaggacagagtccagtcgaagattggctccttggataatatcacccacgtccctggaggagggaataagaagattgaaacccacaagctgaccttcagggagaatgccaaagccaagacagaccatggagcagaaattgtgtataagtcacccgtggtgtctggggacacatctccacggcacctcagcaatgtgtcttccacgggcagcatcgacatggtggactcaccacagcttgccacactagccgatgaagtgtctgcttccttggccaagcagggtttgtgatcaggctcccagggcagtcaataatcatggag

SEQ ID NO: 336 - protein, 350 aa, Mus musculus
MADPRQEFDTMEDHAGDYTLLQDQEGDMDHGLKARVASKDRTGNDEKKAKGADGKTGAKIATPRGAASPAQKGTSNATRIPAKTTPSPKTPPGSGEPPKSGERSGYSSPGSPGTPGSRSRTPSLPTPPTREPKKVAVVRTPPKSPSASKSRLQTAPVPMPDLKNVRSKIGSTENLKHQPGGGKVQIINKKLDLSNVQSKCGSKDNIKHVPGGGSVQIVYKPVDLSKVTSKCGSLGNIHHKPGGGQVEVKSEKLDFKDRVQSKIGSLDNITHVPGGGNKKIETHKLTFRENAKAKTDHGAEIVYKSPVVSGDTSPRHLSNVSSTGSIDMVDSPQLATLADEVSASLAKQGL

SEQ ID NO: 337 - DNA, 1655 bp, Mus musculus
atgagctccccgccacccgcccgaggcttttaccgccaggaggtgaccaaaacggcctgggaggtgcgcgccgtgtaccaagacctgcagcccgttggctctggtgcctatggtgcagtgtgctctgcagtagacagccgcactggcaacaaggtggccatcaagaagttgtaccggcccttccagtcggagctgtttgccaagcgcgcctacagagagttgcgcctcctcaaacacatgcgccacgagaacgtcattgggctactggatgtgttcacacctgatgagtctctggacgacttcacagacttctacctggtgatgccattcatgggcactgatctgggcaaactcatgaagcatgagaccctgagtgaagacagaatccagtttcttgtgtatcagatgttgaaggggctgaagtatatccatgcggctggtgtcatccacagagacttgaagcctggcaacctggctgtgaatgaggactgtgagctgaagatcctagactttggccttgccaggcaggcagacagtgagatgacaggatatgtggtaacccggtggtatcgggcaccagaggtcatcttgaattggatgcgctacacgcagacagtggacatttggtccgttggctgcatcatggcggagatgattactgggaagatcctgttcaaaggcaatgaccacctggaccagctgaaggagatcatgaagatcacagggacgccccctcctgagtttgttcagaagctacagagtgcagaggccaagaactacatggaaggcctccctgagttagaaaagaaggattttgcctctgtcctgaccaacgcaagccctcaggctgtgaatctcctggaaaggatgctggtgctggatgcggaacagcgggtgacagcagctgaggcgttaacccatccatactttgagtcccttcgggacactgaggatgaacccaaggcccagaaatatgacgactcctttgatgatgtagaccgcacccttgaggaatggaagcgtgtgacttacaaggaagttctcagcttcaagcctcctaggcagctaggagccagagttccaaaggagacggctctgtgacgacctctgggtggtttggggggtatccaaaggaggttggctcggagcttcacggcaccttggcttcccttctctggaaaaggaatcctggttaacaccccgacagtgcctggagcttgtatcccaagtcttccacctggacatgctgtgtagacccttgaatcatgaaccctccatctccaaacctgttcttcggctttcgagtgccccagatgaccctggaagaacatctaagctttctgtccaagacccctacccaacatgggactagcctttgaattctggagttgtacatgaaatcagtattcgtgaaaaagcttcagagtgagcagagcttaggagacaagtgccagacctgagctctgctcgctctggacaatgccaaggccaactcctgagacggaatgagacagaggttttggggacactgactcagggacatcatctcttctggaagtgggtggattctcttacacccttagcctggaattcgaaccagccatttggtgttgcctaagtggctgggggcaaataaacccttttgtagatctccc

SEQ ID NO: 338 - protein, 366 aa, Mus musculus
MSSPPPARGFYRQEVTKTAWEVRAVYQDLQPVGSGAYGAVCSAVDSRTGNKVAIKKLYRPFQSELFAKRAYRELRLLKHMRHENVIGLLDVFTPDESLDDFTDFYLVMPFMGTDLGKLMKHETLSEDRIQFLVYQMLKGLKYIHAAGVIHRDLKPGNLAVNEDCELKILDFGLARQADSEMTGYVVTRWYRAPEVILNWMRYTQTVDIWSVGCIMAEMITGKILFKGNDHLDQLKEIMKITGTPPPEFVQKLQSAEAKNYMEGLPELEKKDFASVLTNASPQAVNLLERMLVLDAEQRVTAAEALTHPYFESLRDTEDEPKAQKYDDSFDDVDRTLEEWKRVTYKEVLSFKPPRQLGARVPKETAL

SEQ ID NO: 339 - DNA, 1929 bp, Mus musculus
agactataaaccaacaccccgggagttgaggcgccggtttggtggcgcgttttctagcgaagtcccacgtgaaggatagcggtgaccggagcaggacacaaacatggcaggcgcacacagcactccgttatggagcagacatctgctcaaagctgtcctgatggtcctcgtggcccttttcctcgtccactccgcatcagcccagtctcatcgagagtttgcctcacctggtcaacagaagaaggagacctcagctgatattttgacccagattggccgatctctgaaggagatgttggatacctggctagggccagagaccatgcatgtgatttcagagaccctgttgcaggtgatgtgggccatctcatcagccatctctgtggcctgctttgccctgtctgggattgctgcccagttgctgagtgccctggggctggatggtgaacaactcacccagggcttgaagctcagccctagccaagtccagacccttctactgtggggagcagcagcactggtcatctactggttgctgtccctgctcctaggcttggtcttggccttgctagggaggatcctggggggtctgaaacttgttctttttgtcgctggctttgtggccctggtgaggtctgtgcccgacccatctacccgggccttgatgctcttggccttgttaactctctttgccttgctgagccggctcactggctccaggagctcagggagccacctggaagccaaggtgagagggctggagcgccagatagaagagcttagagggaggcagaggcgagcagccaagatgcccaggagcatggaagaagagtgacaagggcgtccccaagagacaccctcaccgtaccaaagagctgagctgcttctgggtctcacggacctccttgcagcccccttgccctttccttgccttgtgtccggaaccttcacacctttacccctgcgctagcccctggctgagaggagagaacctgtcctctgccggtgctcagtcaagtgatggctccctgcccttctgtgctcccagcctgcctcccccagggcaggttggagccctcagccctggcttctgctctcagccagcaccactgcccgctgatctccgtgatgattaacctgctgcttccttacacaaggcctgcccaggctgaagctcctgtttgaccactccccccccccccccccagctcttttcttcctgctcccagccacactaccatcccaagtcccttgcggccctctctgtcttcctcattgcactgcaatgggcaggggtaggagattggagataaggatgaagggggaggaaagggtccctggaggcctgtgcatctatgctctgttacaagtgccttagcaggagtcagcagcaccctccaggtgccccttgccacactgaatgtgggaaagtgtgctgtggctacttcgtggtcagagtgagccccttgcagaatccccactccagcaaacaaagcaacggccctgctgggattgtcgaatctcccttgagggtttcagggaccttgaaaagggcaggaggacctgctgtcttgcagttttacccctgtccactctctgccatccagaagcaagcgttggtcagtgttgtgtcccagtagctgggaagggcacggctttgccctgatctgttctgcagggctaggagtgagcctgccactaacccctctccaccacttgctcactcttggccttggccttggcctttaggtccctggtggagggagatgacccatgccaggtccagcacaagatgtgaagattaaatgcctattcttactgaaggtttgatgtggaatcatggctgcagtgatatgtttttatcagcgcttggtggttttaaagtgcatgctattttattatcttcttctgaataaaatgtatttactc

SEQ ID NO: 340 - protein, 243 aa, Mus musculus
MAGAHSTPLWSRHLLKAVLMVLVALFLVHSASAQSHREFASPGQQKKETSADILTQIGRSLKEMLDTWLGPETMHVISETLLQVMWAISSAISVACFALSGIAAQLLSALGLDGEQLTQGLKLSPSQVQTLLLWGAAALVIYWLLSLLLGLVLALLGRILGGLKLVLFVAGFVALVRSVPDPSTRALMLLALLTLFALLSRLTGSRSSGSHLEAKVRGLERQIEELRGRQRRAAKMPRSMEEE

SEQ ID NO: 341 - DNA, 2013 bp, Mus musculus
ttattctccgaggggcccgacagcccccgggagctccaggatgaggagtccggcagctgcctctgggtgcagaagtccaagctgttggtgattgaagtgaagactatttcctgtcattatagtcgtcgcgctccttctcgacagtccatggacatccaggccagctactgggcccgtgggccccagagccgcacgtgtaggctgcgcccgggatcccctgagccgccaccccgccgaccctgggcctccagggtgctgcaggaggcaaccaactggcgggcgggcccccccgccgaggtccgagcccgggaacaagagaaaagaaaggcggcgtcgcaggagcgggaggccaaggagaccgagagaaaaaggcgcaaggctggcggggcccgacggagtcccctaggtcagccccgcccagagccccggaacgcccttcgggcagcccaacctacagggtttccagttttctccagaccagagcgcttcgggcaggtggggcgagcgccccgaccatccgtgctcccgcagggtgacccaggggttgcatgggcggggccatggggaggcagaaggccagggccccctagctacgaggctcacctgctgttgagcccggagctctcccgggcgcccacctcatcagccccagttccagccaccaccaggacagagggagggcgcacgaagaagaggctggatcctcgaatctaccgggatgttctaggagcttggggtctcagacagggacggggactcttaggaggtgctccaggctgtacagcagccagagctaggccagagtcttgcaaaggggctatagagaaaagctcaggcctagttgctgctggcctgaacagtgctggcgatagtcattcccaaggcaaaacgactggcggtccaggcacggacgcagctctctctaggtccgcgatcagcagcccacctcgtcctgttcccaggtccaggcagcacctcagggggtcaaggaaagggaaagaaggaagtgagcagatatggcttcccacgtgttggcttgcctcccctaaaaagcctccagttaggcacagccagacgctccctagaccctgggctcctggaggcaccgggtggaaagagtccctgggtcaaagagagggggcagaacatgagaccctggaagtttggaaggtgacccgccgtgcccacaccctgccccgcatttcccgaggtcccgctggtagagaaggcatctttgtcattgacgccacatgcgtggtgataaagtcccagtacgttccgacccctcgaacccagcagggtcagctcgtgccctctggggagtcgtgcagtgtgagcgacagccttagtcaacccaagccctgtcacgaggaggagggcgagggggccgctgccaacccttcagtttgccaaaagcgactgttgagcagtcgagtcttaaaccaaccgagcgagggtcgcgagtgcgaggccgaggtcggacagcagggggattcttcattggaggagcgctcctccagcggtttggggttccctgtcggagaagtgaacccgcgagacgcccccacgcagccaggtagccaagagcacccgaccttaggcccagcggctccggtatgcgccggcagcttgaagggctcagaagcggctggtgtcccgcggcgcgcgggcgggggctgggcgcggactccagggccctacgccggggcgttgcgagaagccgtgtcccgcatccgccgccacaccgccccagattcggactcagacgaagcggaggatctcagcgtccatagcggctcctctgatggaagcgacacagacgccccaggcgcctcctggcggaatgagaggaccctgcctgcgcttgggaacacccggcccagggaaggcgggaagacagcagggctgagcgacagtatccgggagattgtggatgtcatcagtcaaaccgaggaaggcttcatccgagaggacaccaggaaaacgccacagggaaatagagagagggagtga

SEQ ID NO: 342 - protein, 670 aa, Mus musculus
LFSEGPDSPRELQDEESGSCLWVQKSKLLVIEVKTISCHYSRRAPSRQSMDIQASYWARGPQSRTCRLRPGSPEPPPRRPWASRVLQEATNWRAGPPAEVRAREQEKRKAASQEREAKETERKRRKAGGARRSPLGQPRPEPRNALRAAQPTGFPVFSRPERFGQVGRAPRPSVLPQGDPGVAWAGPWGGRRPGPPSYEAHLLLSPELSRAPTSSAPVPATTRTEGGRTKKRLDPRIYRDVLGAWGLRQGRGLLGGAPGCTAARARPESCKGAIEKSSGLVAAGLNSAGDSHSQGKTTGGPGTDAALSRSAISSPPRPVPRSRQHLRGSRKGKEGSEQIWLPTCWLASPKKPPVRHSQTLPRPWAPGGTGWKESLGQREGAEHETLEVWKVTRRAHTLPRISRGPAGREGIFVIDATCVVIKSQYVPTPRTQQGQLVPSGESCSVSDSLSQPKPCHEEEGEGAAANPSVCQKRLLSSRVLNQPSEGRECEAEVGQQGDSSLEERSSSGLGFPVGEVNPRDAPTQPGSQEHPTLGPAAPVCAGSLKGSEAAGVPRRAGGGWARTPGPYAGALREAVSRIRRHTAPDSDSDEAEDLSVHSGSSDGSDTDAPGASWRNERTLPALGNTRPREGGKTAGLSDSIREIVDVISQTEEGFIREDTRKTPQGNRERE

SEQ ID NO: 343 - DNA, 4153 bp, Mus musculus
ctggagtggctctaggcggtccaaacctcggaaccctggggtgtgcgtggagcagttggaaaggaatagggcccgcgtctccttcccggctcggcgctcgggaggcggcggcggcggagcgaggcccgggcgaggcgaggcgaggcgagacgagggcggcgggcgccggggcccgcggccggcacgacggagcccccgcacggccggcggcagcggttggcggcggccccgggctcccggcgtgggaagcggcggcggggcggcggcggcagcgccatggagccgcgggaggtgaaggaccgaatcctggagaacatctcgctgtcggtgaagaagctgcagagctactttgcagcatgtgaggacgagacccctgccatccggaaccacgacaaggtcctgcagcgcctgtgtgagcacctggaccacgccctgctgtacgggttgcaagacttgtcctctggctactgggtgctcgtggtccattttacccgcagagaggccatcaggcaaattgaggtgctacagcatgtagccaccaacctggggcgaagccgagcctggctctacctggccctcaatgagaattccttggagagctacctgcgtctgttccaggagaacctgggcctgctacagaagtactatgtcaggaacgccctggtctgcagccacgatcacctgactctcttcctgaccttggtgtctgggttggagtttattcggttcgacctggatctggacgccccgtacttagacctggctccgtacatgcctgactattataaacctcagtacctgctggactttgaagaccgccttcctagctcagtccacggttcagacagcctctccctaaactccttcaattctgtcacctccaccaacctggaatgggacgacagtgcaattgccccatctagcgaggatggagacctcacggacaccatcagtggtccgcgttccactgcttcagacctgaccagtagcaagacatccaccaagagccccacccagcgtcataaccccttcaatgaggagcaagcagagactgcatcatccgacaccacccctgtgcacactacctctcaggagaaggaggaggcccaggccccagaccagccagacgcttgtacagagcttgaagttatcagggtcaccaagaagaagaagattggcaagaagaaaaagaccaagctggacgaggatgcaagcccactgcaccccacctctagtcagcagaaatgtggccagcagggggaaggtgatggacttgtgggcaccccaggcctggcgagggacccttcggacactgtacttgcttcccctcaggagcaaggggaaggactcagcagtacggctgggagcagcgagctctccgagctcagccagatgggcttgctcatccccgagatgaaggacacctccatggagtgcctaggacagcctctgagcaaggtcattgacaaactccacggccagctggaccctagcacctggtgctcccatgccgatcctcccgagcagtcctttcgggccggctctccgggggaggccccggagaaaccaccattttgcgactttagtgaggggcttccagcccccatggacttctaccggtttacagtcgagagtccaagtactgttgcaccaggtggcggccaccatgaccctccagggcctagccaaccgctgcatgttcctggtagccctgcggctgctctccaagaagaagaagaaggaggaggaagaggagagggacagacatctcagcccctagaagaccggcaaggagaggagattcaggagccagagcctcaggaaccggacagccagttgccactggtcagccaggagcccgtgcccgaacctgtgtcccagcctgaacctggaacccacgaggctctttgcaagctcaagcgagaccagcccagtccttgtctgagcagtgctgaggactccggggtagaggagggccagggtagcccttcagagatgacgcacccctcagagttcagagtagacaacaaccacttgctcctcctcatgattcacgtctttcgagaaaacgaagagcagttgttcaaaatgatccggatgagcacagggcacatggagggtaatctgcaactgctctacgtgctactcacagactgctatgtctacctgcttcggaaaggggccacagaaaagccatacctggtggaagaggctgtttcttacaatgaacttgactatgtgtcggttggcctcgaccaacagactgtcaagctggtgtgcaccaaccgcaggaagcagtttctgctggacacagccgacgtggccctggctgagctcttcttggcgtctctgaagtcagccatgatcaaaggttgccgggaaccaccctaccccagcatcctgactgatgccaccatggagaagctggcgttggcgaaatttgtcgcccaggagtccaaatgtgaggcatccgccgtgaccgtgcatttctatgggcttgtgcactgggaggaccccatggaagaggccctgggccctgttccctgccagtgctcacccgctgagggcaccatcaccaaagaaggcatgctgcactacaaggctagcacctcctacctgggcaaggaacactggaaggcctgcttcgtggtgctcagcaatgggatcctctaccagtatcctgaccgcacggacgtcatccccctgctgtccgtgaacatgggtggggaacagtgcggtggctgccggagatccaacaccacggatcggccccacgccttccaggtcattctggctgaccggccctgcctggagctaagcgccgacagcgaggctgagatggctgactggatgcaacatctctgccaggccgtgtccaaaggagtcataccccagggcatagctcccagcccctgtatcccttgctgcctggtgatcacagaggaccgcctcttcacctgccacgaggattgccaaaccagcttctttcgctccctgggcacagccaggctggcagacatcactgccatctccacggagctgggcaaggaatactgtgtcctggagttctcccaggatagcccacagctgctccagccttgggtcatctacctgagctgcacttccgagctggaccggttcctgactgccctgagctctgggtggaaagccatctaccaggtagaccttcctcacaaggccatccatgaagcttccatcaagcagaaatttgaagacgccctgagcctcatccacagcgcctggcagcggagcgacagtctctgccgcggcagggcctcccgggacccctggtgctgaggcgtggctgggcagcactgtgggcagaccagaaggaggcaggctgactgacttctgcactgcgttgtcccactgtggtgtttcggggccgggggtcgacagcccactgctgccttggggcggcagaaccacatagtgcggctagagacaggagttcagagtcagtgcctggcaccgtaggcaccctgcccactggtagtgactagcggtcactggggcagaaggtctgagccctgtgggctctgtagacacttggtgtcccctggccaccattgagtcctcaccatctgctcagggtgacagagagaatgacaacatacatttaagagggagcaaagagacggggagggtgggtgcgccatcttcctttcctgggtcaggggcctgggcggatggtcagggccccctggggggtcctgagtgcccagccacccttgttcatttttgaacagtgtcccaatcacacaaagaaagacaaacactagggatctgtgcatgcccccctcacaaatccaccccatgcacagcctgggcccagcccgcagccctccagggctgccaggaggccctgcatgtccacagccccgcctctcctcttcctcaaatacagcagagcttgtagaaccaggggtcagttggctcctcttgccaggagcaaaggagagggtcagagagaggagcggagcccatgagcgtggtggcttctttgacatctgacgaccaacccctgcttggctggggctggcccttcttgaggtctctgttaggtcccttgagggacaggtcaggtggattgggttttgttttttaaaataaaattgatgttatattgctg

SEQ ID NO: 344 - protein, 1082 aa, Mus musculus
GPRLLPGSALGRRRRRSEARARRGEARRGRRAPGPAAGTTEPPHGRRQRLAAAPGSRRGKRRRGGGGSAMEPREVKDRILENISLSVKKLQSYFAACEDETPAIRNHDKVLQRLCEHLDHALLYGLQDLSSGYWVLVVHFTRREAIRQIEVLQHVATNLGRSRAWLYLALNENSLESYLRLFQENLGLLQKYYVRNALVCSHDHLTLFLTLVSGLEFIRFDLDLDAPYLDLAPYMPDYYKPQYLLDFEDRLPSSVHGSDSLSLNSFNSVTSTNLEWDDSAIAPSSEDGDLTDTISGPRSTASDLTSSKTSTKSPTQRHNPFNEEQAETASSDTTPVHTTSQEKEEAQAPDQPDACTELEVIRVTKKKKIGKKKKTKLDEDASPLHPTSSQQKCGQQGEGDGLVGTPGLARDPSDTVLASPQEQGEGLSSTAGSSELSELSQMGLLIPEMKDTSMECLGQPLSKVIDKLHGQLDPSTWCSHADPPEQSFRAGSPGEAPEKPPFCDFSEGLPAPMDFYRFTVESPSTVAPGGGHHDPPGPSQPLHVPGSPAAALQEEEEGGGRGEGQTSQPLEDRQGEEIQEPEPQEPDSQLPLVSQEPVPEPVSQPEPGTHEALCKLKRDQPSPCLSSAEDSGVEEGQGSPSEMTHPSEFRVDNNHLLLLMIHVFRENEEQLFKMIRMSTGHMEGNLQLLYVLLTDCYVYLLRKGATEKPYLVEEAVSYNELDYVSVGLDQQTVKLVCTNRRKQFLLDTADVALAELFLASLKSAMIKGCREPPYPSILTDATMEKLALAKFVAQESKCEASAVTVHFYGLVHWEDPMEEALGPVPCQCSPAEGTITKEGMLHYKASTSYLGKEHWKACFVVLSNGILYQYPDRTDVIPLLSVNMGGEQCGGCRRSNTTDRPHAFQVILADRPCLELSADSEAEMADWMQHLCQAVSKGVIPQGIAPSPCIPCCLVITEDRLFTCHEDCQTSFFRSLGTARLADITAISTELGKEYCVLEFSQDSPQLLQPWVIYLSCTSELDRFLTALSSGWKAIYQVDLPHKAIHEASIKQKFEDALSLIHSAWQRSDSLCRGRASRDPWC

SEQ ID NO: 345 - DNA, 6506 bp, Mus musculus
gaacttcttcaagatctggaaaactgtgaaaacgatcctgtggccatagcagaatgttttgtgtccaagagtgaagagttccacatttatacccagtattgcaccaattacccaaggtctgtggccgtgctaactgagtgcatgaggaacaagatactcaccaagttcttccgggagcgccaggaaactctgagacactcactacccctagggtcctacctcctaaaaccagtccagcggattctcaaatatcatctccttcttcatgaaatagagaaccaccttgataaggccacggaaggctacgatgttgtgctggatgccatagacacgatgcagcgagtggcctggcacatcaatgacatgaaacggaagcatgagcatgctgtccgcttgcaggagatccagagcttgctaaccaactgggaggggcctgacctcaccagctatggggagctggtgcttgaaggaaccttccgcatccagaaggccaaaaaggagaggactctttttctcctggaccagctgctgctcatcacaaaaaagagagatgacacgtttacatacaaggctcacatcctgtgtggcaacctcatgcttgtagaggtcataccaaaagaaccgctcagcttcagtgtcttccactacaagaaccccaagcttcagcacacagttcaggccaaatcccagcaagacaaacgtctctgggttctgcacctgaagagattaattctggagaaccacgcagcagcagcaaagatcccagctaaggccaagcaagcgattcttgaaatggacgccatccactatccaggcttctgttacagtcctgagggagagatgaagacaccatgtggttctgcaccccatcggctgagacggaagtcagaaccttcctcgagatcacacaaagtgttgaagaccagcgaaacttcacaagatatccagaaggtttctagagaggaaagcccttcccagctgacttctgccgtgcctgcccagaggaactgccagcccggcagcgctgccgttatcaatatgcttcgcgggggaggcggtgttagaagcccatggacagatcaccacatcaggcagcggacggatcaccacatccggcagcccttgtttccaagccgccggtctccacaggagaatgaggacgatgacgacgattaccagatgttcgtcccgtccttttcttcctcggatctcaactccaccaggttgtgtgaagagaacgcttcaagtcgcccttgcagctggcatctgggcctcatcgaacccacagagatctccagctctggtcacaggatagtccgacgggccagtagtgcaggtgaaagcaacgcatgccctcctgaagtaagaattagagactgtgatgactctcagtactgtcccgggagacagctgcagaacagtcctcgaccaggaggagagagggggatgactccctatgggtcgtctgtagagttgaccattgatgatatagaccatgtctatgataacataagttttgaagacttaaagttaatggttgctaagcgggatgaaactgaatgttctttctccaaaccatccagagactctgttcgccccaagagtaccccagagttagccttctcaaagagacaggttagccacagtacaagctctctccactcaaggaaagaggcaggcctcggtggtcaagaggcatccacccaaagcgtacatgaacaccaggaagtggaagaaaacatctatgacaccatagggcttccagacccaccatcgatgaacttgaaccacagcagccttcatcagcccaaaaggagcaccttcctgggtctggaagctgattttgcatgctgtgacagcctgagaccatttgtctcccaggatagcctccagttcagtgaggatgacatatcttaccaccagggaccctccgatactgaatatttgagtttgttatatgactctccccgctgtaatctgcctattgcagataaggctctgtccgacaaattgtctgaagaagtagatgaaatctggaatgatctggaaaattacatcaagaaaaatgaagacaaatcaagagaccgcctccttgcggcctttcctgtgagcaaagacgatgcaccagagaggctatatgttgacagcacccatgagctgggcagggatacaggacatgccacatctatgctggcccttcctacaagccagactttcctcctgcctgggaagagcagagttgtcagagctagcagggccaactgctccctggataatgacattatttcaacagaaggttccttcctgagtcttaaccaactctctctggccagtgatgggcctcctgtggacaatccctatgacctggccaactgcagcctgccccagacagacccagaaaaccctgaccccgggatggaggtcacagacaagactaagagcagggtctttatgatggccaggcagtatagtcaaaagatcaagaaggtaaatcagattttgaaagtgaaaagcccagagttggagcaaccaccgtccagtcagcataggcccagtcacaaagacctggtggccatcttggaagagaagaggcaaggagggcccgccattggtgccaggatcgctgaatattcccaactgtatgaccagattgtgttcagagagacaccccttaaagctcagaaggatggctgggccagcccccaaggacccaccctccacaggcctgtgtcacctccccaggcccagggcgctggtgaggactggctctggcattcgccctacagtaacggagagttggcagatttctctccccagacagaacaagactcaaaatcaaaataccccatcacattagagagcaccacaaaaattaggcccaggcagttgtcgggtgcttgttcggtgccgtctctccaagtgtcggaccctctgctgggctctgtgcagcagagatgcagcgtggtggtcagccagccccacaaagagaactcaggtcagagtcctctttacaactcgctgggtcgcaaagcaatcagcgctaaaccccagccttatagcaggcctcagtcatcttcctcaatcttgataaacaaatctctggactctatcaactaccccagtgagacagagacgaagcaactactctcttcacagaaaagtcccagaggcgcgagccagcaggatttgccgtcagggctagcaaactcatgtcaacaggacaggggcaaacggtccgatctcacgctccaagactcgcagaaggttctcgtggtaaatagaaatttacccttaagcgctcaaatagcgacgcagaactacttttgtaatttcaaagatcccgagggagatgaagatgactatgtggaaatcaagtcagaagaggacgaagtgcgtctggatctctctccaaggcggggcaggaagtctgacccacagaccccggaccctgactgttcggatagcatctgtagccacagcacaccttactctttgaaggagccagtgagtggcaggcttgggcttcctccttacctgacagcatgtaaggactctgataaactgaatgattatctgtggagggggccctcacccaatcagcaaaacattgtccaatctctgagggagaaatttcagtgtcttagctcaagcagctttgcctaggtttctagaactgtccaaattagctccctaggcttacaaattaccatacgaatgaggttgttttttctgtattttctttcagtatatgcactggtttaaaacaattttgtaataacaaaagggtaaaatgtgctttcgcttatagcacaactctttgagctggcccaccatgacatttaccgccccgacccccatgtcctaacagtggtacccactcatagaataccttctctccacatcccaaggagttttatactgtgactcagaggcaccacaagtgaatctctctctcacggttttttaaaaaaagagactagagttatttaaagagtcatgcttatatgtggcatctctatatttgacaagactcaagaatgatgcatgccagagaccactggttagactgtagccttgtcacgtattttaaggacaccatgctggtgtcctgatcacatttcctttagatgccaacatactgtgactattgaagaggttaaaatgtagccctagcaccaacttgctattgggaaaaacaaaatgtttttacttgtgttccaggacaaggcccagatggtgtgccactatttatgataagtctacagtttccggggtaaaatataaactatttctttcatgtcataaagaaagccaatcttaataaaatacaagccaagttgattattagataagatagggagacttctgaaaacaccctatttcttcatattacaagtaaaggggaattgcctctgtaaagacaacaacaggagaagacatgactgtagacacctgcctcctatcagtacagggtaaatcttcaggtaaaataagacaaaatgcatttaaatgcccctgtcaagagcagttcttcattggcactttcctgggcttgaggttcaactgaatgcccacttgagaagtcctggccacagtattgggcaagagtgtattttctaaacagctaataacccagggcctttcgatgttttggaatatacagaacggagactctggttgctggattccgactagtaacttcccttaccctgtacttacagtctcgtacagcacctcactgtgatgccacacctgtctaactccttgtagacaggaatggaagatgaaaagcaaggcactgtgattcaaaggaaaacgagagaaacgtaaaagcgtcttcctgaaggccccgtgcgtacagtcagaataggctctctatttctgttcccatttctacacattcgggactcctccttcactccttcaccctctcagtctcagttttaacgtttctttttattagaattaggcaacctgctccatttcaagaagatatgatgataaacacactactgagtgttgttgagtgtccagagtgtgtttcatcgctttgcacatctttggctacagagctcagtcctactttgtgttgttcaagtgtctaatcttgggattagactggtgagattatctttcctgattttgctaagagatttcttcagaactcataacttgtgaggagagcctgtaaattggaacctaattctagaatagcttgtccttttcccacatcatctgaaagaacatcactgtgcacataactcttggttccaggttaaaagtagtctctgagctagtacaagtattaagacttaggtgaccgacttcttctggatgggtttcaatgccactcaacctctgaaaagaatcccataacagatttttatgtgtagaaggctcactgcaagaagcatgtgagtaattggaacacagtcctctttatttctacccatcgcatctactccactgcccacaacaggggagaatgcctccatttgtctagtttctgaaagcctggtggttgcacattctaaatcttgcttacaaatcattttcttatttaccaagtctgacacatcttctgttgggggttcactggtctgacttattaccagatgtttctgaagtgcaccttgaagctgatccggaacagctttctcttcaggcaaataagaccaatcaaaatctgggcaaaaaaatagccaggctaaattccctctgattctgcagtatcgatgaagactctgacgacacttctcaagctttcacatccactagagccccatctgaacttctgttctcttcagtttcgacagcttttctccatgagctcctgctctcagttatcaaggtttctggagtctggagaatttgtttcctggttaagaagggatagaaattaaagtgtcaactagctcctccaattcgacttcttttccctcctgatttttttttcctttttagtctctatggcccacatcccagtacagttcatgttactgtcctgtttgagtctcagaaatgagtaattcttcacaccagtgtttcattgcatggtttggtgtcacctgcaaaggggaatgtcacattgtacaaaacgtcttatgtaagtggtcctttaggctctaggataaagctgtagttttattgatcatgtctgtggaccaggctgcagactttgagagcctgtgtgtgtgtgtgtgtgagtgtgtgcttagatgttccctcaatgttatcagttcaatgcttttgtttaaaatagtttcttctgaaggtgggggtggggatgtacataactgggaacgttttatgtacttaaatgttcttactgggttcctgtactgaagggtccaatttttcttttttatataagttcacttttcacctactttttgtcttcatgggggggggggaaagttgtgcatcttggaaaacatactttaaatactgtatataagacaatgaaacttagtaatacccattatttaataaagtttgtaaagtgg

SEQ ID NO: 346 - protein, 1220 aa, Mus musculus
ELLQDLENCENDPVAIAECFVSKSEEFHIYTQYCTNYPRSVAVLTECMRNKILTKFFRERQETLRHSLPLGSYLLKPVQRILKYHLLLHEIENHLDKATEGYDVVLDAIDTMQRVAWHINDMKRKHEHAVRLQEIQSLLTNWEGPDLTSYGELVLEGTFRIQKAKKERTLFLLDQLLLITKKRDDTFTYKAHILCGNLMLVEVIPKEPLSFSVFHYKNPKLQHTVQAKSQQDKRLWVLHLKRLILENHAAAAKIPAKAKQAILEMDAIHYPGFCYSPEGEMKTPCGSAPHRLRRKSEPSSRSHKVLKTSETSQDIQKVSREESPSQLTSAVPAQRNCQPGSAAVINMLRGGGGVRSPWTDHHIRQRTDHHIRQPLFPSRRSPQENEDDDDDYQMFVPSFSSSDLNSTRLCEENASSRPCSWHLGLIEPTEISSSGHRIVRRASSAGESNACPPEVRIRDCDDSQYCPGRQLQNSPRPGGERGMTPYGSSVELTIDDIDHVYDNISFEDLKLMVAKRDETECSFSKPSRDSVRPKSTPELAFSKRQVSHSTSSLHSRKEAGLGGQEASTQSVHEHQEVEENIYDTIGLPDPPSMNLNHSSLHQPKRSTFLGLEADFACCDSLRPFVSQDSLQFSEDDISYHQGPSDTEYLSLLYDSPRCNLPIADKALSDKLSEEVDEIWNDLENYIKKNEDKSRDRLLAAFPVSKDDAPERLYVDSTHELGRDTGHATSMLALPTSQTFLLPGKSRVVRASRANCSLDNDIISTEGSFLSLNQLSLASDGPPVDNPYDLANCSLPQTDPENPDPGMEVTDKTKSRVFMMARQYSQKIKKVNQILKVKSPELEQPPSSQHRPSHKDLVAILEEKRQGGPAIGARIAEYSQLYDQIVFRETPLKAQKDGWASPQGPTLHRPVSPPQAQGAGEDWLWHSPYSNGELADFSPQTEQDSKSKYPITLESTTKIRPRQLSGACSVPSLQVSDPLLGSVQQRCSVVVSQPHKENSGQSPLYNSLGRKAISAKPQPYSRPQSSSSILINKSLDSINYPSETETKQLLSSQKSPRGASQQDLPSGLANSCQQDRGKRSDLTLQDSQKVLVVNRNLPLSAQIATQNYFCNFKDPEGDEDDYVEIKSEEDEVRLDLSPRRGRKSDPQTPDPDCSDSICSHSTPYSLKEPVSGRLGLPPYLTACKDSDKLNDYLWRGPSPNQQNIVQSLREKFQCLSSSSFA

SEQ ID NO: 347 - DNA, 4621 bp, Mus musculus
cagctcacaactctgaggggagcaatcctagaagacgctgtcccctccacagctcggcacggcaccgcccggggcctacccctcaaggaagtcctggagtatgttatcccagaactgagtatccagtgtctgcggcaagcagccaactcccccaaggtcccagagcagctgctcaagctggatgaacaagggctgagcttccagcacaaaattgggatcctgtactgcagagctgggcagagcacggaggaggagatgtacaacaacgagactgcagggccggccttcgaggagttcctggacctcctcggccagagagtgcggctgaagggtttcagcaagtaccgtgcgcagctggacaataagacggattccacagggactcactccctctataccacatataaagacttcgaactcatgttccatgtgtcgacgctgcttccatacatgccaaacaacaggcagcagcttctgaggaagagacacatcgggaacgacatcgtcaccattgtcttccaagagcccggcgccctccccttcacccccaagaacattcgttcacacttccagcacgtcttcgtcatagtgaaggtgcacaacccctgcactgaaaacgtgtgctacagtgttggagtctccaggtcaaaggatgtccctcccttcggtcccccaatccccaaaggtgtaacttttccaaagtcagctgtcttccgggacttccttttagccaaagtgatcaatgcagaaaatgcggcccataagtcagagaaattccgggccatggctacccgaacaaggcaagaatacttgaaggatttagccgagaactttgtcacaaccgccacagtggacacttctgcaaaattcagcttcatcacgctgggggcaaagaagaaagagcgggtaaagccaaggaaggacgcgcacctgttcagcatcggggccatcatgtggcacgtggtggcacgggactttggccagtccgcggacattgagtgtctcctggggatctccaatgagttcatcatgctgatcgagaaggattccaagaatgtggtgtttaactgttcctgtagggacgtgattggctggacttcagggctagtgagcatcaaagccttctatgaaaggggagagtgcctcctgctctcctccgtggataaccgttctgaagacatccgagaaatagtgcaacgactgctaatagtaacaagaggctgcgagactgtggaaatgaccctgagacgaaacgggctgggtcagcttggcttccatgtgaactttgaaggaattgttgccgatgtggaacctttcggctttgcctggaaggcaggccttcgccaagggagccggcttgtggagatctgcaaggtggctgtggccacgctgacccacgagcagatgattgacttactgcggacatctgtgactgtgaaagtagttatcatccagccccacgaggatggctctccccgcaggggctgttcagagctctgccggatccccatggtggaatacaagctggacagcgagggcacaccctgtgagtacaagacaccttttaggaggaacaccacgtggcaccgtgtgcccacccctgccctacagccagtttccagagcctcacctgtgcctggcacacctgaccgactccagtgccagccgctgctgcagcaggcccaggccgccatcccccggagcacatcctttgataggaagctgcctgatggcaccagaagttctcccagcaaccagtcatcatctagcgacccaggacctggtgggagcggaccctggcggccacaagtgggctacgatgggtgcccatcacccctcctgctggagcaccagggcccaggctctgtggagtgcgatggaaccggggagcaggaggacctcttggagggaggcaggcttccagaaaccaaatggcatggcccaccttccaaggtcctgagctcctataaggaaagagtgctgcagaaagacggaagctgcaaagagtcccccaataagctatctcatattggggataagagctgctccagccactccagcagcaacactctgtctagtaacacctccagcaacagtgatgacaagcactttgggtcaggggacctgatggaccccgagctgctgggactgacctacatcaaaggcgcgtccaccgacagcggcatcgacaccacgccgtgcatgccagccaccatccttggcccagtgcatctgacaggcagcaggtccctgatgcacagccgggctgagcagtgggcagatgctgctgatgtctcggtagctgacgatgaccctgccaagatgtatgccctgcatggctatgcctctgccatctccagcagcgctgctgacggtagcatgggtgacctcagtgaggtctcctcccactccagtggctcgcagcactcaggaagcccttcagctcactgctccaaaagcaccggctctctggacagttccaaagtctacattgtcactcacggcggcggtcagcaggcacctggggcggtgacaaagccttaccacagacaaggagcagcaaacaaatatgtcattggctggaaaaagtcagaaggtagcccaccacccgaggaacctgaagtgacggaatgccccaggatatatggtgagatggacatcatgtccacagccactcagcacccggcagtggtgggagactctgtttcagaaactcagcatgtcctatccaaagatgactttctgaagttgatgctgccggacagccccttagtggaggaggggagacggaagttttcgttctacgggaacgtgtctccacggaggtcgctgtaccgaacactgtccgatgagagcgtgtgcagcaaccggaggggctcttcctttgccagctcacgaagctccatcctagagcaggcactgcccaacgacattctgtttagcacgaccccaccctaccacagtacgctgcctccaagaacccaccctgcacccagcatggggagcctacggaatgagttctggttctcggatgggtccttatcagacaagtccaagtgtgcagatcctggcctgatgccgctgccagacacagctgcagggttagactggtcccacctcgtggatgctgcacgagcatttgaaggtcttgactcagatgaagaactcgggcttctctgtcaccacgcctcctacctagaccagagggtagcctccttctgtaccctgaccgacctccagcatggacaagaactagaaggggccccagagctgtccttgtgtgtagatcccaccagtggcaaagagttcatggatacacctggggagcgatcgccctccacactgactgggaaagttaaccagctagaactgattctccgacaactgcagactgaccttcggaaggagaagcaggacaaggcggtgctgcaggctgaggtccagcacctgaggcaggacaacatgcggctgcaggaagagtcacagacagccacagcccagctgcgcaagttcaccgagtggttttttagcaccattgacaagaaggcctgatcagctcgctgctcctcaccttgggaccacgggctggtcggcctgcctgcctgccaccctgcctacccgtggtcccttccaagtcagcaaagcagtttttacatgtgctttccatcacctgtaggtagatgtctcactgtctgtctgtgtctctactcaccccagcaggcaggtcaggggcctggactcccgcatagctgcagcagaagatgaatgtaactgctggtggatgctgacagcctgtagccgagtggtttccctgacgatgctcgggtctccttcctgtggggagagaacctaggcaggtgacctgcagagatgctaagccagtggactatggcagggctgtagggctgtaaaataactatggagacgagaatcagacatgtactttaatgttaaaggtgctctatttttcggatgtacagtagttttatttccacagccgcattatcatagcaataagaagggcacgcagtaggcggtctgcagagctctgtcagagacggaccctgaagtttaacactagcacgaacgctgttgctgtagagacgtatttatttgcaggaacaaacggtgcctgaatattaacagtgttctgaattttttttaaaagagatgcatatgccttgtgaacggctggacctgtcagtagtcactcctgcgcgcgtagtttgctttcttgtagttgctctgctgcagtcagtcagtctaccctccccgatagagcccccgatgctgagtgccagcaggatcctgtgtccgacaccagatctgtttatctttgtacagaacctctgataaagtgtcttgtatttaacactcttatttaagcttatttaaccctaacttgttaattttatatgatttttgtttcacctgcgctagctgtaaggcgggaggcaggcaggcagtgactgagctcacctggacctgactgaagcaggtgggcgagctgaggaccggatgctgctggctaacacgttgtttgtattgcttctccatttttaactgttatatttgagatgaacatacattttgcttttttaataaatgttcaaaagaagtc

SEQ ID NO: 348 - protein, 1183 aa, Mus musculus
QLTTLRGAILEDAVPSTARHGTARGLPLKEVLEYVIPELSIQCLRQAANSPKVPEQLLKLDEQGLSFQHKIGILYCRAGQSTEEEMYNNETAGPAFEEFLDLLGQRVRLKGFSKYRAQLDNKTDSTGTHSLYTTYKDFELMFHVSTLLPYMPNNRQQLLRKRHIGNDIVTIVFQEPGALPFTPKNIRSHFQHVFVIVKVHNPCTENVCYSVGVSRSKDVPPFGPPIPKGVTFPKSAVFRDFLLAKVINAENAAHKSEKFRAMATRTRQEYLKDLAENFVTTATVDTSAKFSFITLGAKKKERVKPRKDAHLFSIGAIMWHVVARDFGQSADIECLLGISNEFIMLIEKDSKNVVFNCSCRDVIGWTSGLVSIKAFYERGECLLLSSVDNRSEDIREIVQRLLIVTRGCETVEMTLRRNGLGQLGFHVNFEGIVADVEPFGFAWKAGLRQGSRLVEICKVAVATLTHEQMIDLLRTSVTVKVVIIQPHEDGSPRRGCSELCRIPMVEYKLDSEGTPCEYKTPFRRNTTWHRVPTPALQPVSRASPVPGTPDRLQCQPLLQQAQAAIPRSTSFDRKLPDGTRSSPSNQSSSSDPGPGGSGPWRPQVGYDGCPSPLLLEHQGPGSVECDGTGEQEDLLEGGRLPETKWHGPPSKVLSSYKERVLQKDGSCKESPNKLSHIGDKSCSSHSSSNTLSSNTSSNSDDKHFGSGDLMDPELLGLTYIKGASTDSGIDTTPCMPATILGPVHLTGSRSLMHSRAEQWADAADVSVADDDPAKMYALHGYASAISSSAADGSMGDLSEVSSHSSGSQHSGSPSAHCSKSTGSLDSSKVYIVTHGGGQQAPGAVTKPYHRQGAANKYVIGWKKSEGSPPPEEPEVTECPRIYGEMDIMSTATQHPAVVGDSVSETQHVLSKDDFLKLMLPDSPLVEEGRRKFSFYGNVSPRRSLYRTLSDESVCSNRRGSSFASSRSSILEQALPNDILFSTTPPYHSTLPPRTHPAPSMGSLRNEFWFSDGSLSDKSKCADPGLMPLPDTAAGLDWSHLVDAARAFEGLDSDEELGLLCHHASYLDQRVASFCTLTDLQHGQELEGAPELSLCVDPTSGKEFMDTPGERSPSTLTGKVNQLELILRQLQTDLRKEKQDKAVLQAEVQHLRQDNMRLQEESQTATAQLRKFTEWFFSTIDKKA

SEQ ID NO: 349 - DNA, 3967 bp, Mus musculus
ccggccgcggcgacagcggcagctgcagcgcgagcaggccgggcaacgccgagagtaccgacagcgcgaggtccttgcagcccagcgcagccatggagccccgcgcgaactcattccatgatgtccctgtcggtgcggccgcagcgccgcctgctcagcgcccgggtcagtaggagccagtccttcgcaggcgtcctcggcagccacgagcgcgggcccaggagcttcactgtcttcagcccaccagggcccccacggaagcccctagtgctctcccgagtgtcaaggatgttttctgtggcccatccagctcccaaggtgccgcagccagagaggctggacctggtgtacactgctcttaagcggggactgacggcctacttggaagtgcatcagcaggagcaggagaagctccagcgccagataaaggagtccaaaaggaattcccgcctaggcttcctgtatgacttggacaagcaagtcaagtccattgaacgctttcttcgacgactggaattccatgccagtaagattgacgagttgtatgaagcatactgtgtccagcggcgtctcagggatggtgcctacaacatggtccgcgcctatagcactgggtccccagggagtcgagaggcccgagacagcctggccgaggccactcgaggccatcgagagtatacagagagcatgtgtcttctggagaatgagctggaggcacagttgggcgagtttcatctccggatgaaagggctggctggcttcgccaggctgtgtgtgggcgatcaatatgagatctgcatgaaatatggccgtcagcgctggaagttgcgaggccggatagagagtagtggcaagcaggtgtgggacagtgaagagaccgtctttcttcctctactcacagaattcctgtctatcaaggtgacagaattaaagggactggctaaccacgtagtcgtgggcagtgtctcctgtgagaccaaggacctgtttgccgccctgccccaggttgtggctgtggatatcaatgatcttggcaccatcaagctaagcctagaagtcatatggagtccctttgacaaggatgaccagccttcagctgcttctacagtcaacaaagcttccacagtcaccaagcgattttccacatatagccagagcccgccagacacaccctcactccgagaacaggccttttataacatgttacggcgacaggaggagctcgagaatgggacggcctggtccctgtcctctgaatcgtcagatgattcatcaagcccgcagctctctggcacagctcgacactcaactcccaagcctctggtgcaacagcctgagcccctgcctgtccaagttgccttccgaaggccagagagcctcacgtctggttccatggatgaagagccagccatgaccccatccctggtcaatgggcatgccccttacagccggactctcagccacatcagcgaggccagcgtggatgctgccttgactgaggccgtggaagctgtggactcacaaagcccaatcccagggcctagcccgcttgtctatccagattccacccacgtggagcgtgtcagtagtgttctgcctgtcctcaacaatggccattctgccacaagtcccgccctcagtacaactggccccgcccccacatttatagaccctgccccaacgacacagctagacttggttcacaaaaccacagactccgccccttctgagttgcccagcatcacacatactacgacaagctctgcatatagtgctgtaagccttgtcaacagtgttccaagcctaacttccaccactataggttctgcccacacaaccacgccctctcccctcacctccacaggctctgttcccaatgcaacagactcaacccaggctaccccaagccctactcacagtaccccaagccctacccatactactatacgcctcacccacaccactgtaagccctacacatagctccccgagccccatacacactaccccgagccccacccataccactgtaagtcccacctgcactactccaagctccggccacagtaccactagtcccactcaagaagccaagatgtcaactcataccaccggtgctgtgggcccggtccagaccactacaagtcccatttccacaactgaaagcccctccccttctacagacgtggctataatctccagctcctctgcagaatccaccggcccaggcactgaacctctgccctgtagtcacccagcctcccctccctacactaaagcagaccccacagcttcctgcacctcttaccagagtcttgcttcctctggttcaaaacccctcacaagccctgccccggattccccagaacaaatccctaagagcccaagttcctctccctcatctagtgcccctgaaccccaacattcagaacataacctggccgcagttgctcaagccccagtccctgaggcaacgggaggagctggggacagaaggcttgaagaagctcttgggaccctaatgtctgcccttgatgactatcgtggtcagttccctgagctgcagggcctggagcaggaggtgactcggctggagagtctgctcatgcagagacaaggcctgactcgaagccgggcttccagtcttagcatcactgtggagcatgccctggagagcttcagcttcctcaatgatgatgaagatgaagacaacgatggtcccggggacaggcacacaagcagcccagaggttgtggcagaggacagactagactcatcaaatggccagtctctaagcacagggtgttcagccctggatgctaccttggtccagcacctgtaccactgcagccgcctcctgctgaaactgggcacatttggacccctgcgctgccaggaggcctgggccctggaacggctgctgcgggaagcgcgtgtattccaggaagtgtgtgaacgcagcaagctatgggggaactctgccacatctgcccaggaagtggtacagttctccgcctctcggcccggcttcctgaccttttgggaccagtgtacagagggactcagccccttcatctgctctgtggagcgggtgctcctcaccttctgcagccagtacggtgcccgtctttccctgcgccagccaggcttagccgaggctgtgtgtgtgaagttcctggaagatgccctgggacagaagctgcccaggaggccccaaccaggcccgggggagcagttcaccatcttccaattctggagttatgtagaagccttggacagcccctccatggatgcctatgtgacagagactgcagaggaggtgttactagtacagaacctgaactctgatgaccaggccgttgtgctgaaagccctaaggttagcaccggaggggcgcctgcgaaaggatgggcttcgggctcttagctccctgctggtccacggcaacaacaaagtcatggctgctgtcagcactcagcttcggagcctgtcacttggtcctgtcttccgggaaagggctctcttgtgcttcctggaccagctggaagatggggacgtgcagactcgagtggccggatgcctggctttgggctgtatcaaggctcctgagggcattgagcccctggtgtacttgtgccaaacagacacagaagctgtgagggaagccgcccggcagagcctgcagcagtgcggggaggaaggacagtctgctcatcgacagctagaggagtccctggatgctctgccctgcatctttgggcccagcagcatggccagcacagcattctgaactcttaattgccggctcccagtgtcccttcccttgttttcagggctcatcaggcactggcagggagggtgaaggctggttccagtcacctctccccacaaattcctatcaatgaaaatctaatatattcttttgttaccactggggttggcagaatgcctgaaatgaagtgcctccc

SEQ ID NO: 350 - protein, 1262 aa, Mus musculus
PAAATAAAAARAGRATPRVPTARGPCSPAQPWSPARTHSMMSLSVRPQRRLLSARVSRSQSFAGVLGSHERGPRSFTVFSPPGPPRKPLVLSRVSRMFSVAHPAPKVPQPERLDLVYTALKRGLTAYLEVHQQEQEKLQRQIKESKRNSRLGFLYDLDKQVKSIERFLRRLEFHASKIDELYEAYCVQRRLRDGAYNMVRAYSTGSPGSREARDSLAEATRGHREYTESMCLLENELEAQLGEFHLRMKGLAGFARLCVGDQYEICMKYGRQRWKLRGRIESSGKQVWDSEETVFLPLLTEFLSIKVTELKGLANHVVVGSVSCETKDLFAALPQVVAVDINDLGTIKLSLEVIWSPFDKDDQPSAASTVNKASTVTKRFSTYSQSPPDTPSLREQAFYNMLRRQEELENGTAWSLSSESSDDSSSPQLSGTARHSTPKPLVQQPEPLPVQVAFRRPESLTSGSMDEEPAMTPSLVNGHAPYSRTLSHISEASVDAALTEAVEAVDSQSPIPGPSPLVYPDSTHVERVSSVLPVLNNGHSATSPALSTTGPAPTFIDPAPTTQLDLVHKTTDSAPSELPSITHTTTSSAYSAVSLVNSVPSLTSTTIGSAHTTTPSPLTSTGSVPNATDSTQATPSPTHSTPSPTHTTIRLTHTTVSPTHSSPSPIHTTPSPTHTTVSPTCTTPSSGHSTTSPTQEAKMSTHTTGAVGPVQTTTSPISTTESPSPSTDVAIISSSSAESTGPGTEPLPCSHPASPPYTKADPTASCTSYQSLASSGSKPLTSPAPDSPEQIPKSPSSSPSSSAPEPQHSEHNLAAVAQAPVPEATGGAGDRRLEEALGTLMSALDDYRGQFPELQGLEQEVTRLESLLMQRQGLTRSRASSLSITVEHALESFSFLNDDEDEDNDGPGDRHTSSPEVVAEDRLDSSNGQSLSTGCSALDATLVQHLYHCSRLLLKLGTFGPLRCQEAWALERLLREARVFQEVCERSKLWGNSATSAQEVVQFSASRPGFLTFWDQCTEGLSPFICSVERVLLTFCSQYGARLSLRQPGLAEAVCVKFLEDALGQKLPRRPQPGPGEQFTIFQFWSYVEALDSPSMDAYVTETAEEVLLVQNLNSDDQAVVLKALRLAPEGRLRKDGLRALSSLLVHGNNKVMAAVSTQLRSLSLGPVFRERALLCFLDQLEDGDVQTRVAGCLALGCIKAPEGIEPLVYLCQTDTEAVREAARQSLQQCGEEGQSAHRQLEESLDALPCIFGPSSMASTAF

SEQ ID NO: 351 - DNA, 1491 bp, Mus musculus
ctcaaccacaaaggcatagaatcaaactgctggttgtggacacactggcttctttttcttgtggacattatggctaataacaccacgagcttagggagtccttggccagaaaacttttgggaggaccttataatgtccttcaccgtatccgtggcgattgggcttgcaatcggaggatttctctgggcgctgttcgtttttctgtctcgaagaagaagagccagtgcacccatttcgcagtggagtcccaccaggagacccaggtcttcctacaaccacggcctcaacaggactgggttctaccgccacagtggctatgaacggcgaagcaacctcagcctggccagcctcactttccagagacaagcttccatggagctggtcaactccttcccaaggaaatcaagctttagggcttcgactttccatcccttcctgcaatgcccaccacttccggtggaaacggagagtcagctgatgaccctgtctgcctccaccaccccttccaccctcagcaccgcacacagcccgagccggccagacttccgctggtccagcaacagcttgcggatgggcctttccacaccgcccccacctgcctatgaatccatcataaaggcatttcccgattcctgagtctgagatttcgttgtttttaatactttaaaaaaaaaagtctcttttagaaagaaaatgatatatagggtaagcggaatttgggagccacggccccagtaagtaattttccaagttgataggctcgtgaaagctgaacattaccgataaggcacaggttccttttgaacatgtttttctcacttaggtctcacaaaagtatgatttttctcaaaagtcctgtatttatgtattttttggattcagtgtgaggcattgaattaaagataccgattaaagattctaccctacaaatcatgtgtatttgtatattttaggttaaaaagactttatatgtttcattcactttcccatgaaactgctgacagacagaagtcactaaaataaggaattttaatgttactttttgagtaacgactgagttaccagcattcttgattcttagcgctttcgtggtgcgtgtttatgagatattagaacagcggaggctctaaaagcccaggattctactcagttatgaatgaaaatcaaacgaagatccaagctgtactgatgtcagagggatggttccattttgacagtgactttggttttttcctccgtatagattcatcgtgtagttcttcccaataacaattacccatatcattgatgtaaaacccttggacttagggggcatgaggatttaatatgcctgcggggtaacgatgttaccacagcaatggcagcttcaacttacttgttctaagcacagggttttttttatttagcatcaaaggacatttttactttcttggatttagagccaacaactaggaacgtacttatgtaggacagaggttagcaacctgtggg

SEQ ID NO: 352 - protein, 195 aa, Mus musculus
LLFLVDIMANNTTSLGSPWPENFWEDLIMSFTVSVAIGLAIGGFLWALFVFLSRRRRASAPISQWSPTRRPRSSYNHGLNRTGFYRHSGYERRSNLSLASLTFQRQASMELVNSFPRKSSFRASTFHPFLQCPPLPVETESQLMTLSASTTPSTLSTAHSPSRPDFRWSSNSLRMGLSTPPPPAYESIIKAFPDS

SEQ ID NO: 353 - DNA, 2430 bp, Mus musculus
aaagcttcggtgttcatagaaaaggagaggaggcgagcgcagcccaaactggggggtttctcttcaaagccagctggtctggctttattctacaggaatttttttacctgtcagagtttggacaacaaagccctcagcaggtgctgacgggaacaacttcctggagaagcagaaaggcactgggtgccaacaaaagcattgaaaactgtgaagtaacctctggagagatgaagtgaagcgtggaaggccaatggctgtggcagtgaagaagtgcagaggggaacgaatgcagggatttgggaactgagctgtgcgcgtgctgaagaaggaaacgtgtttgaaggaaacaggaaagagaaagaaaaggaaggaaaaaatacataatttcagggacgagagagagaagaaacacggggactatggggagaaaaaagattcagattacgaggataatggatgagcgtaacagacaggtgacttttacgaagaggaaatttggattgatgaagaaggcttatgagctgagcgtgctgtgcgactgtgagattgcactgatcatcttcaacagcaccaacaagctgttccagtacgccagcactgacatggataaggtgttgctcaagtacaccgagtacaacgagccgcacgagagccggacaaactcagacattgtggaggcattgaacaagaaagaaaacaaaggctctgaaagccccgatcctgactcctcttatgcactcaccccacgcactgaagaaaaatacaaaaaaattaatgaagaatttgataatatgatcaagagtcataaaattcctgctgttccacctcccagctttgagatgccagttaccatcccagtgtccagccataacagtttggtgtacagcaatcctgtcagcacactgggaaaccccaatcttctgccactggcccacccgtctctgcagaggaatagtatgtctcctggtgtaacacatagacctccaagtgcaggtaacacaggcggtctgatgggcggagatctgacatccggtgcaggcaccagcgcagggaatggatacggcaacccccggaactcaccaggcctgctggtctcacctggtaacctgaacaagaatatacaagccaaatctcctccccctatgaatctaggaatgaataatcgtaagccagatctccgcgttcttatcccacctggcagcaagaacacgatgccatcagtgaatcaaaggataaataactcccagtcggctcagtcattggctaccccggtggtttccgtagcaactcctactttaccaggacaaggaatgggaggatatccatcagccatttcaacaacatatggtactgagtactctctgagtagcgcagatctgtcatctctgtctggcttcaacactgccagtgcgctccacctcggctctgtaactggctggcagcagcagcacctacataacatgccgccatctgccctcagtcagttgggagaccgtaccaccaccccttcgagatacccacaacacaccacgcgccacgaggcggggaggtctcctgttgacagcttgagcagctgtagcagttcctacgatgggagcgaccgagaggatcaccggaacgaattccactcccccattggactcaccagaccttcgccggacgaaagggaaagtccttcagtcaagcgcatgcgactctctgaaggatgggcaacatgatcacattattacttaatagtttttttttttcttgcagtgtgtgtgtgtgctataccttaatggggaagggggggtcgatatgcattatatgtgccgtgtgtggaaaaaaaaaaaaaagtcaggtactctgttttgtaaaagtacttttaaattgcctcagtgatacagtataaagataaacagaaatgctgagatacgcttagcacttgagttgtacaacagaacacttgtacaaaatagattttaaggctaacttcttttcactgttgtgaccctttgcaaaatgtatgttacaatagatagtgtcatgttgcaggttcaacgttatttacatgtaaatagacaaaaggaaacatttgccaaaagcggcagatctttactgaaagagagagcagctgttatgcaacatatagaaaaatgtatagaggtttggacagacccggcaagtggtgactaccggtaattgtaggaacacgcctgtcacctaacatccaagcacgctcacaaacctgcaggcatatcattggcgtatggcactcattcaaaaggatcagaaaccattcagagaggaccatacctaccttaaaagaaaagagaagaaaggaaaggaaaggaaagggaaaaaaaagtgtggcgtttgagagctaacatatttaattaaataaataaatctgggtctgcatctcttattaaataaaaatataaaaatatg

SEQ ID NO: 354 - protein, 458 aa, Mus musculus
RKQERERKGRKKYIISGTRERRNTGTMGRKKIQITRIMDERNRQVTFTKRKFGLMKKAYELSVLCDCEIALIIFNSTNKLFQYASTDMDKVLLKYTEYNEPHESRTNSDIVEALNKKENKGSESPDPDSSYALTPRTEEKYKKINEEFDNMIKSHKIPAVPPPSFEMPVTIPVSSHNSLVYSNPVSTLGNPNLLPLAHPSLQRNSMSPGVTHRPPSAGNTGGLMGGDLTSGAGTSAGNGYGNPRNSPGLLVSPGNLNKNIQAKSPPPMNLGMNNRKPDLRVLIPPGSKNTMPSVNQRINNSQSAQSLATPVVSVATPTLPGQGMGGYPSAISTTYGTEYSLSSADLSSLSGFNTASALHLGSVTGWQQQHLHNMPPSALSQLGDRTTTPSRYPQHTTRHEAGRSPVDSLSSCSSSYDGSDREDHRNEFHSPIGLTRPSPDERESPSVKRMRLSEGWAT

SEQ ID NO: 355 - DNA, 3542 bp, Mus musculus
gggaagatgctcccatatactttgacttgagattcatggattgtttttgtttgtttgtttgtttgttttttgtggtggagaaagccttcttgtctcattggggtattacaaatgcatgggaaatacaagtctgggctgctgcttgcttcttgggcaggaacgaatgcagggatttgggaactgagctgtgcgcgtgctgaagaaggaaacgtgtttgaaggaaacaggaaagagaaagaaaaggaaggaaaaaatacataatttcagggacgagagagagaagaaacacggggactatggggagaaaaaagattcagattacgaggataatggatgagcgtaacagacaggtgacttttacgaagaggaaatttggattgatgaagaaggcttatgagctgagcgtgctgtgcgactgtgagattgcactgatcatcttcaacagcaccaacaagctgttccagtacgccagcactgacatggataaggtgttgctcaagtacaccgagtacaacgagccgcacgagagccggacaaactcagacattgtggaggcattgaacaagaaagaaaacaaaggctctgaaagccccgatcctgactcctcttatgcactcaccccacgcactgaagaaaaatacaaaaaaattaatgaagaatttgataatatgatcaagagtcataaaattcctgctgttccacctcccagctttgagatgccagttaccatcccagtgtccagccataacagtttggtgtacagcaatcctgtcagcacactgggaaaccccaatcttctgccactggcccacccgtctctgcagaggaatagtatgtctcctggtgtaacacatagacctccaagtgcaggtaacacaggcggtctgatgggcggagatctgacatccggtgcaggcaccagcgcagggaatggatacggcaacccccggaactcaccaggcctgctggtctcacctggtaacctgaacaagaatatacaagccaaatctcctccccctatgaatctaggaatgaataatcgtaagccagatctccgcgttcttatcccacctggcagcaagaacacgatgccatcagtgtctgaggatgtggatctgctgttgaatcaaaggataaataactcccagtcggctcagtcattggctaccccggtggtttccgtagcaactcctactttaccaggacaaggaatgggaggatatccatcagccatttcaacaacatatggtactgagtactctctgagtagcgcagatctgtcatctctgtctggcttcaacactgccagtgcgctccacctcggctctgtaactggctggcagcagcagcacctacataacatgccgccatctgccctcagtcagttgggagcttgcactagcactcatttatctcagagttcaaatctctccctgccttctactcaaagcctcagcatcaagtcagaacctgtttctcctcctagagaccgtaccaccaccccttcgagatacccacaacacaccacgcgccacgaggcggggaggtctcctgttgacagcttgagcagctgtagcagttcctacgatgggagcgaccgagaggatcaccggaacgaattccactcccccattggactcaccagaccttcgccggacgaaagggaaagtccttcagtcaagcgcatgcgactctctgaaggatgggcaacatgatcacattattacttaatagtttttttttttcttgcagtgtgtgtgtgtgctataccttaatggggaagggggggtcgatatgcattatatgtgccgtgtgtggaaaaaaaaaaaaaagtcaggtactctgttttgtaaaagtacttttaaattgcctcagtgatacagtataaagataaacagaaatgctgagatacgcttagcacttgagttgtacaacagaacacttgtacaaaatagattttaaggctaacttcttttcactgttgtgaccctttgcaaaatgtatgttacaatagatagtgtcatgttgcaggttcaacgttatttacatgtaaatagacaaaaggaaacatttgccaaaagcggcagatctttactgaaagagagagcagctgttatgcaacatatagaaaaatgtatagaggtttggacagacccggcaagtggtgactaccggtaattgtaggaacacgcctgtcacctaacatccaagcacgctcacaaacctgcaggcatatcattggcgtatggcactcattcaaaaggatcagaaaccattcagagaggaccatacctaccttaaaagaaaagagaagaaaggaaaggaaaggaaagggaaaaaaaagtgtggcgtttgagagctaacatatttaattaaataaataaatctgggtctgcatctcttattaaataaaaatataaaaatatgtacattacattttgcttattttcatataaaaggtaagaaagagtttgcaaagcatttgtggctttttgtagtttacttaagccaaaatgtgtttttccctcaatagcttcgctaatattttaaacagtcctgtaaaaacccaccaaggactttttgtatagaaagcactaccctaagccatgaggatctccatgctttgctaaccaagataactgttttctctttgtagaagttttgtttttgaaatgtgtatttctaattatataaaatattaagaatcttttaaaaatctgtgaaattaacatgcttgtgtatagctttctaatatatataatattatggtaatggcagaagttttgttttcttaatagcgggaggggggtatatttgtgcagttgcacatttgagtaactattttctttctgatttcttttactctgcatacattttataagttcaaggtcagctgtcaaaaggataagctgtggggttagaacatattacattgcaacatcctaaattgtttttaaaacgtcagcaaactattgggtcaactgacatccattgtatatactaattggtttctttcaaactatttttttttttggtttggttttgaattgttggtttcttttcattttatcaaaagcagggcccctttcagatctctcttcatttcaccatacatcttggaattctgtaagtttgtatcctaacttgcccatattctaaatttacatagtttattttcagccttgagttggatgttttttagaaatatgcccagagtaagaagctgtgttggagcctaagtcctgcaagctgggtcctgggggcgaccgacctgctttacttgatggataagttacagagttctggaggagaacaaggtgaaagcctgggtgctggagaggaaggaaacagttaaagggtagttacttggtatccaccttcatgattttaactgacccataacaatgttgtcagcagtataggactgttgaacagcctggtgtgtcaggacccccaaatgtcacttctgcctaaagcatgtatgtcacctatttttttcttcaataaagaaatttaacagccatttcaagaaatcccacttt

SEQ ID NO: 356 - protein, 498 aa, Mus musculus
RKQERERKGRKKYIISGTRERRNTGTMGRKKIQITRIMDERNRQVTFTKRKFGLMKKAYELSVLCDCEIALIIFNSTNKLFQYASTDMDKVLLKYTEYNEPHESRTNSDIVEALNKKENKGSESPDPDSSYALTPRTEEKYKKINEEFDNMIKSHKIPAVPPPSFEMPVTIPVSSHNSLVYSNPVSTLGNPNLLPLAHPSLQRNSMSPGVTHRPPSAGNTGGLMGGDLTSGAGTSAGNGYGNPRNSPGLLVSPGNLNKNIQAKSPPPMNLGMNNRKPDLRVLIPPGSKNTMPSVSEDVDLLLNQRINNSQSAQSLATPVVSVATPTLPGQGMGGYPSAISTTYGTEYSLSSADLSSLSGFNTASALHLGSVTGWQQQHLHNMPPSALSQLGACTSTHLSQSSNLSLPSTQSLSIKSEPVSPPRDRTTTPSRYPQHTTRHEAGRSPVDSLSSCSSSYDGSDREDHRNEFHSPIGLTRPSPDERESPSVKRMRLSEGWAT

SEQ ID NO: 357 - DNA, 3105 bp, Mus musculus
caggtgacttttacgaagaggaaatttggattgatgaagaaggcttatgagctgagcgtgctgtgcgactgtgagattgcactgatcatcttcaacagcaccaacaagctgttccagtacgccagcactgacatggataaggtgttgctcaagtacaccgagtacaacgagccgcacgagagccggacaaactcagacattgtgttgaactttgcacattatgtatttcaaacattgagaaagaagggcctcaatggctgtgacagcccagatcccgatgcagacgattcagtaggtcacagccctgagtctgaggacaagtacaggaaaattaacgaagatattgatctaatgatcagcaggcaaagattgtgtgctgttccacctcccagctttgagatgccagttaccatcccagtgtccagccataacagtttggtgtacagcaatcctgtcagcacactgggaaaccccaatcttctgccactggcccacccgtctctgcagaggaatagtatgtctcctggtgtaacacatagacctccaagtgcaggtaacacaggcggtctgatgggcggagatctgacatccggtgcaggcaccagcgcagggaatggatacggcaacccccggaactcaccaggcctgctggtctcacctggtaacctgaacaagaatatacaagccaaatctcctccccctatgaatctaggaatgaataatcgtaagccagatctccgcgttcttatcccacctggcagcaagaacacgatgccatcagtgaatcaaaggataaataactcccagtcggctcagtcattggctaccccggtggtttccgtagcaactcctactttaccaggacaaggaatgggaggatatccatcagccatttcaacaacatatggtactgagtactctctgagtagcgcagatctgtcatctctgtctggcttcaacactgccagtgcgctccacctcggctctgtaactggctggcagcagcagcacctacataacatgccgccatctgccctcagtcagttgggagaccgtaccaccaccccttcgagatacccacaacacaccacgcgccacgaggcggggaggtctcctgttgacagcttgagcagctgtagcagttcctacgatgggagcgaccgagaggatcaccggaacgaattccactcccccattggactcaccagaccttcgccggacgaaagggaaagtccttcagtcaagcgcatgcgactctctgaaggatgggcaacatgatcacattattacttaatagtttttttttttcttgcagtgtgtgtgtgtgctataccttaatggggaagggggggtcgatatgcattatatgtgccgtgtgtggaaaaaaaaaaaaaagtcaggtactctgttttgtaaaagtacttttaaattgcctcagtgatacagtataaagataaacagaaatgctgagatacgcttagcacttgagttgtacaacagaacacttgtacaaaatagattttaaggctaacttcttttcactgttgtgaccctttgcaaaatgtatgttacaatagatagtgtcatgttgcaggttcaacgttatttacatgtaaatagacaaaaggaaacatttgccaaaagcggcagatctttactgaaagagagagcagctgttatgcaacatatagaaaaatgtatagaggtttggacagacccggcaagtggtgactaccggtaattgtaggaacacgcctgtcacctaacatccaagcacgctcacaaacctgcaggcatatcattggcgtatggcactcattcaaaaggatcagaaaccattcagagaggaccatacctaccttaaaagaaaagagaagaaaggaaaggaaaggaaagggaaaaaaaagtgtggcgtttgagagctaacatatttaattaaataaataaatctgggtctgcatctcttattaaataaaaatataaaaatatgtacattacattttgcttattttcatataaaaggtaagaaagagtttgcaaagcatttgtggctttttgtagtttacttaagccaaaatgtgtttttccctcaatagcttcgctaatattttaaacagtcctgtaaaaacccaccaaggactttttgtatagaaagcactaccctaagccatgaggatctccatgctttgctaaccaagataactgttttctctttgtagaagttttgtttttgaaatgtgtatttctaattatataaaatattaagaatcttttaaaaatctgtgaaattaacatgcttgtgtatagctttctaatatatataatattatggtaatggcagaagttttgttttcttaatagcgggaggggggtatatttgtgcagttgcacatttgagtaactattttctttctgatttcttttactctgcatacattttataagttcaaggtcagctgtcaaaaggataagctgtggggttagaacatattacattgcaacatcctaaattgtttttaaaacgtcagcaaactattgggtcaactgacatccattgtatatactaattggtttctttcaaactatttttttttttggtttggttttgaattgttggtttcttttcattttatcaaaagcagggcccctttcagatctctcttcatttcaccatacatcttggaattctgtaagtttgtatcctaacttgcccatattctaaatttacatagtttattttcagccttgagttggatgttttttagaaatatgcccagagtaagaagctgtgttggagcctaagtcctgcaagctgggtcctgggggcgaccgacctgctttacttgatggataagttacagagttctggaggagaacaaggtgaaagcctgggtgctggagaggaaggaaacagttaaagggtagttacttggtatccaccttcatgattttaactgacccataacaatgttgtcagcagtataggactgttgaacagcctggtgtgtcaggacccccaaatgtcacttctgcctaaagcatgtatgtcacctatttttttcttcaataaagaaatttaacagccatttcaagaaatcccacttt

SEQ ID NO: 358 - protein, 425 aa, Mus musculus
QVTFTKRKFGLMKKAYELSVLCDCEIALIIFNSTNKLFQYASTDMDKVLLKYTEYNEPHESRTNSDIVLNFAHYVFQTLRKKGLNGCDSPDPDADDSVGHSPESEDKYRKINEDIDLMISRQRLCAVPPPSFEMPVTIPVSSHNSLVYSNPVSTLGNPNLLPLAHPSLQRNSMSPGVTHRPPSAGNTGGLMGGDLTSGAGTSAGNGYGNPRNSPGLLVSPGNLNKNIQAKSPPPMNLGMNNRKPDLRVLIPPGSKNTMPSVNQRINNSQSAQSLATPVVSVATPTLPGQGMGGYPSAISTTYGTEYSLSSADLSSLSGFNTASALHLGSVTGWQQQHLHNMPPSALSQLGDRTTTPSRYPQHTTRHEAGRSPVDSLSSCSSSYDGSDREDHRNEFHSPIGLTRPSPDERESPSVKRMRLSEGWAT

SEQ ID NO: 359 - DNA, 5075 bp, Mus musculus
agggagaaattagctctgctgtcttgggccagtgtctgggaaactcttccacagtagttttctcctctgctggctcttctcctttgggaacactcaagatgtccctggtcgcagtgcctttctaccagaaaagacacaagcactttgaccagtcatatcgaaacatccaaaccaggtacctcctggaccaatatgcattgaaaaagcaagcaaccacccagtcatcctcccagaggtctcttacagagaggtcctcttcgaagagagcttccagtcagagctctgctggggcgatgacctgcaggctctgtgcaaagcgggtgagcgcatcagaagaggaggaagttgaaaatgaaaacaggtaccggtctcaagcggcttcttacggagaagctaagaggcagcgtttcctcagtgagctggcccagctggaggagaatgtccacctggcccggtcacaggctcgggacaagctagacaagtacttcatggagcagacggtggaagacaatctggcgtgggagagacactcatttgaagaccgaatgagcagggcccctgagatcctggtgaggttaaggtcccacaccatctgggagcggatgtctgtgaggctctgtttcactgtgcaaggattccccacgcctgtggtgcaatggtacaaagacggcagtctgatctgccaggcaggggagccaggcaagtaccggattgagagcaggtacggagtgcacactctggagatcaacagggccaactttgaggacaccgccacctattcagcagtagcaactaattcccatggacaagtgtctaccaatgctgcggtggtggtgagaaggtaccgaggagaagaggaacctttccactcagtaggactcccaattggattgcccctttcatctgtgatcccgtacacacattttgatgtccagtttttggagaaattcggggtcaccttcagaagagagggcgagacagtcacactcaagtgcacgctattggtgacgccagatctgaagagagtacagccacgagctgagtggtaccgggatgatgtgctgctgaaagagtccaagtggaccaagatgttctttggagaaggccaggcctccctgtccttcagccacctgaacaaggatgacgaggggctgtacactttgaggattgtgtcccggggtggagtcagcgaccacagcgctttcatgtttgtcagagatgctgacccactggtcacaggggctcctggggcacccatggacctgcagtgccatgatgccaaccgagactatgtcatcgtgacttggaaaccacccaacaccactactgagagccctgtcattggctacttcattgacaaatgtgaggtgggaactaacaactgggtccagtgtaacgatgcaccagtaaagatctgcaagtaccccgtcaccggacttttcgaaggaagatcgtatgtgttccgcgtgagggctgtcaataatgccggcattagcaggccttccaggatctccgatgctgtggccgcccttgaccctgttgacctcagaagattgcaagcgattcatttggaaggagagaaagaaatcgtcatctaccaggatgatcttgaaggtgatgttcagattccagggcctcccactaatgtccaggcctcagaggtcagcaggaactacgttgtcctcagctgggatcctccatctccccgcggcaaggatcccttaatgtacttcatcgagaagtctgcagttgggagtggcagctggcagagggtcaatgctcaaacggcggtgagatctcctcggtatgctgtctttgacttggctgaagggaagtcctacgtgttccgggttttgtcagccaataaacatggcctgagtgacccatcagagataacaccacctattcaggcacaggacatgattgtggtcccctctgctcctggccgggtgcttgcctccaggaatacaaagacatccgtcgtagtccagtgggacagaccaaagcatgaagaggacctgctgggctactatgtggactgctgtgtggcgggaacaaacatgtgggaaccatgcaaccacaaacccattggatataacaggtttgtggtacacggcttaaccaccggtgagcagtacatcttccgggtcaaggctgtcaatgccgtggggaccagcgagaactctcaggagtcagaggtcatcaaggtccaggcggccctcactgtcccctctcatccctatgggattacccttctcaactgtgatggccactccatgaccctgggctggaaagtgcctaagttcagcggcggctcggccatcataggttactatctggacaagcgagaagtgcatcacaagaactggcacgaggtcaactcttcacctgtcaaagagaggatcttaacggtggaaggtttgactgaaggctccttgtatgagttcaaaattgctgctaccaacctggctgggatcgggcagccatcggatcccagtgagcatttcaagtgtgaggcctggacagatccagaacctggtcctgcctatgacctgacgttctgtgaggtccgagacacttctctggtcattctgtggaaagctcccgtttactcgggcagcagtcctgtttctggatattttgtggattttaaggaagaggattctggggagtggaagaccaccagcgaggcagcaactccaaatcgctacttaaaggtctgtgacctgcagcagggtaagacctatgtattcagaattcgagcagtgaatgccagtggaccaggaaagccgtcagacacgtctgagcctgtgttggtggaggcccggccaggcacaaaggagatcagcgctggtgtggatgaggagggcaacatctaccttgggtttgactgccaggaaatgacagatgcctcgcagttcacctggtgtaaggcctacgaggagatcgctgatgaggagcgatttgaggttcacacggagggtgaccactcaaagctgtactttaagaatccagataaagaagacctagggacatattctgtatctgtaagtgacacggatggtgtgtcctccagctttgttctggacgaggaagaacttgagcgtttgatggcactgagcaatgagataaagaaccccacaattccactgaagtcagaattagcttatgagattttcgataagggccaggtccgattctggctgcaggcagagcacctttcccctgatgccagcttccggttcatcattaatgacagagaggtttctgacagtgacacgcacagaattaaatgtgacagatcgacaggcatgattgagatggtcatggatcggttcactattgaaaatgaagggacctacactgtgcagattcaagatggaaaagccaagaatcagtcatcactggtgctcattggagatgcattcaaggctgtcctagaagaggctgaatttcaaaggaaggaatttctacggaaacaaggccctcattttgctgaatatttgcactgggatgtcactgaagagtgtgaagttcggcttgtctgtaaggttgcaaacaccaagagggaaactgttttcaaatggctcaaggacgatgttctttacgaaacggagacaccgccagacctggagaagggggtctgtgagctgcttatacccaagttgtctaagaaggaccatggtgaatacaaagcaaccttgaaagatgacagaggtcaggatgtatctgtcctggaagtaggtggcaaagtgtacgaggacatgatcttagccatgagtcgtgtgtgtggagcctctgcctcacccctgaaggttctctgcactccagagggcatccggcttcagtgcttcatgaagtacttcacagaggaaatgaaggtcagctggtatcacaaagaggccaagatctcctccagtgagcacatgcggatcggagggagcgaggagatggcatggctgcagatctgtgagcccacagagaaggacaaggggaaatacacgtttgagattttcgatggcaaagacagccaccaacgctcgctggacctctctggacaagcttttgacgaagcctacgctgagttccagcagctcaaggctgctgcttttgcagagaagaatcgcggcaaggtgattggcggcttaccagacgtggtgaccataatggaaggcaagaccttgaacctcacctgcactgtgtttggaaaccccgaccctgaggtggtctggtttaagaacgacaaggacattgagctcagcgagcacttcttggtgaagatggagcagtccaagtatgtcagcctgaccatccagggggtgacggccgaggactcgggcaagtacagcatcaacgtgaagaataaatacggaggagagaagatcgatgtcactgtcagtgtgtacaaacacggggagaagatcccagacatctcacctccccagcaggccaaacccaagctcatcccagcttccacctcatctgattaagggaatcccgtctgccctggggctggagagatgggagggaggtcttaggatgttgtatgctgtgctgagtgggtgccagtttggcgtgatgtcacgtgtggccagactggcgaccgtacactaggtttttgatcttgcactttgcgatgcaaattatctgtgtggaggggaagcgaatgtttctgaacataaggctctaagactcgtgtgaggctgagagtgaatggcagtggagagtgggctgagagagggcagctggcacatccagggtcatgggcatgtggactgaggctcagatggtcctagcatgtggtagtctggatagttattaccatcctgaggggagtggggggggggctgcagggcacatttctggaaaccctttgtggagcctttgagcatggtacgtgcttacctttttgtcttgctttaggctaataataataataaaaaaccaaaaggcatcttgttgtgatttctatgccaacatcctgcctacctacatatccctatcttggcttaacccgtttctctggattttatgcttctgtggcatgtggaccatgaaccatgtccaaagaacca

SEQ ID NO: 360 - protein, 1463 aa, Mus musculus
MSLVAVPFYQKRHKHFDQSYRNIQTRYLLDQYALKKQATTQSSSQRSLTERSSSKRASSQSSAGAMTCRLCAKRVSASEEEEVENENRYRSQAASYGEAKRQRFLSELAQLEENVHLARSQARDKLDKYFMEQTVEDNLAWERHSFEDRMSRAPEILVRLRSHTIWERMSVRLCFTVQGFPTPVVQWYKDGSLICQAGEPGKYRIESRYGVHTLEINRANFEDTATYSAVATNSHGQVSTNAAVVVRRYRGEEEPFHSVGLPIGLPLSSVIPYTHFDVQFLEKFGVTFRREGETVTLKCTLLVTPDLKRVQPRAEWYRDDVLLKESKWTKMFFGEGQASLSFSHLNKDDEGLYTLRIVSRGGVSDHSAFMFVRDADPLVTGAPGAPMDLQCHDANRDYVIVTWKPPNTTTESPVIGYFIDKCEVGTNNWVQCNDAPVKICKYPVTGLFEGRSYVFRVRAVNNAGISRPSRISDAVAALDPVDLRRLQAIHLEGEKEIVIYQDDLEGDVQIPGPPTNVQASEVSRNYVVLSWDPPSPRGKDPLMYFIEKSAVGSGSWQRVNAQTAVRSPRYAVFDLAEGKSYVFRVLSANKHGLSDPSEITPPIQAQDMIVVPSAPGRVLASRNTKTSVVVQWDRPKHEEDLLGYYVDCCVAGTNMWEPCNHKPIGYNRFVVHGLTTGEQYIFRVKAVNAVGTSENSQESEVIKVQAALTVPSHPYGITLLNCDGHSMTLGWKVPKFSGGSAIIGYYLDKREVHHKNWHEVNSSPVKERILTVEGLTEGSLYEFKIAATNLAGIGQPSDPSEHFKCEAWTDPEPGPAYDLTFCEVRDTSLVILWKAPVYSGSSPVSGYFVDFKEEDSGEWKTTSEAATPNRYLKVCDLQQGKTYVFRIRAVNASGPGKPSDTSEPVLVEARPGTKEISAGVDEEGNIYLGFDCQEMTDASQFTWCKAYEEIADEERFEVHTEGDHSKLYFKNPDKEDLGTYSVSVSDTDGVSSSFVLDEEELERLMALSNEIKNPTIPLKSELAYEIFDKGQVRFWLQAEHLSPDASFRFIINDREVSDSDTHRIKCDRSTGMIEMVMDRFTIENEGTYTVQIQDGKAKNQSSLVLIGDAFKAVLEEAEFQRKEFLRKQGPHFAEYLHWDVTEECEVRLVCKVANTKRETVFKWLKDDVLYETETPPDLEKGVCELLIPKLSKKDHGEYKATLKDDRGQDVSVLEVGGKVYEDMILAMSRVCGASASPLKVLCTPEGIRLQCFMKYFTEEMKVSWYHKEAKISSSEHMRIGGSEEMAWLQICEPTEKDKGKYTFEIFDGKDSHQRSLDLSGQAFDEAYAEFQQLKAAAFAEKNRGKVIGGLPDVVTIMEGKTLNLTCTVFGNPDPEVVWFKNDKDIELSEHFLVKMEQSKYVSLTIQGVTAEDSGKYSINVKNKYGGEKIDVTVSVYKHGEKIPDISPPQQAKPKLIPASTSSD

SEQ ID NO: 361 - DNA, 1233 bp, Mus musculus
atgctgtgctatgtgacgaggccggacgcggtgctgatggaggtagaggtggaggcaaaagccaacggcgaggactataatacgctgccaaatcagctgtgcagatggcgtctagggatcatcgaggttgattattttgggctgcagttcacggggagcaaaggtgagagcttatggctgaatctgagaaaccggatctcccagcagatggatgggctggcaccttaccgccttaaactgagggtcaagttctttgtggagcctcatctcatcttacaggagcagacaaggcatatctttttcttgcacattaaagagtccctcttggcaggccacctccagtgttccccagagcaggccgtggaactcagtgccctcctggctcagaccaaatttggagactacaaccagaacaccgcccaatacagctatgaggacctgtgtgagaaagagctctccagctccactttgaacagcgaaggacagaaactcctcattggggtcggacctgaaggcatctcgatctgtaaagaggactttagccctattaacaggatagcttatcctgtggtgcagatggccacccagtcaggaaagaatgtctacttgaccgtcaccaaggagtccggcaacagcatcgtgctcctgtttaagatgatcagcaccagagcagccagcggcctctaccgagccatcaccgaaacacatgcattctataggcgcgtaccaccattcaccagtgccgtcatgatgcagtacagtcgcgacctgaagggccacttggcgtctctgtttctgaacgaaaacattaaccttggtaagaaatacgtcttcgacatcaagagaacatccaaagaggtctatgaccatgccaggagggctctgtacaacgccggcgttgtggaccttgtctctcgaagtgaccagagcccccccagctcacccctgaagtcctcagacagcagcatgagctgcagcagctgtgagggcctcagctgccagcagacccgggtgctgcaggagaagctgcgcaagctgaaggaagccatgctgtgtatggcgtgctgcgaggaggagatcaactccaccttctgcccctgcggccacactgtgtgctgcgagagctgtgcagcccagctgcagtcctgtccggtctgcagatcccgtgtggagcatgtccagcacgtctacctgcccacccacaccagtctcctcaatctgactgtcatctga

SEQ ID NO: 362 - protein, 410 aa, Mus musculus
MLCYVTRPDAVLMEVEVEAKANGEDYNTLPNQLCRWRLGIIEVDYFGLQFTGSKGESLWLNLRNRISQQMDGLAPYRLKLRVKFFVEPHLILQEQTRHIFFLHIKESLLAGHLQCSPEQAVELSALLAQTKFGDYNQNTAQYSYEDLCEKELSSSTLNSEGQKLLIGVGPEGISICKEDFSPINRIAYPVVQMATQSGKNVYLTVTKESGNSIVLLFKMISTRAASGLYRAITETHAFYRRVPPFTSAVMMQYSRDLKGHLASLFLNENINLGKKYVFDIKRTSKEVYDHARRALYNAGVVDLVSRSDQSPPSSPLKSSDSSMSCSSCEGLSCQQTRVLQEKLRKLKEAMLCMACCEEEINSTFCPCGHTVCCESCAAQLQSCPVCRSRVEHVQHVYLPTHTSLLNLTVI

SEQ ID NO: 363 - DNA, 4405 bp, Mus musculus
ccgaacttggcacagacagccccttcattctctagtgttctgaaggacagtgttgtcattgagggccaggattttgtgctacggtgctcagtgcaggggactccagcaccccgggtcacgtggctgctcaatggacagcccatccagtttgctcactccatctgtgaggcaggcgtggctgagctccacatccaggatgccctgccagaggaccgtggcacctacacctgcctggctgagaatgccatggggcaggtgtcctgcagcgccactgtcaccgtccaagagaagaaaggtgaaggagagagggaacaccgtctgtccccagctcgcagcaagcccatcgcacccatcttcctgcagggcctctccgacctcaaagtcatggatggaagccaggtcactatgacagtccaggtgtcagggaacccacctccggaagtcatctggcttcacgacgggaatgagattcaggagtccgaggacttccacttcgagcagaagggtggctggcacagcctgtgtatccaggaggtgttcccggaggacacgggcacgtacacctgtgaggcctggaacagtgccggggaggtccgcacccgggccgtcctcaccgtgcaagagcctcatgatggcacccagccctggttcatcagcaagcctcgttcggtgacagccaccctgggccagagtgtcctcatctcctgcgccatagctggagacccctttcccaccgtgcactggctccgggatggcagagccctctccaaggacagtggccactttgagctgctccagaatgaggacgtgttcaccctggttctaaagaacgtgcagccctggcatgccggccagtatgagattctgctcaagaaccgggttggcgagtgtagttgccaagtgtcactgatgcttcacaacagcccttccagagccccaccacgggggcgggagcctgccagctgcgagggcctctgtggtggtggaggagttggtgctcatggtgatggtgaccgtcatgggaccctgaggccctgctggccagcaagagggcaaggttggcctgaggaggaagacggagaagacgtgagggggctgttgaagagacgggtggagaccaggctgcacacagaagaggccatccgccagcaggaggtggggcagctggattttcgagacctcctgggaaagaaggtgagcaccaagaccgtctcagaagacgacctgaaggacatcccagccgagcagatggatttccgcgccaaccttcagcggcaagtgaagccaaagaccatatccgaggaagagaggaaggtgcatagccctcagcaggttgacttccggtctgtcctcgccaagaaggggacccctaagacccccgttcctgagaaggcacctccaaaagctgccaccccagactttcgctctgtgctaggtggcaagaagaagtcaccctcggagaatgggggcaacagcgctgaggtcttgaatgtcaaggctggggaaagccccacacctgcaggcgatgcgcaggccatcggggccctgaaacccgtaggcaatgccaagcctgctgagaccccgaaacctataggtaatgccaagcctaccgagaccctgaagcctgtgggcaacaccaagcctgccgagaccctgaaacccatagccaacgcacagccttcagggtccctgaaacctgtaaccaacgcacaacctgctgagccccagaagcctgtgggcaatgccaagtctgctgagacctcgaaaccagctgggaaagaagaagtcaaggaggtaaagaatgatgtgaactgtaagaaagggcaggtcggagccacgggcaatgaaaagcgacccgagagccaaggctcggccccagttttcaaggaaaagctacaagatgtccatgtggcagagggggagaagctgctactccaatgccaggtgatctctgatccccccgccactgtcacctggtcgctgaatgggaagacactcaagaccacaaaattcatcgtcctcgcccaagaaggctcacgtttctctgtctccatcgagaaggcactgcctgaggaccgaggtttgtacaagtgtgtagccaagaacagcgctggccaggcagagtgttcctgccaagtcactgtggacgatgctcagaccagtgagaacaccaaggccccggagatgaaatcccggagacccaagagctctcttccccctgtgctaggaacagagagcgacgcaactgtgaaaaagaaacctgcccccaagacacccacaaaagcagctatgccccctcaaatcatccagttccccgaggaccagaaggtgcgcgcaggagaacctgtggagctgtttgggaaagtggctggcacccagcccatcacctgcaagtggatgaagttccgaaagcagatccaggagagcgagcatatcaaggtggagaatggcgagagcggcagcaagctcaccatcctggccgcgcggcaggagcactgtggctgctacacactggtggtggagaacaagctgggcagcaggcaggcccaagtcaacctcacggtcgtggataagccagaccccccggctggcacaccttgtgcttctgacattcggagttcctcactgaccctgtcctggtatggctcctcatatgatgggggcagtgctgtacagtcctacaatgtggagatctgggacacagaggacaaggtgtggaaagagctagccacgtgccgcagcacctcttttaatgtccaagacctgctgcctgaccgcgagtacaaattccgagtgcgtgcagtcaacgtctatggaaccagcgagccaagccaagagtccgagctcacagctgtgggagagaaacctgaagagccaaaggatgaagtggaagtgtccgatgatgacgaaaaggaacctgaggttgattaccggacggtgactgttaacactgaacagaaagtgtctgatgtgtatgacattgaagagcgactaggatctgggaagtttggacaagtcttccgacttgtggaaaagaaaactggaaaaatctgggcagggaaatttttcaaggcctattccgccaaggagaaagacaacatccgtcaggagatcagcatcatgaactgcctccaccaccccaagctggtccagtgtgtggatgccttcgaagaaaaggccaacattgtcatggttctggagatcgtgtccgggggtgagctgtttgagcgtatcattgacgaggacttcgagctgacggagcgggagtgtatcaagtacatgaggcagatctcggaaggggtggagtacatccacaagcagggcattgtgcacctggacctcaagcccgagaacatcatgtgtgtcaacaagacaggcaccaggatcaagctcattgacttcggcctggcacggagactcgagaacgctgggtctctgaaggtcctctttgggaccccagagtttgtggctcctgaagtgatcaactatgagcccatcggctacgccacagacatgtggagcatcggggtcatctgctatattctggtcagcggactttctcccttcatgggtgacaatgataacgagaccttagccaacgtcacttcagccacctgggacttcgatgacgaggcattcgatgagatctccgatgacgcaaaggatttcatcagtaacttgctgaagaaagatatgaaaaaccgtctggactgcacccagtgccttcagcacccatggctgatgaaagacaccaagaacatggaggccaagaagctgtccaaggaccggatgaagaaatacatggcaagaaggaagtggcagaaaacgggcaatgctgtgagagccatcgggagactgtcctctatggcaatgatctcagggctcagtggcaggaaatcttcaacagggtcaccaaccagcccaatcaatgcggagaaactagagtctgaagacgatgtctcccaagctttcctggaggctgttgctgaggaaaagccccatgtgaaaccttatttctctaagaccatccgtgatctggaagtcgtggagggaagcgctgctagatttgactgcaagattgaaggatacccagaccctgaggtggtctggttcaaggatgaccaatcaatcagggagtcccgccacttccagatagactacgacgaagacggcaactgctcgctcatcatcagcgacgtctgtggggatgatgacgccaagtacacctgcaaggctgtcaacagcctcggagaagccacctgcactgcggagctcatcgtggagaccatggaggaaggggaaggggaggaggggggagaggaggaggaggaggaggaggagtgaagccaagccaaacagaagcagttcctaagtcattttaaaaaggactaattccttaaagctc

SEQ ID NO: 364 - protein, 1447 aa, Mus musculus
PNLAQTAPSFSSVLKDSVVIEGQDFVLRCSVQGTPAPRVTWLLNGQPIQFAHSICEAGVAELHIQDALPEDRGTYTCLAENAMGQVSCSATVTVQEKKGEGEREHRLSPARSKPIAPIFLQGLSDLKVMDGSQVTMTVQVSGNPPPEVIWLHDGNEIQESEDFHFEQKGGWHSLCIQEVFPEDTGTYTCEAWNSAGEVRTRAVLTVQEPHDGTQPWFISKPRSVTATLGQSVLISCAIAGDPFPTVHWLRDGRALSKDSGHFELLQNEDVFTLVLKNVQPWHAGQYEILLKNRVGECSCQVSLMLHNSPSRAPPRGREPASCEGLCGGGGVGAHGDGDRHGTLRPCWPARGQGWPEEEDGEDVRGLLKRRVETRLHTEEAIRQQEVGQLDFRDLLGKKVSTKTVSEDDLKDIPAEQMDFRANLQRQVKPKTISEEERKVHSPQQVDFRSVLAKKGTPKTPVPEKAPPKAATPDFRSVLGGKKKSPSENGGNSAEVLNVKAGESPTPAGDAQAIGALKPVGNAKPAETPKPIGNAKPTETLKPVGNTKPAETLKPIANAQPSGSLKPVTNAQPAEPQKPVGNAKSAETSKPAGKEEVKEVKNDVNCKKGQVGATGNEKRPESQGSAPVFKEKLQDVHVAEGEKLLLQCQVISDPPATVTWSLNGKTLKTTKFIVLAQEGSRFSVSIEKALPEDRGLYKCVAKNSAGQAECSCQVTVDDAQTSENTKAPEMKSRRPKSSLPPVLGTESDATVKKKPAPKTPTKAAMPPQIIQFPEDQKVRAGEPVELFGKVAGTQPITCKWMKFRKQIQESEHIKVENGESGSKLTILAARQEHCGCYTLVVENKLGSRQAQVNLTVVDKPDPPAGTPCASDIRSSSLTLSWYGSSYDGGSAVQSYNVEIWDTEDKVWKELATCRSTSFNVQDLLPDREYKFRVRAVNVYGTSEPSQESELTAVGEKPEEPKDEVEVSDDDEKEPEVDYRTVTVNTEQKVSDVYDIEERLGSGKFGQVFRLVEKKTGKIWAGKFFKAYSAKEKDNIRQEISIMNCLHHPKLVQCVDAFEEKANIVMVLEIVSGGELFERIIDEDFELTERECIKYMRQISEGVEYIHKQGIVHLDLKPENIMCVNKTGTRIKLIDFGLARRLENAGSLKVLFGTPEFVAPEVINYEPIGYATDMWSIGVICYILVSGLSPFMGDNDNETLANVTSATWDFDDEAFDEISDDAKDFISNLLKKDMKNRLDCTQCLQHPWLMKDTKNMEAKKLSKDRMKKYMARRKWQKTGNAVRAIGRLSSMAMISGLSGRKSSTGSPTSPINAEKLESEDDVSQAFLEAVAEEKPHVKPYFSKTIRDLEVVEGSAARFDCKIEGYPDPEVVWFKDDQSIRESRHFQIDYDEDGNCSLIISDVCGDDDAKYTCKAVNSLGEATCTAELIVETMEEGEGEEGGEEEEEEEE

SEQ ID NO: 365 - DNA, 1478 bp, Mus musculus
tgtgtaggctggagactgaccctgctgggctgtgggtggttatggtgcctgtttctaggaaaggaaggtgtccaggcccgcagagaagaaaggtgaaggagagagggaacaccgtctgtccccagctcgcagcaagcccatcgcacccatcttcctgcagggcctctccgacctcaaagtcatggatggaagccaggtcactatgacagtccaggtgtcagggaacccacctccggaagtcatctggcttcacgacgggaatgagattcaggagtccgaggacttccacttcgagcagaagggtggctggcacagcctgtgtatccaggaggtgttcccggaggacacgggcacgtacacctgtgaggcctggaacagtgccggggaggtccgcacccgggccgtcctcaccgtgcaagagcctcatgatggcacccagccctggttcatcagcaagcctcgttcggtgacagccaccctgggccagagtgtcctcatctcctgcgccatagctggagacccctttcccaccgtgcactggctccgggatggcagagccctctccaaggacagtggccactttgagctgctccagaatgaggacgtgttcaccctggttctaaagaacgtgcagccctggcatgccggccagtatgagattctgctcaagaaccgggttggcgagtgtagttgccaagtgtcactgatgcttcacaacagcccttccagagccccaccacgggggcgggagcctgccagctgcgagggcctctgtggtggtggaggagttggtgctcatggtgatggtgaccgtcatgggaccctgaggccctgctggccagcaagagggcaaggttggcctgaggaggaagacggagaagacgtgagggggctgttgaagagacgggtggagaccaggctgcacacagaagaggccatccgccagcaggaggtggggcagctggattttcgagacctcctgggaaagaaggtgagcaccaagaccgtctcagaagacgacctgaaggacatcccagccgagcagatggatttccgcgccaaccttcagcggcaagtgaagccaaagaccatatccgaggaagagaggaagaaatgctgggtggccagggggcggtgctctgtttcactgtggaagtggaggagagcactgggtgtggtgatacatacctggaatcccagcactcggaaggccaaggcaagagaattgcaagatcaaggccagcccagccaaccttacagggtcctgctcaaataaaacacagaggccagggatatagcctaatatgatacatagcaccccaaaacccggttacggaaaaagaaagattgttacaaaagaaaggggaaaggaaacctatccaccagacctgagttcttactgacatgttcttctgtttctaccaatgagccctggttttattggcagtctgtttaataaaattactcctgccctcatc

SEQ ID NO: 366 - protein, 364 aa, Mus musculus
MDGSQVTMTVQVSGNPPPEVIWLHDGNEIQESEDFHFEQKGGWHSLCIQEVFPEDTGTYTCEAWNSAGEVRTRAVLTVQEPHDGTQPWFISKPRSVTATLGQSVLISCAIAGDPFPTVHWLRDGRALSKDSGHFELLQNEDVFTLVLKNVQPWHAGQYEILLKNRVGECSCQVSLMLHNSPSRAPPRGREPASCEGLCGGGGVGAHGDGDRHGTLRPCWPARGQGWPEEEDGEDVRGLLKRRVETRLHTEEAIRQQEVGQLDFRDLLGKKVSTKTVSEDDLKDIPAEQMDFRANLQRQVKPKTISEEERKKCWVARGRCSVSLWKWRRALGVVIHTWNPSTRKAKARELQDQGQPSQPYRVLLK

SEQ ID NO: 367 - DNA, 1619 bp, Mus musculus
gttccagggctccggaggtgacgggcacaatgctttgggtcctggtgggggccgtcctccctgtcatgttgctggctgccccgccacctatcaacaagctggccctgtttccggacaagagtgcctggtgtgaagccaagaacatcacgcagattgtgggccacagcggctgtgaggccaagtctatccagaacagggcgtgcctaggacaatgcttcagttacagcgtccccaacaccttcccgcagtccacagagtccctggtgcactgtgactcctgcatgccggcccagtccatgtgggagattgtgaccttggagtgccctggccacgaggaggtgcccagggtggacaagctggtagagaagattgtacactgcagctgccaggcttgcggcaaggagcccagtcacgagggcctgaacgtctatgtgcagggtgaagacagcccgggctcccagcctggaccacactcccatgcccatccccaccctgggggccagacccctgagcccgaagagcctcctggagcccctcaggttgaggaagagggggctgaggactgagggcccccaactcttcctcccctcttgttccctgtggaatgtcggtcccaccctccagggaagagggaggggataggcagaagcccccctccccctttggcactggatggacttggaatgctgcctggttgtcatggagatctgaagggaggggctggagccaagctgcacaatttaatatatgcaagatgggggaggaagcagacagacatccgcaggacttttcttttggaaggtgaagtgtggtctttcctttcggccttctagagagatgagccccccacccccacccgggatagagaggaaatgggctgagctgctgaggatgagtgagatcctcaaacagggcaggcccaggccaggacccacacaactgatgggggcaggatccccagtgatgggtccagagtgggaatcaagtcctttgctgaaggacctatgtgggaagaccgcttgcagaggtcggaagctccagtcccataggtttccctaacgacctccctcactccccagtgccagggaagtaaccccttcaatggagtggcttaggagtcaggctggggcaggaccctgctgactcaagtgccagagtgtcactgaagaagaaagaagatccctcccatctctccctctggagatcttagctctctgctccccgtgttctggaccctttagggaagtagctgcagccagccctgctgtctttggggccggtctttctgaaagaggtgatggtccatctccatcacctgggaccatagtggacaggaggcccctgcatagggcccccactgacctcagctttctctagctccctagtctagccactcctccttcccagctgcactttaaccctagggcagggcaggtggcaaggaagggccctctgtcccctgatatgctggtaccattgtttgtgtccaggggatgccagctcacctccctgggggtgccccggcccgtggctgttcgacgagagccttagagcttgtaactagtagccatctcccctggacccgagtgttttcatgaataaataccttcaatgcctct

SEQ ID NO: 368 - protein, 178 aa, Mus musculus
MLWVLVGAVLPVMLLAAPPPINKLALFPDKSAWCEAKNITQIVGHSGCEAKSIQNRACLGQCFSYSVPNTFPQSTESLVHCDSCMPAQSMWEIVTLECPGHEEVPRVDKLVEKIVHCSCQACGKEPSHEGLNVYVQGEDSPGSQPGPHSHAHPHPGGQTPEPEEPPGAPQVEEEGAED

SEQ ID NO: 369 - DNA, 1233 bp, Mus musculus
atgacttaccttgaactgcttgctttgctggccttgcaaagtgtggtgacaggggcaacgttcccagatgaaaccataactgagtggtcagtgaacatgtataaccaccttcgaggcaccggggaagatgaaaacattctcttctctccactaagcattgcccttgcgatgggaatgatggagcttggggctcaaggatctactaggaaagaaatccgccattcaatgggatatgagggtctgaaaggtggtgaagaattttctttcctgagggatttttctaatatggcctctgccgaagaaaaccaatatgtgatgaaacttgccaattcgctctttgtacaaaatggatttcatgtcaatgaggaattcttgcaaatgctgaaaatgtactttaatgcagaagtcaaccatgtggacttcagtcaaaatgtggctgtggctaactccatcaataaatgggtggagaattatacaaacagtctgttgaaagatctggtgtctccggaggactttgatggtgtcactaatttggccctcatcaatgctgtatatttcaaaggaaactggaagtctcagtttagacctgaaaataccagaactttctccttcacgaaagatgatgaaagtgaagtgcagattccaatgatgtatcaacaaggagaattttattatggtgaatttagtgatggatccaatgaggctggtggtatctaccaagtccttgagataccctatgagggagatgagatcagcatgatgctggcactgtccagacaggaagtcccactggccacactggagcctctgctcaaagcacagctgatcgaagaatgggcaaactctgtgaagaaacaaaaggtggaagtgtacttgcccaggttcactgtggaacaggaaattgatttaaaagacatcttgaaagcccttggggtcactgaaattttcatcaaagatgcaaatttgactgccatgtcagataagaaagagctgttcctctccaaagctgttcacaagtcctgcattgaggttaatgaagaagggtcagaagccgctgcagcctccggaatgattgcgattagtaggatggctgtgctgtaccctcaggttattgtcgaccatccatttctctatcttatcaggaacaggaaatctggcataatcttattcatgggacgagtcatgaaccctgaaacaatgaatacaagtggccatgactttgaggaactttaa

SEQ ID NO: 370 - protein, 410 aa, Mus musculus
MTYLELLALLALQSVVTGATFPDETITEWSVNMYNHLRGTGEDENILFSPLSIALAMGMMELGAQGSTRKEIRHSMGYEGLKGGEEFSFLRDFSNMASAEENQYVMKLANSLFVQNGFHVNEEFLQMLKMYFNAEVNHVDFSQNVAVANSINKWVENYTNSLLKDLVSPEDFDGVTNLALINAVYFKGNWKSQFRPENTRTFSFTKDDESEVQIPMMYQQGEFYYGEFSDGSNEAGGIYQVLEIPYEGDEISMMLALSRQEVPLATLEPLLKAQLIEEWANSVKKQKVEVYLPRFTVEQEIDLKDILKALGVTEIFIKDANLTAMSDKKELFLSKAVHKSCIEVNEEGSEAAAASGMIAISRMAVLYPQVIVDHPFLYLIRNRKSGIILFMGRVMNPETMNTSGHDFEEL

SEQ ID NO: 371 - DNA, 2596 bp, Mus musculus
cctgacgctacgaagtcgcccaaagggaggctagaccccattctgcgcgctaggctgggaccttgaagcctggagcgcctacccggcagctctgagagagacaccttgaactaccatcctgccttctggtaagcacctaaccatgtccctggctgaggccatcagactctggaatgaaggggtgctcgcagccgacaagaaggactggaagggtgccctggaggccttcagcgaggtgcaggacccccactcgaggatttgcttcaacataggctgcgtgaacactatcctggaaaacttgcaggcagccgagcaggccttcaccaaaagcatcaacagagacaagcactctgcagtggcctacttccagagaggaatgctctactacagaatggagaagtacgaccttgctatcaaagaccttaaagaggccttgacgcagcttcgtgggaaccagctgatagactacaagatcctggggctgcagttcaagctgtttgcctgtgaggtattgtacaatattgctctcatgcatgccaagaaagaggaatggaagaaagcagaagagcagttggcattggcaaccaacatgaagtccgagcccaggcattccaagatcgacaaggccatggagagcatctggaagcagaagctgttcgagcccgtggtgatccctgtgggtcggctgttccgtccaaatgagaggcaggtggctcagctggccaaaaaggactatctgggcaaggctacggttgtagcatctgtggttcaccaagacaacttttctggcttcgcccctctgcagccacagtcagcagagcctcctcccagacccaaaaccccagaaatcttcagggctctggaaggtgaggcacaccgcgtattgtttggctttgtgccggagacgccagaagagctacaggtcatgcctgggaacatcgtctttgtcttgaagaagggcagtgataactgggccacagtcatgttcaatggacagaaggggcttgtcccctgcaactacctggagccagttgagcttcggattcaccctcagtcgcagccccaggaagatacctctccagaatccgatattccaccacctcctaattctagccccccaggaagactccagttgtcaccaggtcacaagcaaaaagagcccaaggaactgaagctcagcgtgcctatgccttacatgctcaaggtgcattacaaatacacagtggtcatggagacgcggcttggcctcccctacagccagcttcggaacatggtgtctaagaagctggcgctctcgccagaacacactaaactgagctaccggcgtcgggacagccacgagcttctgctcctgtccgaagaaagcatgaaggatgcctggggccaagtgaaaaactactgcctgactctgtggtgtgagcatacggtgggtgaccaaggtcttattgatgaacccatacaaagggaaaactcagacgccagtaagcagactacggagcctcagcctaaggaggggacccaggtggtagcaatcttcagttatgaggctgcccagccagaagacctggaatttgtggaaggagatgtaatcctggtactgtcacatgtgaatgaagaatggctggaaggggagtgtaaagggaaagttggcattttcccgaaggcttttgttgaaggatgtgcagccaagaatttggaaggcattcccagagaagtctaggatctacaaagctgaagcaaagtgttgtttttccccttgcaagacttacccatctctgctgtgcgctatacagacacaccagtttggaaatgtggcctaacttaccatttccctattaaaattgaacctgtcacacagcaatatgacaactcagaagattttcttacagatggaggagggggagacaaattttctgcaaaggaaatgaaggtttgtgtgtgtgctggctacgtgaatgtacttaagaattcccagagctgcacaccaatgggcacacctttctgctgggaaaacaggacacccagtgtccaagtccaacagttcagtggaaaaataattaataaagggttcttcctttattaattgcttgggttccagaagcttaaagcaaatttatatgtaatcctgaaggtacacacagacaactcattaaaaaacttaagctgcattaaagaaaaggcagattgaatcaggttcccatgaagcacaccatccagtcccaaggagaatggaactcttagaatgacagccctttctgtccctcagatggacaaacaggaagagaaatcaaccaccccccagatcacagccatcactgttggctttcatcagattcaatggcttttataggccagaggatgcctctgcctcccaagtgctgggattaaaggcatgcgccaccactgtccagctatggcagacattttaagctagcatttctagaacaagtcactggatgctaagaaaagcaaaacccatccccaagcctacccagttgtggccatttttgtttcttgctgacaagtgagcagttgaagttctaagctgtatttttactgctatatcctttaaggtagaataaatcctctacacacc

SEQ ID NO: 372 - protein, 525 aa, Mus musculus
MSLAEAIRLWNEGVLAADKKDWKGALEAFSEVQDPHSRICFNIGCVNTILENLQAAEQAFTKSINRDKHSAVAYFQRGMLYYRMEKYDLAIKDLKEALTQLRGNQLIDYKILGLQFKLFACEVLYNIALMHAKKEEWKKAEEQLALATNMKSEPRHSKIDKAMESIWKQKLFEPVVIPVGRLFRPNERQVAQLAKKDYLGKATVVASVVHQDNFSGFAPLQPQSAEPPPRPKTPEIFRALEGEAHRVLFGFVPETPEELQVMPGNIVFVLKKGSDNWATVMFNGQKGLVPCNYLEPVELRIHPQSQPQEDTSPESDIPPPPNSSPPGRLQLSPGHKQKEPKELKLSVPMPYMLKVHYKYTVVMETRLGLPYSQLRNMVSKKLALSPEHTKLSYRRRDSHELLLLSEESMKDAWGQVKNYCLTLWCEHTVGDQGLIDEPIQRENSDASKQTTEPQPKEGTQVVAIFSYEAAQPEDLEFVEGDVILVLSHVNEEWLEGECKGKVGIFPKAFVEGCAAKNLEGIPREV

SEQ ID NO: 373 - DNA, 2549 bp, Mus musculus
gtgcgtcctgcgggggaggaggcgcggagaggcggcaagcgcagccggggaggtgggggcagaggcacagacagaggcgcggaggctccgagagagaagacgtggagggagggacggagcctggacagcggtggacccgggccgcgcgcgccaggcaaagagcagcgcgcagcaggcgccgggcaccgagaggggaggcactggtgatctctggccgtccatgcacagagctccctctcccacagcggaacagccacctggcagaggggataacacacgccggaccccgcaacccagattcaaggcaagtgccccagccatggcactgcctcggacactgggtgagctacagctgtatcgggtcctgcaacgcgccaacctcctctcttactacgagaccttcatccagcagggaggagatgatgtacagcagctgtgtgaggctggcgaggaggagttcctggaaatcatggcactcgtgggcatggccaccaaaccactccatgtccgacgtctacagaaggctctgagagaatgggccaccaatccagggctcttcagccaaccagtgcctgctgtgcccgtctccagcatcccacttttcaagatctctgagacagctggtacccggaaagggagcatgagcaatgggcacggcagcccaggagaaaaggcgggcagtgctcgaagctttagccccaagagtcccctcgaacttggagagaagttgtcgccactccctggaggacctggggcaggggatccccggatctggccaggccagagcactccagaatctgatgttggagcagggggagaagaggaggccgggtctccccctttctccccacctgcagggggaggagtctctgaagggcctggggttgggggggtggcagctggtggtgcagggggtggtccagaccgcctggaaccagagatggtgcgaatggtggtggagagtgtggagaggatcttccggagtttccccaggggtgacactggagagatcgcatccctgttgaagctgaataagaagctggcgcggagcgtggggcacatctttgagatggacgatcatgacgcccagaaggaagaggagatccggaagtacagcgtcatctacggccgcctggactccaaaaggcgggagggcaaacagcttagcttgcatgagctgaccatcaacgaggctgctgcccagttctgcatgagggacaacactcttttactgcgaagggtagaactcttctcactgtcccgacaagtagcccgagagagcacctatctttcttccttgaagggatccaggcttcactctgaagaattgggaggcccaccactgaagaaactgaaacaagaggttggagaacagagtcacaatgaaatccagcagcctcctccaggccctgagtcctatgcacccccataccgccccagcctagaggaggacagcgccagtctgtctggggagagcctggatggccacttgcaggctgtggggtcgtgcccaaggctgacgccgccccctgctgacctgcccctggcattgccagcgcatgggctatggagccgccacatcttgcagcagacactgatggatgaggggctgcggctcgcccgcctcgtctcccatgatcgtgtgggccgcctcagcccctgtgtgcctgcgaagccgcctctcgcagagttcgaggaggggttgctggaccgctgccctgccccgggacctcatcctgctctggtggagggccgcaggagcagcgttaaagtggaggcagaagccagccggcagtgaaagtgggggaagtctcagacccaggacccagacttctggctcacttagacccccacattctccatccttgcactcgccactaccctagaaggatccttctgctgccctctgcctcccatccgccccatgggcacaggactatggggcttcaagcaataacaggcaggggcctggccagaggacacaaggacggtgcaaggtgtgccctcacccggcttaggggcacggactttgcctccagcctgctggggctctcctttctctcataccacacacacacacacacacacacacacacacacacacacacacacatattctccaggtggccagcagtggtgtgagcagctgaactacttcacttggacacggagaaagaacttccccaggaaggtctagcgacttacagtggaaccttcactctgagactgggggcttgggaaaactgggtctcccctccccatccccatttttcgtgcttctagtttgtttctttaatttaacaagtgctgcagtttgcccacccgttcttatctcccccctccccgcagacctttctctcagcactgtgtgggagggtgccccgaagttccctccaccagccccttagaggcctgggttggaccctgggcctcctcagccggcaggactgcagcacctgtcgaacacttagcgtgtctttcttttcagattgtgtacagtagattatttattttgttattttggaataaaatttattttatggcttagg

SEQ ID NO: 374 - protein, 525 aa, Mus musculus
MHRAPSPTAEQPPGRGDNTRRTPQPRFKASAPAMALPRTLGELQLYRVLQRANLLSYYETFIQQGGDDVQQLCEAGEEEFLEIMALVGMATKPLHVRRLQKALREWATNPGLFSQPVPAVPVSSIPLFKISETAGTRKGSMSNGHGSPGEKAGSARSFSPKSPLELGEKLSPLPGGPGAGDPRIWPGQSTPESDVGAGGEEEAGSPPFSPPAGGGVSEGPGVGGVAAGGAGGGPDRLEPEMVRMVVESVERIFRSFPRGDTGEIASLLKLNKKLARSVGHIFEMDDHDAQKEEEIRKYSVIYGRLDSKRREGKQLSLHELTINEAAAQFCMRDNTLLLRRVELFSLSRQVARESTYLSSLKGSRLHSEELGGPPLKKLKQEVGEQSHNEIQQPPPGPESYAPPYRPSLEEDSASLSGESLDGHLQAVGSCPRLTPPPADLPLALPAHGLWSRHILQQTLMDEGLRLARLVSHDRVGRLSPCVPAKPPLAEFEEGLLDRCPAPGPHPALVEGRRSSVKVEAEASRQ

SEQ ID NO: 375 - DNA, 3637 bp, Mus musculus
ggagggacgcggtggggatctcggtgggagcgcagagagagcagccgaggcggcagcggggctgcggggcgacggcggcagcggggcctgcggactccatggcgccagcggcgtcagtctgagtagcggcgggcggatccggccgcgtcttctcctcgccatgggagacgtactgtccacacacctggatgacgcacggcgccagcacatcgcagagaaaaccgagaagatcctcacagagttccttcgcttctatgaggaccagtatggtgtctccctcttcaatagcatgcgccatgagatcgagggcaccgggccaccgcaggcacagctgctctggcgcaaggtgcccctggatgaacgcatcatcttctccggaaaccttttccagtaccaggaagacaataagaagtggagaaaccgcttcagcctggtgccccataactatgggctggtgctatatgagaacaaagtggcctatgagcggcagataccaccccgggccgtcatcaacagcgcgggctacaaggttctcacctctgtcgaccagtatctggagctggtcggcaattccctgccagggaccacatcgaaatcaggctccacccccatccttaagtgcccaacgcagttccctctcatcctgtggcatccttacgcccgacactattacttctgcatgatgacagaagcggagcaggacaagtggcaggcagtgcttcaggattgcgttcgacactgcaacaacgggatcccggagaactcaaaggtggagggccctgcattcacagacgccatccgcatgtaccgccagtcaaaggagcagtacggcacctgggaaatgctgtgtggcaacgaggtgcagatcctaagcaacctggtgatggaggagctgggcccagcgctgaaggcagagcttggcccacggctgaagggaaagcctcaggagcggcagcgacagtggatccagatctcggacgctgtgtaccgcctggtatttgaacaggccaaggtgcactttgaggacgtgctgtgtaagctgcagcgggcccggccggccatggaggcagtcatccgcaccgacatggaccagatcatcacctccaaggagcatctggccagcaagatccgagccttcatcctccccaaggcggaggtgtgcgtgaggaaccacgtccagccctacatcccatccatcttggaggctctgatggtgcccaccagccagggcttcaccgaggtgcgggatgtcttcttcaaagaggtcacagacatgaatctgaacgtgatcaacgagggtggcattgacaagctgggcgagtacatggagaagctatcccagctggcataccaccccctgaagatgcagagctgctatgagaagatggagccactgcggctcgacgggctgcagcagcgattcgacgtgtctagcacttccgtgttcaagcagcgagcccagatccacatgcgagagcaaatggacaatgctgtgtacaccttcgaaaccctcctgcaccaagagctggggaagggacccaccaaggaggagctgtgcaaatccatccagcggattctagagcgcgtgctgaagaaatacgactatgacagcagttctgtgcgcaagagattcttccgagaggcgctgctgcagatcaccattcccttcctgctcaaaaagctggcccccacctgcaagtcggagctgccacgcttccaggagctgatctttgaagactttgccaggttcatcctggtggagaacacgtacgaggaggtggtgctgcagacggtcatgaaggacatcctgcaggctgtgaaggaggccgcagtgcagcgcaaacacaacctctaccgtgacagcatggttctgcacaatagtgaccccaatctacacctgctggctgagggcacaccaatcgactggggcgaacagtacggtgacagcggtgacagcggcggtggtgacagtggtggcagcccctgcccctctgaagcagccaccctcacagaaaagcgcaggcgtgccaagcaggtgatgtccgtggtccaggacgaggagtcggggctgccctttgaggctggcgttgaaccgccatcacctgcatccccggacagtgtcaccgagctccgaggcctgttggcccaggacctgcaggctgaaagctccccaccagccagccctcttctcaatggggctccagtccaagagagctcccaacccgtggcagtcccagaggcctcaccgccagcctcacccctccggcatctcccacctggaaaggctgtggaccttgagccccctaagcccagtgaccaagagaccggagagcaggtgtctagccccggtagccgtccccccatccataccaccactgaggacagtgcgggagtgcagacggagttctaagcatggcctccaggcttctgttggactctgcaccagggcgctcctccttgggcaccacagcctctcacctctggggaggggtactccagtttgtgccttgtgggaaaggtggctggggtggtgtggcatctccaggggtctggcctacccaagtcactttatggggttcagtacacctgttactgccccgttttctgtgggctgatctccaatgctgggtctggttttgagggtttcctctttgtgcaagggtctggggagcccctccatcccgccctcgtactgttacggcggcagatgaaagcagtggtggtgtgactcacgtataggaagctaggaagctgtcatctcactctggggctccttgggaccaacgtggcaaggaaaaggcagaccaggcctctgtcccgcccactccctgcaggtcccaaggttagacactggcctcactttgctagctactgctgtgggagggcggggcttaggggtcttacaggggagtgatgctagaggtcagaggtcatgatggaatgagaaaggcccagaatgtgttagtctgtgcaggggaagtgtcctgagggggagggagcttgggagtgtctttgccaggatggcaaagtgaaggtagctgaagttggagtgtcttgggtgacccgttcctgctcatctggctgacaacgctcattggcagggcttagctgtgggctgtttcactacgtgccaggaagctggtggggctccagagggacattgagggctatggctctctgagacactgctgaccattcatggcctctgctcccgtcacctaatcctgataattccagacccctcttccaatgtccttgtgagccatttgggcttgtctttccctcttagtcacaagggtcaaaccaagagtcagttagctagatgactctccccagactctgtcgccagagttgggagaacaaagcagagactgccgctccaaggcccccaggacgaggtccctcccagtcctgtgtcccttgctctgtggacctgctccccagacgcaggcctcagacccacaggatgtggccggtgctcagggacacccagtcccctgccctcactccgagtactgacttctttccatgttctctagtgccttgggggtttccaccatccttccagatatggtatgaagaatctatgcaaactgtgtaagcttctgctcatcaataaacgctttatttaaagctc

SEQ ID NO: 376 - protein, 802 aa, Mus musculus
EGRGGDLGGSAERAAEAAAGLRGDGGSGACGLHGASGVSLSSGGRIRPRLLLAMGDVLSTHLDDARRQHIAEKTEKILTEFLRFYEDQYGVSLFNSMRHEIEGTGPPQAQLLWRKVPLDERIIFSGNLFQYQEDNKKWRNRFSLVPHNYGLVLYENKVAYERQIPPRAVINSAGYKVLTSVDQYLELVGNSLPGTTSKSGSTPILKCPTQFPLILWHPYARHYYFCMMTEAEQDKWQAVLQDCVRHCNNGIPENSKVEGPAFTDAIRMYRQSKEQYGTWEMLCGNEVQILSNLVMEELGPALKAELGPRLKGKPQERQRQWIQISDAVYRLVFEQAKVHFEDVLCKLQRARPAMEAVIRTDMDQIITSKEHLASKIRAFILPKAEVCVRNHVQPYIPSILEALMVPTSQGFTEVRDVFFKEVTDMNLNVINEGGIDKLGEYMEKLSQLAYHPLKMQSCYEKMEPLRLDGLQQRFDVSSTSVFKQRAQIHMREQMDNAVYTFETLLHQELGKGPTKEELCKSIQRILERVLKKYDYDSSSVRKRFFREALLQITIPFLLKKLAPTCKSELPRFQELIFEDFARFILVENTYEEVVLQTVMKDILQAVKEAAVQRKHNLYRDSMVLHNSDPNLHLLAEGTPIDWGEQYGDSGDSGGGDSGGSPCPSEAATLTEKRRRAKQVMSVVQDEESGLPFEAGVEPPSPASPDSVTELRGLLAQDLQAESSPPASPLLNGAPVQESSQPVAVPEASPPASPLRHLPPGKAVDLEPPKPSDQETGEQVSSPGSRPPIHTTTEDSAGVQTEF

SEQ ID NO: 377 - DNA, 4427 bp, Mus musculus
ccggctcttgccctcgcagcccgcaatctggtgggaacccggacccttgagagccgtggccatgaagagcctcaagtcccgactgtggaagcaggacgcgcccggccccacgtcaccctcatcgcccaccgcggtggccagcacgcaatcagcggagtggaataagtacgatgaccggttgatgaaggctgctgaaagaggggatgtggagaaagtgtcctccatccttgccaaaaagggcgtccatcccggcaagctagatgtggaaggcagatcggccttccacgtcgtggcatccaaagggaatctggagtgtctgaatgccatccttacgcatggcattgatgttgcaaccagggacagtgcagggaggaatgcgcttcacctggcagctaagtacggacacgcgttgtgcctgcagaaacttctacagtacaactgtcccactgagcatgtggaccttcaaggaagaactgcccttcatgatgcagccatggcagactgtccttccagcatccagctgctctgtgaccacggggcctccgtgaatgccaaagatatagacgggcggacaccacttgttctggcgactcagatgtgcaggccgacaatttgtcagttgctgatagacagaggggcagatgtcaattccagagacaaacaaaacaggacagctctgatgctgggctgcgagtacggttgcagagatgccgtagaagtcctcgtgaaaaatggtgccgacctgaccttgctggatgcccttggccacgacagttcttactacgctagaattggtgacaacctggacatcctgaacctactgaagacggcgtcagaaaacaccaacaaaggtggcgggcgagaactttggaggaaaggaccgcctttgcagcagcggaatttgtcacacactcaggacgaaggaagcgtgaagtcaactcagagggaacagagggaaccccacagctttcaggatctagagattgaaaatgaagatttaagagagaagttgaggaagattcagcaagaacaaagaatcctcctggataaagtcaatggcttacagttacagctgaatgaggaagtaatggtcgcagatgatctggaaagcgagagagaaaagctgaagtcccttttggcggctaaagaaaagcaacacgaagaaagcttaagaaccatcgaggccctgaaaaacagatttaaatattttgagagtgatcacccaggacccggaagttacccgagtaaccgaaaagaagacatgctgcataaacaaggtcaaatgtacacgacagagccacagtgtgcatcaccgggtatacctccccatatgcatagcaggtctatgctaaggcctctggagttgtctttacccagtcagacctcatactctgaaaatgagattttaaagaaagaattggaaaccttgcgaacttactatgactcggcaaaacaggaccgactgaagttccaaaacgaactggctcacaaggtggcggagtgcaaagccttagctctggagtgcgagagagtcaaggaagactcggacgaacagatcaagcagctggaagatgccctcaaagacgtgcagaagaggatgtatgagtccgaagggaaagtcaaacaaatgcagacccacttcctcgccctcaaagagcacctgaccaacgaagcggccacagggagccaccgcatcatcgaggaactgagggagcagctgaaagacctgaaaggcaaatatgaaggcgcttcggccgaggtaggcaagctgcggagccagatcaaacagagcgagatgctggtgggagagttcaagagagacgagggcaggctggtggaagagaataagcgattgcagaaggaatgcggcacatgtgaagtcgagctggagaggagggggcgacgggtcgtggaactggagggccagctgaaggagctgggggctaagctggccctttctgtccccacagagaaatttgaaagcatgaagagctcattatccaatgacatcaatgagaaagtgaaaaggctggcggaggtggggcgggactatgaaagcgctcagggggaaattcgacagctgaagagggacctagagagtgtcagggcccagcatatcaggccggaggagcatgaacagctcagaagcaggttggagcagaagtcgggagagctggggaagaaggtgtcagagctgaccctcaaaaaccagacgctgcagaaagacgtggaaaaactccacgccgacaacaaacttctcaaccagcaggtgcacagcctcacggtggagatgaaaacgcgctacgtgcctctaagggtcagcgaagagatgaagaagtcgcatgacgtaaacgtggaggatttgaataagaagctttcggaggcaacacagagatacacagagaagaagcaggaagcagagagactgctggcggagaacgataagttgactaagaatgtcagccgcctggaagctgtgtttgtagctcccgagaaacatgaaaaggagctaatgggtctgaaatccaatatcgcagaactgaaaaagcaactgtctgagcttaataaaaaatgtggtgagggtcaggagaaaatacgtgcacttatgtctgaaaacagcagcttgaaaaagactctgagtagccagtatgtgcctgccaagacccacgaggaggtgaaggcctccctgaacagcaccgtggagaaaaccaacagagccttactggaggcgaagaaaaggtttgacgacacgagccaggaggtttcaaaactaagagatgagaacgaagtattgaggaggaacctggagaacgttcagaatcagatgaaggctgactatgtgagcctggaggagcactcgagaaggatgagcacggtgagccagagtctgaaggaggcacaggaggccaacgctgccatcctggccgaccaccgccagggccaggaggagatcgtctcgctccacgctgaaatcaaggcccagaaaaaggagctggacaccatccaggagtgcatcaagctgaagtacgcgccccttgcccgcttggaagagtgtgagcgcaagttcaaggccacagagaaaggactgaaggagcagttatcagagcagacgcacaagtgtcgccagagggacgaagaggtcaagaagggcaagcaagagaacgagaggctgcgggcggacctggccgcccttcagaaggagctgcaggataggaacgctctggcggaagaggcccgggaagcagaaagagcgttgagtggcaaggcagacgagctcagcaagcagctgaaggacctgtcccaaaagtacagcgacgtgaagagcgagagagagaagctggtagaagaaaaggccaagcaggcctccgagatcctggcagcccaaaatcttctgcagaagcagccggtcccgctggagcaggtggaggctctgaaaaaatctctcaacggcaccattgagcagttgaaggaggagctgaggagtaagcagaggtgtctggagcgcgagcagcagacggtgagccagcttcagcagctgctggagaatcagaagaactcctcggtgaccctggcggagcacctgaagctaaaggaagccctcgagaaagaggttgggatcatgaaagccagcctgagagaaaaggaagaggaaagccagaagaaaaccaaggaagtctccaaactccagacggaggttcagaccaccaagcaggcgctgaagaacttagagaccagagaggtcgtcgacatgtcgaagtacaaagccaccaagaacgacttggagacccagatttccaacttaaatgacaaactggccagcctgaacaggaagtacgaccaagcgtgtgaggagaaggtctctgccaaggacgagaaggagctgctccacctgagcatcgagcaggagatcagggaccagaaggagcgctgtgacaagtccctgacgaccatcatggaactgcagcagaggatccaggagtccgccaagcagatcgaagccaaggacaataagataactgaacttctgaatgatgtcgaaagactaaagcaggcgctcaacggcctttctcagctcacctacagcagtggcagccccaccaagcggcagagccagctggtggatactctgcagcagcgagtgagggatctgcagcagcagctggctgatgctgacagacagcaccaagaagttatcgctatctaccggacacacctcctcagtgccgcacagggccacatggatgaagatgtgcaggcagccctactgcagatcatacagatgcgacaaggccttgtgtgctagcggcagctgacttggagcctgtcctgctggtgctatgcattctgggtgcaactctgtgctcttctgggccttactctgatagtatcagtaaaataaactatattttgttccgttgttgaatttt

SEQ ID NO: 378 - protein, 1413 aa, Mus musculus
MKSLKSRLWKQDAPGPTSPSSPTAVASTQSAEWNKYDDRLMKAAERGDVEKVSSILAKKGVHPGKLDVEGRSAFHVVASKGNLECLNAILTHGIDVATRDSAGRNALHLAAKYGHALCLQKLLQYNCPTEHVDLQGRTALHDAAMADCPSSIQLLCDHGASVNAKDIDGRTPLVLATQMCRPTICQLLIDRGADVNSRDKQNRTALMLGCEYGCRDAVEVLVKNGADLTLLDALGHDSSYYARIGDNLDILNLLKTASENTNKGGGRELWRKGPPLQQRNLSHTQDEGSVKSTQREQREPHSFQDLEIENEDLREKLRKIQQEQRILLDKVNGLQLQLNEEVMVADDLESEREKLKSLLAAKEKQHEESLRTIEALKNRFKYFESDHPGPGSYPSNRKEDMLHKQGQMYTTEPQCASPGIPPHMHSRSMLRPLELSLPSQTSYSENEILKKELETLRTYYDSAKQDRLKFQNELAHKVAECKALALECERVKEDSDEQIKQLEDALKDVQKRMYESEGKVKQMQTHFLALKEHLTNEAATGSHRIIEELREQLKDLKGKYEGASAEVGKLRSQIKQSEMLVGEFKRDEGRLVEENKRLQKECGTCEVELERRGRRVVELEGQLKELGAKLALSVPTEKFESMKSSLSNDINEKVKRLAEVGRDYESAQGEIRQLKRDLESVRAQHIRPEEHEQLRSRLEQKSGELGKKVSELTLKNQTLQKDVEKLHADNKLLNQQVHSLTVEMKTRYVPLRVSEEMKKSHDVNVEDLNKKLSEATQRYTEKKQEAERLLAENDKLTKNVSRLEAVFVAPEKHEKELMGLKSNIAELKKQLSELNKKCGEGQEKIRALMSENSSLKKTLSSQYVPAKTHEEVKASLNSTVEKTNRALLEAKKRFDDTSQEVSKLRDENEVLRRNLENVQNQMKADYVSLEEHSRRMSTVSQSLKEAQEANAAILADHRQGQEEIVSLHAEIKAQKKELDTIQECIKLKYAPLARLEECERKFKATEKGLKEQLSEQTHKCRQRDEEVKKGKQENERLRADLAALQKELQDRNALAEEAREAERALSGKADELSKQLKDLSQKYSDVKSEREKLVEEKAKQASEILAAQNLLQKQPVPLEQVEALKKSLNGTIEQLKEELRSKQRCLEREQQTVSQLQQLLENQKNSSVTLAEHLKLKEALEKEVGIMKASLREKEEESQKKTKEVSKLQTEVQTTKQALKNLETREVVDMSKYKATKNDLETQISNLNDKLASLNRKYDQACEEKVSAKDEKELLHLSIEQEIRDQKERCDKSLTTIMELQQRIQESAKQIEAKDNKITELLNDVERLKQALNGLSQLTYSSGSPTKRQSQLVDTLQQRVRDLQQQLADADRQHQEVIAIYRTHLLSAAQGHMDEDVQAALLQIIQMRQGLVC

SEQ ID NO: 379 - DNA, 3911 bp, Mus musculus
ccggctcttgccctcgcagcccgcaatctggtgggaacccggacccttgagagccgtggccatgaagagcctcaagtcccgactgtggaagcaggacgcgcccggccccacgtcaccctcatcgcccaccgcggtggccagcacgcaatcagcggagtggaataagtacgatgaccggttgatgaaggctgctgaaagaggggatgtggagaaagtgtcctccatccttgccaaaaagggcgtccatcccggcaagctagatgtggaaggcagatcggccttccacgtcgtggcatccaaagggaatctggagtgtctgaatgccatccttacgcatggcattgatgttgcaaccagggacagtgcagggaggaatgcgcttcacctggcagctaagtacggacacgcgttgtgcctgcagaaacttctacagtacaactgtcccactgagcatgtggaccttcaaggaagaactgcccttcatgatgcagccatggcagactgtccttccagcatccagctgctctgtgaccacggggcctccgtgaatgccaaagatatagacgggcggacaccacttgttctggcgactcagatgtgcaggccgacaatttgtcagttgctgatagacagaggggcagatgtcaattccagagacaaacaaaacaggacagctctgatgctgggctgcgagtacggttgcagagatgccgtagaagtcctcgtgaaaaatggtgccgacctgaccttgctggatgcccttggccacgacagttcttactacgctagaattggtgacaacctggacatcctgaacctactgaagacggcgtcagaaaacaccaacaaagggcgagaactttggaggaaaggaccgcctttgcagcagcggaatttgtcacacactcaggacgaaggaagcgtgaagtcaactcagagggaacagagggaaccccacagctttcaggatctagagattgaaaatgaagatttaagagagaagttgaggaagattcagcaagaacaaagaatcctcctggataaagtcaatggcttacagttacagctgaatgaggaagtaatggtcgcagatgatctggaaagcgagagagaaaagctgaagtcccttttggcggctaaagaaaagcaacacgaagaaagcttaagaaccatcgaggccctgaaaaacagatttaaatattttgagagtgatcacccaggacccggaagttacccgagtaaccgaaaagaagacatgctgcataaacaaggtcaaatgtacacgacagagccacagtgtgcatcaccgggtatacctccccatatgcatagcaggtctatgctaaggcctctggagttgtctttacccagtcagacctcatactctgaaaatgagattttaaagaaagaattggaaaccttgcgaacttactatgactcggcaaaacaggaccgactgaagttccaaaacgaactggctcacaaggtggcggagtgcaaagccttagctctggagtgcgagagagtcaaggaagactcggacgaacagatcaagcagctggaagatgccctcaaagacgtgcagaagaggatgtatgagtccgaagggaaagtcaaacaaatgcagacccacttcctcgccctcaaagagcacctgaccaacgaagcggccacagggagccaccgcatcatcgaggaactgagggagcagctgaaagacctgaaaggcaaatatgaaggcgcttcggccgaggtgcacagcctcacggtggagatgaaaacgcgctacgtgcctctaagggtcagcgaagagatgaagaagtcgcatgacgtaaacgtggaggatttgaataagaagctttcggaggcaacacagagatacacagagaagaagcaggaagcagagagactgctggcggagaacgataagttgactaagaatgtcagccgcctggaagctgtgtttgtagctcccgagaaacatgaaaaggagctaatgggtctgaaatccaatatcgcagaactgaaaaagcaactgtctgagcttaataaaaaatgtggtgagggtcaggagaaaatacgtgcacttatgtctgaaaacagcagcttgaaaaagactctgagtagccagtatgtgcctgccaagacccacgaggaggtgaaggcctccctgaacagcaccgtggagaaaaccaacagagccttactggaggcgaagaaaaggtttgacgacacgagccaggaggtttcaaaactaagagatgagaacgaagtattgaggaggaacctggagaacgttcagaatcagatgaaggctgactatgtgagcctggaggagcactcgagaaggatgagcacggtgagccagagtctgaaggaggcacaggaggccaacgctgccatcctggccgaccaccgccagggccaggaggagatcgtctcgctccacgctgaaatcaaggcccagaaaaaggagctggacaccatccaggagtgcatcaagctgaagtacgcgccccttgcccgcttggaagagtgtgagcgcaagttcaaggccacagagaaaggactgaaggagcagttatcagagcagacgcacaagtgtcgccagagggacgaagaggtcaagaagggcaagcaagagaacgagaggctgcgggcggacctggccgcccttcagaaggagctgcaggataggaacgctctggcggaagaggcccgggaagcagaaagagcgttgagtggcaaggcagacgagctcagcaagcagctgaaggacctgtcccaaaagtacagcgacgtgaagagcgagagagagaagctggtagaagaaaaggccaagcaggcctccgagatcctggcagcccaaaatcttctgcagaagcagccggtcccgctggagcaggtggaggctctgaaaaaatctctcaacggcaccattgagcagttgaaggaggagctgaggagtaagcagaggtgtctggagcgcgagcagcagacggtgagccagcttcagcagctgctggagaatcagaagaactcctcggtgaccctggcggagcacctgaagctaaaggaagccctcgagaaagaggttgggatcatgaaagccagcctgagagaaaaggaagaggaaagccagaagaaaaccaaggaagtctccaaactccagacggaggttcagaccaccaagcaggcgctgaagaacttagagaccagagaggtcgtcgacatgtcgaagtacaaagccaccaagaacgacttggagacccagatttccaacttaaatgacaaactggccagcctgaacaggaagtacgaccaagcgtgtgaggagaaggtctctgccaaggacgagaaggagctgctccacctgagcatcgagcaggagatcagggaccagaaggagcgctgtgacaagtccctgacgaccatcatggaactgcagcagaggatccaggagtccgccaagcagatcgaagccaaggacaataagataactgaacttctgaatgatgtcgaaagactaaagcaggcgctcaacggcctttctcagctcacctacagcagtggcagccccaccaagcggcagagccagctggtggatactctgcagcagcgagtgagggatctgcagcagcagctggctgatgctgacagacagcaccaagaagttatcgctatctaccggacacacctcctcagtgccgcacagggccacatggatgaagatgtgcaggcagccctactgcagatcatacagatgcgacaaggccttgtgtgctagcggcagctgacttggagcctgtcctgctggtgctatgcattctgggtgcaactctgtgctcttctgggccttactctgatagtatcagtaaaataaactatattttgttccgttgttgaatttt

SEQ ID NO: 380 - protein, 1201 aa, Mus musculus
MKAAERGDVEKVSSILAKKGVHPGKLDVEGRSAFHVVASKGNLECLNAILTHGIDVATRDSAGRNALHLAAKYGHALCLQKLLQYNCPTEHVDLQGRTALHDAAMADCPSSIQLLCDHGASVNAKDIDGRTPLVLATQMCRPTICQLLIDRGADVNSRDKQNRTALMLGCEYGCRDAVEVLVKNGADLTLLDALGHDSSYYARIGDNLDILNLLKTASENTNKGRELWRKGPPLQQRNLSHTQDEGSVKSTQREQREPHSFQDLEIENEDLREKLRKIQQEQRILLDKVNGLQLQLNEEVMVADDLESEREKLKSLLAAKEKQHEESLRTIEALKNRFKYFESDHPGPGSYPSNRKEDMLHKQGQMYTTEPQCASPGIPPHMHSRSMLRPLELSLPSQTSYSENEILKKELETLRTYYDSAKQDRLKFQNELAHKVAECKALALECERVKEDSDEQIKQLEDALKDVQKRMYESEGKVKQMQTHFLALKEHLTNEAATGSHRIIEELREQLKDLKGKYEGASAEVHSLTVEMKTRYVPLRVSEEMKKSHDVNVEDLNKKLSEATQRYTEKKQEAERLLAENDKLTKNVSRLEAVFVAPEKHEKELMGLKSNIAELKKQLSELNKKCGEGQEKIRALMSENSSLKKTLSSQYVPAKTHEEVKASLNSTVEKTNRALLEAKKRFDDTSQEVSKLRDENEVLRRNLENVQNQMKADYVSLEEHSRRMSTVSQSLKEAQEANAAILADHRQGQEEIVSLHAEIKAQKKELDTIQECIKLKYAPLARLEECERKFKATEKGLKEQLSEQTHKCRQRDEEVKKGKQENERLRADLAALQKELQDRNALAEEAREAERALSGKADELSKQLKDLSQKYSDVKSEREKLVEEKAKQASEILAAQNLLQKQPVPLEQVEALKKSLNGTIEQLKEELRSKQRCLEREQQTVSQLQQLLENQKNSSVTLAEHLKLKEALEKEVGIMKASLREKEEESQKKTKEVSKLQTEVQTTKQALKNLETREVVDMSKYKATKNDLETQISNLNDKLASLNRKYDQACEEKVSAKDEKELLHLSIEQEIRDQKERCDKSLTTIMELQQRIQESAKQIEAKDNKITELLNDVERLKQALNGLSQLTYSSGSPTKRQSQLVDTLQQRVRDLQQQLADADRQHQEVIAIYRTHLLSAAQGHMDEDVQAALLQIIQMRQGLVC

SEQ ID NO: 381 - DNA, 642 bp, Mus musculus
agacattcagacaaggagacacaggcaagactttggagagagcagactaggcataatggccaccttgccaccaacagccaacccttcccagcaacctctaaacctagaggatgaagatggaatcctggatgaatatgatcagtacagcctggcccatccctgtgtcgtcgggggaggtcggaaaggtcggaccaagagagaagctgctgccaataccaaccgccctagccctggcgggcatgagaggaagctgctgaccaagttccagaactctgaaaggaaaaaagcctggcgctgagacggagctggagataaggccagaccacagacaccacacccagcaatggatacaggacatcacacccagcaatggatacaggacatcacacccagcaatggatacaggaccttggagaaattaggagttgtaagcaggacctaggcctgcttgattctttcccacctaagtgaggttctggagagggagcccttccacccttccagacccagcaaaagggcaagatgggagcaagaagcagagggtagacgggcagagctaggaagacagcccccaaaagaactgtgggggaaataaatcggatgcccttgggtggcagcaacaataaatcgtacagcagtgac

SEQ ID NO: 382 - protein, 80 aa, Mus musculus
MATLPPTANPSQQPLNLEDEDGILDEYDQYSLAHPCVVGGGRKGRTKREAAANTNRPSPGGHERKLLTKFQNSERKKAWR

SEQ ID NO: 383 - DNA, 1797 bp, Mus musculus
gcctttccgtttgccatggtgcagctccggccccgcttgtcgcgtattcccgcgccggctgaggcgatggtggacgaggaccaggcggcctcggaggaggaggaggcggagcacggcctgctgctcgcgcagcctagcagtggcgcggccgccgagcccctggacgaggaggaggacgcggacgacgaagccccggaggagctgactttcgccagcgcccaggcggaagcccgggaggaggagctgcgcgtgcgcgcgagtgctcgcagggataaaacgctgttgaaggagaagaggaaacggcgcgaggagctgttcatcgaacagaagaaaagaaagctgcttccagatgctgtattagagcagctaactacagcttcagaggccgacataaagaaatcaccagaaaacgtaaaagttaatttgaaaaagaaaagtgaacagcatgcaaaaggaagaaactccaagaaagttaaagtacagaaagtgcagtctgtcggtcagattgaaagctacatggctgtaaggcttaaagatgaagatctgagagattcaaggcaagaggcagccaaacacttcatccacagttgtttatatggttcagattccaaaaggactactgtaaacaagttcctgtctctgaacaacaagaggtcaccagtgaaaaaggctgcagcccagtttctgactagcacctggggagctcagaaacaacaaaatgccaagaggtttaaaaaacggtggatggccaaaaagatgaagaagaaaacttataagtgaatcaaagtcaagtgaaatgaaaaacctgcattttgcatgcatagtttaagattactgggtgcagagagggttcatttctcaaaatttagtcactgataaatcattgtaacggatcattataaaaatcataaacatattttgtttgggaaaacagctggtcacatttcttttctagaacacaattgagtgtcctggagggagaagcactcacttaaagaggaatcttcatcttttgagtggccccaggaaggggaacagagaccattcatgaagtcttttagtacagctgaaaagctattctggtgttattgatgtgattcctgttgtcaaggaataagaagtcattgttaaaaagcacagtgtaaaaaacaaacaaaaaatccacagaacaggtaaataaacatgtgttggagaagacttcaacctcagctagtacctttacctcaccatggacgaaattcattggaattaagtgttttttgttctttaaagagaaaggtaggggtgtgtgtgtcacacacatagctggtgtgtcaggagacaatttatatagattcttccctaccatgtgtgtccagaggttgtaactaagtacctttacctgctgagcaatcttgccagctctggaacagcttttcaaattttatttttaactagtttggaggttttgcttggttgacagttacctgttaagttcctatttttctatttccttgcacagtgtaaggttttaactaatgcagttacctaaaggtagttttagtctgtagaacttgaactgactctaagcagtatatgagaacctaatacataaaattcaactgacactaatatctgtagaagtaaatttttaatggctggttaattatatcgctacattttttttaatatcgctacattttttattgcaatatagtactcatttaagcacttaaaaatggaaggtgtacaaagattaaattaagacacggtaaattgactaaatatttggtttttatataaataaaggtcataacc

SEQ ID NO: 384 - protein, 254 aa, Mus musculus
MVQLRPRLSRIPAPAEAMVDEDQAASEEEEAEHGLLLAQPSSGAAAEPLDEEEDADDEAPEELTFASAQAEAREEELRVRASARRDKTLLKEKRKRREELFIEQKKRKLLPDAVLEQLTTASEADIKKSPENVKVNLKKKSEQHAKGRNSKKVKVQKVQSVGQIESYMAVRLKDEDLRDSRQEAAKHFIHSCLYGSDSKRTTVNKFLSLNNKRSPVKKAAAQFLTSTWGAQKQQNAKRFKKRWMAKKMKKKTYK

SEQ ID NO: 385 - DNA, 1543 bp, Mus musculus
ccgagagcggggttcagtaccttttcctctgtccccagccggcgcccggagcccccctccccttccttcccgccccctcccctccccagccctgccctcccccttgtcccgggatcactccgtcgcacccaccatgatggaagacgacggacagccccggactctatacgtaggtaacctctccagagatgtgacagaagtccttattcttcagttattcagtcagatcggaccctgtaaaagctgtaaaatgataacagagcaacccgatagcagaagggtcaactcttctgttggattttctgttttgcagcatacaagcaatgacccatattgctttgtggaattttatgaacacagagatgcagctgctgcattagctgctatgaatgggagaaaaattttgggaaaggaggtcaaagtaaactgggcaacaacaccaagtagccagaaaaaagatacttccaatcacttccatgtgtttgttggggatttgagtccagaaattacaacagaagatatcaaatcagcatttgccccctttggtaaaatatcggatgcccgggtagttaaagacatggcaactggaaagtccaaaggctatggttttgtatctttttataacaaactggatgcagagaatgcaattgtgcatatggggggtcagtggttgggaggtcgacaaatcagaaccaattgggccacacgtaaaccacctgcccctaaaagtacacaagaaactaacactaagcagttgagatttgaagatgtagtaaaccagtcaagtccaaaaaactgtactgtgtactgtggaggaattgcttcggggctgacagatcaacttatgagacaaacattttcaccatttggacaaattatggaaatacgagtttttccagagaagggctattcgtttgtcagattttccactcacgagagtgcggcccacgccattgtctctgtgaacggcactacaatcgaaggacatgtggtgaaatgctattggggtaaagaatctcctgatatgactaaaaacttccaacaggttgactacagtcagtggggccagtggagccaagtgtatggaaacccacaacagtatggacagtatatggcaaatgggtggcaagtaccaccctatggagtatatgggcagccgtggaaccaacaaggatttggagtagatcaatccccttctgctgcttggatgggtggatttggtgctcagcctcctcaaggacaagcccctccccctgtaatacctcctccaaaccaagctgggtatggaatggcaagcttcccgacacagtgagctgggactcgaaacacgattgtaattcaccacaggctgcagtctcctgtcacactctgaagacatgaaaagtaaacatcggaaaatgaaaatatttattttaaaaattgaaatgtttggaacctttagcacagctttgcttggtgaaggacacatgtcttctagttctgcctttttaagtttttgttcatgatggatatgaacatgatttttctttgtgtacaaaaaact

SEQ ID NO: 386 - protein, 392 aa, Mus musculus
MMEDDGQPRTLYVGNLSRDVTEVLILQLFSQIGPCKSCKMITEQPDSRRVNSSVGFSVLQHTSNDPYCFVEFYEHRDAAAALAAMNGRKILGKEVKVNWATTPSSQKKDTSNHFHVFVGDLSPEITTEDIKSAFAPFGKISDARVVKDMATGKSKGYGFVSFYNKLDAENAIVHMGGQWLGGRQIRTNWATRKPPAPKSTQETNTKQLRFEDVVNQSSPKNCTVYCGGIASGLTDQLMRQTFSPFGQIMEIRVFPEKGYSFVRFSTHESAAHAIVSVNGTTIEGHVVKCYWGKESPDMTKNFQQVDYSQWGQWSQVYGNPQQYGQYMANGWQVPPYGVYGQPWNQQGFGVDQSPSAAWMGGFGAQPPQGQAPPPVIPPPNQAGYGMASFPTQ

SEQ ID NO: 387 - DNA, 1137 bp, Mus musculus
agcaaagaacagtctgaacttgatcaagatttggaagatgttgaagaagtagaagaagaagaaacgggtgaagaaacaaaaatcaaagcacgtcagctaactgttcagatgatgcaaaatcctcagattcttgcagctcttcaggaaagacttgatggtctggtagacacaccaacaggatacattgaaagcttgcctaaggtagtcaaaagacgagtgaatgctctcaagaatcttcaggttaaatgtgcacagatagaagccaaattctatgaggaagttcatgatctcgagaggaagtatgctgttctctatcagcctttatttgataagcgatttgagatcattaatgcaatctatgaacctacagaagaagaatgcgagtggaaaccagatgaggaggatgaagtttcggaggagctgaaagaaaaggccaagattgaagatgagaaaaaggatgaagaaaaagaagacccgaaaggaattcctgaattttggttgacagtgtttaagaatgttgacttgctcagtgacatggttcaggaacatgatgaacctattctgaagcacttgaaagatattaaagtgaagttttcggatgctggccagcctatgagttttgtcttagaatttcactttgaacccaatgactatttcacaaatgaagtgttaacaaagacttacaggatgcggtcagagccagatgattctgaccccttttcttttgacggaccagagattatgggctgtacagggtgccagatagattggaaaaaaggaaagaatgttactttgaaaaccattaagaagaagcagaaacacaaggggcgtgggacagttcgtactgtgactaaaacagtttccaatgattctttctttaatttttttgctcctcctgaagttcctgagaatggcgatctggatgatgatgctgaggcgatactggctgcagactttgaaattggtcactttttacgtgagcgcataatcccaagatcagtgctgtacttcactggagaggctatcgaggacgatgacgatgattatgatgaagaaggtgaagaagctgacgagggttatcagctctttgaagaagtcaaaagctgcagtaaacttttccaacgttggctgcagtaa

SEQ ID NO: 388 - protein, 378 aa, Mus musculus
SKEQSELDQDLEDVEEVEEEETGEETKIKARQLTVQMMQNPQILAALQERLDGLVDTPTGYIESLPKVVKRRVNALKNLQVKCAQIEAKFYEEVHDLERKYAVLYQPLFDKRFEIINAIYEPTEEECEWKPDEEDEVSEELKEKAKIEDEKKDEEKEDPKGIPEFWLTVFKNVDLLSDMVQEHDEPILKHLKDIKVKFSDAGQPMSFVLEFHFEPNDYFTNEVLTKTYRMRSEPDDSDPFSFDGPEIMGCTGCQIDWKKGKNVTLKTIKKKQKHKGRGTVRTVTKTVSNDSFFNFFAPPEVPENGDLDDDAEAILAADFEIGHFLRERIIPRSVLYFTGEAIEDDDDDYDEEGEEADEGYQLFEEVKSCSKLFQRWLQ

SEQ ID NO: 389 - DNA, 2413 bp, Mus musculus
agtgacctaagaggagaggatccctgtggccggacctgttaccatgtcccatcaacctctgagctgcctgactgagaagggggacagcccttgtgagaccccaggaaatggaccctccaatatggttcaccccagcctggacacattcacccctgaggagctgctgcagcaaatgaaggaactcctggttgagaaccaccagctgaaagaagccatgaagctaaataatcaagctatgaaagggcgatttgaggagctgtccgcctggacagagaagcagaaggaagagcgcctgttgtttgagatgcaaagcaaagaggttaaggagcgccttaaggccctgactcatgaaaatgagaggctgaaggaagagcttggaaaattcaaagagaaatcagaaaagccattggaagacctcacaggtggctacaggtatcccagagccttggaggaggaagtggagaagctgaagacccaggtggagcaggaagtggagcatctgaagatccaggtgatgcgccttcgggctgaaaaggcagacctgctgggcatcgtctcagaactgcagctcaaactcaactccggcggctcctcggaagactccttcgttgagatcaggatgaccgaaggagagactgaaggggcaatgaaggagatgaagaactgccctacacccacaagaacagaccccatcagcttgagcaactgtacagaggatgccaggagttgtgcggagtttgaagaactgactgtgagccagcttctgctttgcctaagggaaggaaaccaaaaggtggagagacttgaagtcgccctcagagaagccaaagaaagaatttcagattttgaaaagaaagcaaatggccattcttctactgagaagcagacagcgaggagagcagacagagagaaggaggacaaaggccaagagagtgttggaagcgaagtggaaacactgagcattcaagtgacctctctgtttaaggagcttcaagaggcacacacaaaactcagtgaggctgagctgatgaagaagagacttcaagaaaagtgtcaggctctggagaggaagaactctgcaacaccatcagagctgaatgaaaagcaagagctcgtttacagtaacaagaagttagagctgcaggtggagagcatgcgctccgaaatcaagatggagcaggccaagacagaggaggagaagtccaggttagccactctgcaggcaactcacaacaagctccttcaagaacataataaggcactgaaaacaattgaagaactaaccaagcaacaggcagaaaaggtggacaagatgttgctgcaggagctcagcgagaagctggagctggcagagcaggctctggcatccaaacagctccagatggatgagatgaagcagacgctcgctaagcaggaggaagacctggagaccatggccgtcctcagggctcagatggaggtgtactgctcagattttcacgctgagagagcagcaagagagaagattcatgaagaaaaggagcagctggccttgcagctcgcgattttgctgaaagagaacaatgacattgaagagggaggcagtagacagtccctgatggaaatgcagtgccgacacggggcaagaaccagtgactctgaccagcagacttacctgtttcaaagaggagccgaggacaggagctggcagcacgggcagcagcctcgcagtattccgattcactcctgccccaagtgcggggaggtcctgccggacatcgacacgcttcagatccatgtgatggactgcatcatttgagtgttctctccagtccccaaagctcttgggagagcatcttctggaccgacaggaagtcacaaagaggaatctaattagcacccttccacataagccagccagtgtttttatgttctgctcatgagagtcactgtgagcagtcagccagaatggctgcagtgtttttctaggtaaatcttcccttagtgggcatcttgttgtgtgtgtaattctgtggaagttccatgtggctctttctgactgaacactgtggtatctgttgacaccaggacaggtgagagatagggacaagctcaggattggagtccttccctcagctgttcggtgtgacattaccctcaggctccgtactggagctgtacaggatagtacagtacatagtttaatttttaaaagaacagctattttctttgcagatgaagtagcagcttacagatgtctgagacactgagagcctaacagtgggtagcaggacaggagggaaggtgtgggaagagtgagagtgctggccgatggcacagcgtctcaggagggataatctgtacagaatagtgactgtaatcatttgtatattaaggccatatcaccagtttagtaaacaccttgcaaaccctc

SEQ ID NO: 390 - protein, 584 aa, Mus musculus
MSHQPLSCLTEKGDSPCETPGNGPSNMVHPSLDTFTPEELLQQMKELLVENHQLKEAMKLNNQAMKGRFEELSAWTEKQKEERLLFEMQSKEVKERLKALTHENERLKEELGKFKEKSEKPLEDLTGGYRYPRALEEEVEKLKTQVEQEVEHLKIQVMRLRAEKADLLGIVSELQLKLNSGGSSEDSFVEIRMTEGETEGAMKEMKNCPTPTRTDPISLSNCTEDARSCAEFEELTVSQLLLCLREGNQKVERLEVALREAKERISDFEKKANGHSSTEKQTARRADREKEDKGQESVGSEVETLSIQVTSLFKELQEAHTKLSEAELMKKRLQEKCQALERKNSATPSELNEKQELVYSNKKLELQVESMRSEIKMEQAKTEEEKSRLATLQATHNKLLQEHNKALKTIEELTKQQAEKVDKMLLQELSEKLELAEQALASKQLQMDEMKQTLAKQEEDLETMAVLRAQMEVYCSDFHAERAAREKIHEEKEQLALQLAILLKENNDIEEGGSRQSLMEMQCRHGARTSDSDQQTYLFQRGAEDRSWQHGQQPRSIPIHSCPKCGEVLPDIDTLQIHVMDCII

SEQ ID NO: 391 - DNA, 1815 bp, Mus musculus
atgaccagcccctccccgcgcatccagataatttccaccgactctgcggtagcctcacctcagcgcattcagattgtaacagaccagcagacaggacaaaagatccagatagtcaccgcagtggatgcctctggatcctctaaacagcagttcatcctaaccagcccagatggagctggaactgggaaggtgatcctggcttctccggaaacatccagtgccaagcagctcatattcaccacctcggacaaccttgtccctggcaggatccagatcgtcacggattctgcttctgtggagcgtttgctggggaaggcagacgtccagcggccccaggtggtggagtactgtgtggtctgtggcgacaaagcctctgtaaaaaaatttttctcatcttgtttatatcacccaaggtgtgttatgtatataattcccccgatccaaattgtctcacttttctttttatccactaaaccctgtgtgataagcttctatgatggagtaggaaccatgctgtgccccttggaaaagtgtacgcagacgtgcatgcatgcctctctctctctctctctctctgtgtctgtacagagtgaacggaagccctttgatgtgcaacgggagaaaccaagcaattgtgctgcttccactgagaagatctatatccggaaagacctgagaagtcctctgatagccactcccacatttgtggcagacaaagatggagcaagacaaacaggtcttcttgatccagggatgcttgtgaacatccaacagcctttgatacgtgaggatggtacagttctcctggccgcggattccaaggctgaaacaagccaaggagctctaggtacactggcaaatgtagtgacctctttggccaacctgagtgaatctttgaacaacggtgatgcttcagaaatgcagccagaggaccagtctgcaagtgagattactcgggcatttgacaccttagcgaaagcacttaataccacagatagtgcttcacctccaagcctggcagatgggatagatgctagtggaggagggagtatccatgtcatcagcagagatcagtcaacacccatcattgaagttgaaggccctctcctttcagacacacatgtcacattcaagcttacaatgcccagtcctatgccagagtacctcaatgtacattacatctgtgagtctgcatcccgcctgcttttcctctccatgcactgggcaaggtcaatcccagccttccaggcacttggacaggactgtaataccagcctggtgagggcctgctggaatgagctcttcactcttggcctggcccagtgtgcccaggtcatgagtctctccaccatcctggcagccattgtcaaccacctacagaacagcatccaggaagataagctttctggtgaccggataaagcaagtgatggagcacatctggaagctgcaggagttctgtaacagcatggcgaaactggatatagacggctatgagtacgcataccttaaagctatagttctctttagtcccgatcatccaggtttgacaggcacaagccagattgagaaatttcaggagaaggcacagatggaattacaggactatgtgcagaaaacctactctgaagatacttacagattggccaggattcttgtccgcctaccagcactcaggctcatgagctccaacataacagaagaacttttttttactggtctcattggcaatgtttcaatagacagcataattccttacatcctcaagatggagacagcagaatataatggccagatcactggagccagtctatag

SEQ ID NO: 392 - protein, 604 aa, Mus musculus
MTSPSPRIQIISTDSAVASPQRIQIVTDQQTGQKIQIVTAVDASGSSKQQFILTSPDGAGTGKVILASPETSSAKQLIFTTSDNLVPGRIQIVTDSASVERLLGKADVQRPQVVEYCVVCGDKASVKKFFSSCLYHPRCVMYIIPPIQIVSLFFLSTKPCVISFYDGVGTMLCPLEKCTQTCMHASLSLSLSVSVQSERKPFDVQREKPSNCAASTEKIYIRKDLRSPLIATPTFVADKDGARQTGLLDPGMLVNIQQPLIREDGTVLLAADSKAETSQGALGTLANVVTSLANLSESLNNGDASEMQPEDQSASEITRAFDTLAKALNTTDSASPPSLADGIDASGGGSIHVISRDQSTPIIEVEGPLLSDTHVTFKLTMPSPMPEYLNVHYICESASRLLFLSMHWARSIPAFQALGQDCNTSLVRACWNELFTLGLAQCAQVMSLSTILAAIVNHLQNSIQEDKLSGDRIKQVMEHIWKLQEFCNSMAKLDIDGYEYAYLKAIVLFSPDHPGLTGTSQIEKFQEKAQMELQDYVQKTYSEDTYRLARILVRLPALRLMSSNITEELFFTGLIGNVSIDSIIPYILKMETAEYNGQITGASL

SEQ ID NO: 393 - DNA, 2257 bp, Mus musculus
gggggctctctctacggcgaatagtagtgtccctgctcacaggtgttgcggagatatcctccatcgtggaagagctcagaccccgagaagctggtgtctagctgcggcccagagcaaggatgggcagtctggtattcaggagacctttctgccatctctccacctacagcctgatttggggcatggcagcagtagcgctgagcacagctcaagtggaagtggtgacccaggatgaaagaaaggcgctgcacacaactgcatccttacgatgttctctaaaaacatcccaggaacccttgattgtgacatggcagaaaaagaaagccgtgagcccagaaaacatggtcacctacagcaaaacccatggggttgtaatccagcctgcctacaaagacaggataaatgtcacagagctgggactctggaactcaagcatcaccttctggaacacaacattggaagatgagggctgctacatgtgtctcttcaacacgtttggttctcagaaggtctcaggaacagcttgccttaccctctatgtacagcccatagtacaccttcactacaactattttgaagaccacctaaacatcacttgctctgcgactgcccgtccagcccctgccatctcctggaagggtactgggacaggaattgagaatagtaccgagagtcacttccattcaaatgggactacatctgtcaccagcatcctccgggtcaaagaccccaaaactcaagttgggaaggaagtgatctgccaggttttatacctggggaatgtgattgactacaagcagagtctggacaaaggattttggttttcagttccactgttgctaagcattgtttctctggtaattcttctgatcttgatctccatcttactatactggaaacgtcaccgaaatcaggagcggggtgaatcatcacaggggatgcaaagaatgaaataagagctctaaagaaattatacagaaccctgaacgtgtttccctggtctacttgaatctgatgtgaaagaaaagcaggagggaaaaggccattctccataggacctaaggagagcaaaagaccagacacgagcctgtgagggatttgactttttgctgttgtcccaggtcctcggtgtttgcattccaagaggaagtcgagtgcctcgggtctgttgtaggacttgattttttttttttttgtagagcaatgcagtgccatgctgttagaaaggctccagacttagaaccaccagtgccaagccagctctcagaccgactagggctcccatcggaggaacaaatcgtagtcaacttacctcacagagctctctggtccttacacaaagtagaaaggagtgggaccagaaaattggccatgtctgaaatctgatggaatttttaggaagaaaactgaagaataagcaaaagaagaaagaacacagaagggtccaaagagcttctgagagtaccttttgcctttctgttggtgtcccagctctggttttgttcttaggtccgccagtgtgtttccctgttgtttgagtatctagttgactacctgctactgttctgctgatggttggccttgctagaatccctgactcccctgccgttctctatgtgcttctatgagggttactatgatgaaaatagagcagaagatagtgtgaagtaacattggcaactgtaatgtgtccatttaacttatttttatagcacttaggcaatattgttagtcttagtgagtagttcacatctttacaaaagcatgctctccctatccattgggcccacaataacactctctttgaggccattctgaatcctgtctcgtgtaatgataatatattatgaaaacagatactttaagaatttcctgtacagcagtcagttgtttattctctctctctctctctctctctctctccctcccccaccccagcttctttttctgtgactttgtttttcataaagagaaggcatctcctgaatacaatcgctttgttctgaagacatcgtgaactattaattcttaaccctttgacaaaactagtgaagttgttttctgtatcttttgcttcatctgtctttatagagtgacctaggaattcaagtgtaagttgtttccattgttgaactggatatttatatacttggtatgcttttcacgtgttatttaattctgtataatttcctatatttgtattaaaatattgagcaattaaaagtgtcaactaaatatttgatgtggcattcccttg

SEQ ID NO: 394 - protein, 274 aa, Mus musculus
VFRRPFCHLSTYSLIWGMAAVALSTAQVEVVTQDERKALHTTASLRCSLKTSQEPLIVTWQKKKAVSPENMVTYSKTHGVVIQPAYKDRINVTELGLWNSSITFWNTTLEDEGCYMCLFNTFGSQKVSGTACLTLYVQPIVHLHYNYFEDHLNITCSATARPAPAISWKGTGTGIENSTESHFHSNGTTSVTSILRVKDPKTQVGKEVICQVLYLGNVIDYKQSLDKGFWFSVPLLLSIVSLVILLILISILLYWKRHRNQERGESSQGMQRMK

SEQ ID NO: 395 - DNA, 4130 bp, Mus musculus
ccccgggccgccgatgtcgcgcggggcgcaggggccgccggccggcacggactcccgccgctcgcgctgcgcccctggcgttggctgcttctgctcgcgctgcccgccgcctgctccgcgctgccgccgccgcgccccgtctacaccaaccactgggcagtgcaagtgctgggcggccccggcgcggcggaccgcgtggctgcggcgcacggctacctcaacttgggccagattggaaacctggacgattactatcatttttaccacagcaagaccttcaagagatcgaccttgagcagcaggggcccccacaccttcctcagaatggacccacaggtaaaatggctgcaacaacaggaagtgaagcgcagagtcaagagacaggcgcgaagtgactctctttatttcaatgatcccatttggtctaacatgtggtacatgcattgtactgataagaacagtcgctgtcggtcagagatgaacgtccaggcggcgtggaagcgtggctacacaggaaagaatgtggtcgtcaccatcctcgatgacggcatagaaaggaatcacccagacctggcccccaactacgattcctatgcaagctacgatgtcaatggaaatgattatgacccatccccgagatatgacgccagcaacgagaacaaacatggcactcgctgtgcgggtgaagtcgctgcctcggccaacaactcctactgcatcgtgggcatcgcatataatgcaaagataggaggcatccggatgctggacggcgatgtgaccgatgtggtggaggccaagtctctgggcatcagacccaactacattgacatttacagcgccagttggggacccgatgatgacggaaagacagtagatggaccaggccggctggctaaacaagctttcgagtatggcattaaaaagggtcgccaaggtctgggctccatttttgtttgggcctctgggaatggtgggagagaaggggaccactgctcctgtgatggctacaccaacagcatctacaccatctccgtaagcagcaccactgagaacggccacaaaccctggtacctggaagaatgcgcttccacgttggctaccacctacagcagcggggccttctatgaacggaagatcgtcaccacagatctgcgtcagcgctgcaccgacggccacactgggacatcagtctcagcccccatggtggctggtatcattgccttggctctagaagcaaacaaccagttgacctggagggatgtgcagcacctgctggtgaagacatcacggccagctcatctgaaggcgagcgactggaaagtcaacggagctgggcataaagttagccatctctatggatttggcttggtggatgcagaagctctggtcctggaggcgaggaagtggacggcagtgccctcccagcacgtatgcgtggccaccgcagacaaaaggcccaggagcatccccatagtgcaggtgctacggaccacagccctgaccaacgcctgtgcggaccactcagaccagcgtgtggtgtacctggagcatgtggttgtccgaatctctatctcacacccacgccggggcgatctccagatccacctgatttctccctctggaaccaagtctcaacttttggcaaagagattgctggatttttccaatgaggggttcacaaactgggaattcatgaccgtccactgctggggagaaaaggctgaaggggagtggactctggaagtgcaggatataccatcgcaggtccgaaacccagagaaacaaggaaagctgaaagaatggagcctcattttatatggcaccgcagagcacccatatcgcaccttcagctcccatcagtctcgctcacggatgctggagctctccgtcccggagcaggagcctcccaaggctgctggacaaccaccccaggcagagactccagaagacgaggaagagtacacaggtgtgtgccatcccgagtgtggtgacaaaggctgtgatggtcccaatgcagaccagtgcttgaactgtgtccacttcagcctggggaactccaagacaaacaggaagtgtgtgagcgagtgccccttgggctactttggggatgcagctgcaagacgctgccgtcgctgccataagggatgtgagacgtgcacgggcaggagcccagcacagtgcctgtcttgtcgccgtgggttctatcaccaccaggagacgaacacgtgtgtgaccctctgtcctgccggactttatgctgatgaaagtcagagactctgcctcaggtgccacccgagctgtcagaagtgcgtggatgaacctgagaagtgcactgtgtgtaaggagggattcagcctggcacggggcagctgcattccggactgtgaaccgggtacctacttcgattcagagctcgtcaaatgtggggaatgccatcacacctgccggacctgtgtggggcccagcagagaagagtgtattcactgtgcaaaaagcttccacttccaagactggaaatgtgtgccggcctgcggtgagggcttctacccggaggagatgcctggcttaccccacaaagtgtgtcgaagatgtgaggagaactgcctgagctgcgagggctccagtaggaactgcagcagatgtaaagccggcttcacacagctgggaacctcctgcatcaccaaccacacgtgcagcaatgccgatgagaccttctgcgagatggtgaagtccaatcggctctgcgaacggaagctcttcatccagttttgctgccgcacctgcctcctggctgggtaggggcaccagctgcccgcagagggcagggtcctcctgtctgcccgtttgcccatctaccttcctacagatggtcagccatagcctgttccttggggtagccctgcatctgacagctgtatctcccccagagctgggttctactgcagcatctctgagcacctgaacaggtggaggtggcccttaaggatatgtggctaaattgacaaaaatccccttgaactctgcttgctggctgcagtctaaagttggactcaaaacaggaacaaaaatgaattgtgagactcatacctgcagcttcggagtggcttctgggaccctagtttactgagacttcaagaccaaagcagaaaaagcgagatgcctggcgtcacatcacgtcctcctcccacatatctgtgtggccgtgacaaatctcagcgagtcggctggcaggaccctatgctgccctcacctatgatgaagggcctcgcttcctccctgtgcatcactggccaccaaacagccggagggacagtttgatcggactgtaaataaaatgggtttcagggcataagatgtatgaccactagagagagaatctatgtctacgcagtcagctccttccgaaacggcagccccggcctggacggcctagcaccaaaccgaaataggtccactcatcctctcttcagcgttctcttctgagtgagccgagctgtccacatggctgttctacctgtgtccctggggcctcctgggcccgagccaccagccatctacagctacagagcctgtgaaggaggatccaaaggagctacttaggattagccaaaagacatctgatggccaggcagttccataaacatgcaaagccagcccctgaatcactagtcgccagccctccatggcacacaactgcttttcaagtgtatttggcctctgcactcgggactctctgttcttgggtggatgctgcgctggtccagtatggtacaagcctacatgatagagctggattgatttttctgccaagcctgtgtgggcattttataagctacgtgttctaatttttaccgatgttaattattttgacaaatatttcatatattttcattgaaatgcgcaaatccgcttgctcagttccctgagctaagggaataacacttgccttaaatttccccaacctcgtctctctccacatggtcctgctctcctctctgactgtaatgtgtttgtcttgtcacctgtaggtggcaaggactcagctgttgtctgttgaatccacacttcaaataagaaatcagtgaagcaaatctaatgttaaccctgagttaataaaagagttaacatcc

SEQ ID NO: 396 - protein, 932 aa, Mus musculus
PRAADVARGAGAAGRHGLPPLALRPWRWLLLLALPAACSALPPPRPVYTNHWAVQVLGGPGAADRVAAAHGYLNLGQIGNLDDYYHFYHSKTFKRSTLSSRGPHTFLRMDPQVKWLQQQEVKRRVKRQARSDSLYFNDPIWSNMWYMHCTDKNSRCRSEMNVQAAWKRGYTGKNVVVTILDDGIERNHPDLAPNYDSYASYDVNGNDYDPSPRYDASNENKHGTRCAGEVAASANNSYCIVGIAYNAKIGGIRMLDGDVTDVVEAKSLGIRPNYIDIYSASWGPDDDGKTVDGPGRLAKQAFEYGIKKGRQGLGSIFVWASGNGGREGDHCSCDGYTNSIYTISVSSTTENGHKPWYLEECASTLATTYSSGAFYERKIVTTDLRQRCTDGHTGTSVSAPMVAGIIALALEANNQLTWRDVQHLLVKTSRPAHLKASDWKVNGAGHKVSHLYGFGLVDAEALVLEARKWTAVPSQHVCVATADKRPRSIPIVQVLRTTALTNACADHSDQRVVYLEHVVVRISISHPRRGDLQIHLISPSGTKSQLLAKRLLDFSNEGFTNWEFMTVHCWGEKAEGEWTLEVQDIPSQVRNPEKQGKLKEWSLILYGTAEHPYRTFSSHQSRSRMLELSVPEQEPPKAAGQPPQAETPEDEEEYTGVCHPECGDKGCDGPNADQCLNCVHFSLGNSKTNRKCVSECPLGYFGDAAARRCRRCHKGCETCTGRSPAQCLSCRRGFYHHQETNTCVTLCPAGLYADESQRLCLRCHPSCQKCVDEPEKCTVCKEGFSLARGSCIPDCEPGTYFDSELVKCGECHHTCRTCVGPSREECIHCAKSFHFQDWKCVPACGEGFYPEEMPGLPHKVCRRCEENCLSCEGSSRNCSRCKAGFTQLGTSCITNHTCSNADETFCEMVKSNRLCERKLFIQFCCRTCLLAG

SEQ ID NO: 397 - DNA, 1514 bp, Mus musculus
gagcaactgaagaggcaggaggcagctgcgtgggctctcaactccccagggcaagagttgccaggcatggcgttgactgtggatgtggcaggaccagcaccttggggcttccgaattagcgggggcagagatttccacacacccatcattgtgaccaaggtcacagagcggggcaaggctgaagcagctgatctccggcctggcgacatcattgtggccatcaatggacagagtgcagagaacatgctacacgcggaggcccaaagcaagatccgacagagcgcctcacccctaagactgcagctggaccggtcccaaacagcctctcctgggcagaccaatggggagggctccttggaagtgctggcaaccagattccagggctccctgaggacacaccgtgacagccagtcttcccagaggtctgcctgcttcagcccagtctctctcagccccaggccttgcagccccttctccaccccaccccctaccagcccagttgccctttctaaagaggatatgattggctgtagtttccagagtctgacacactctccaggccttgctgctgctcaccacttgacctaccctggccaccccaccagccaacaggccggccacagcagcccaagcgactccgcagtgagggtgctgctccattccccaggacggccctccagccctaggttcagcagtttggatctggaggaagactcagaggtgttcaagatgctgcaggagaaccgccagggacgggccgccccaaggcagtccagctcttttcgactcttacaggaagccttggaggctgaggagagaggtggcacacctgcctttgtgcccagctcgctgagctcccaggcttccttgcccacctccagggccttggccactccacccaagctccacacctgtgagaaatgcagcgtcaacatctcgaaccaggcggtccgcatccaggaggggaggtaccgacaccctggctgctacacttgcgcagactgtgggctgaacctgaagatgcgcggccacttctgggtgggcaatgagttgtactgcgagaagcatgcccgccagcgctactctatgcctggaactctcaactctcgagcctgagcctcaaggtgctcggcctgtctgcactctcagactctgcagacatgattatactgagagcaagcagggaaggggtgatagcaggtgatagatgatcttacatgaactaaggttggggagtcccctttgtccttgctgggtgaggccaagggttgggactaatgtcaggttgctagtgctaaggacagttccactctctctggccttcctcctgcaggccaggttctgtattacggtctacagtggctgccatgtttgacacgaaagcgtatggggttgggcatggatagaagcatctagaagggaatggtgggcctgaggtaaatgatattcatggtgtgaagtttctaacatatgaactctatatacacgtggataaaattaagtagtgtattttc

SEQ ID NO: 398 - protein, 349 aa, Mus musculus
MALTVDVAGPAPWGFRISGGRDFHTPIIVTKVTERGKAEAADLRPGDIIVAINGQSAENMLHAEAQSKIRQSASPLRLQLDRSQTASPGQTNGEGSLEVLATRFQGSLRTHRDSQSSQRSACFSPVSLSPRPCSPFSTPPPTSPVALSKEDMIGCSFQSLTHSPGLAAAHHLTYPGHPTSQQAGHSSPSDSAVRVLLHSPGRPSSPRFSSLDLEEDSEVFKMLQENRQGRAAPRQSSSFRLLQEALEAEERGGTPAFVPSSLSSQASLPTSRALATPPKLHTCEKCSVNISNQAVRIQEGRYRHPGCYTCADCGLNLKMRGHFWVGNELYCEKHARQRYSMPGTLNSRA

SEQ ID NO: 399 - DNA, 5438 bp, Mus musculus
cagacagaccaaggagctctggaggtgtctggaggcccaccggagccccagacccaggaggcccaggaagctggaagtgaccctcagggcagcaagacctcaaaggaagagtgagattcctgcttacagctgtgcatcaccccgagtggggctcctgtcaggagaaaaggccatcactcaagaagcgggctcagcggcagctgctccatgaggagctgaaggtggtcctgcagcagaaggaggagaggacacgggagctcgagcccccaggtgactctctgcagagctatggaggccaggagccgcagcgatgagggagctgagacgggcggagttggtggagattatcgtggagaccgaggcacagaccggggtcagcggcttcaacgtagcaggcggcggcaaagaaggaatctttgtccgtgagctgcgagaggactcaccggcagctaagagcctcagcttgcaagaagggggaccagctgctgagtgcccgtgtgttctttgagaacttcaaatatgaggatgcacttcgcctgctgcaatgcgcagagccctacaaggtctccttctgcttgaagcgcactgtgcccaccggggatctggcactgaggcccgggacggtgtctggatacgagatgaagggcccacgggccaaagtggccaagctggtacgcgtgcttagcccggtcccggtccaggacagccccagtgaccgggtcgctgctgcgccgtaaaccctactccctttcactgtggcccactttggccctctgtctgtcactaacccgacactaattcgccctctgtcccttgttctctgctcctaaactccactcctgtcaaagggtgcacctattggcaggtggttctcacccatccccaccatgcaacccgggctcattaggggtcatggagtcctggaaggccagattctagcccaatggctgttgggttactgagtgacccaagtttcttttcctctctgggtcgcagtttccccaactctacaataaggatgttgggggaaattccagaatttttgggttcccattgccacatccctgtcccattgccacatcactgtgagattctgaatgactgtcattgccttcctgaagtgacaggcaggaaggtggatgtgttttgggatatactctaccccaaacttctcccagcctggtatactaggtgggttatttttctatctactcccagcctcccactgtcccacagcctcctgcctctctcctctctcctcagaacatccagagtctggcccctgtgaagaagaagaagatggtgactggggccctggggacccctgcagatttggcccctgttgacgtcgagttctcttttcccaagttctcccgactgcgtcggggtctcaaagccgaggctgtcaagggacctgtcccagctgccccagcccgtcgccgcctccagctgcctcggctgcgtgtccgagaagtagctgaagaggcccaggtagcccgaatggctgctgctgctcctcccccaaggaaggccaaggcagaagctgaggcagccacaggagctgggttcacagcccctcagttagagctagttgggcctcggctgcctagtgccgaggtgggtgtccctcaggtctcagttcccaaggggaccccatcaacagaggcagccagcggctttgcccttcacctgccaacccttgggctaggtgccccagctgcaccggctgtggagcccccagccacgggaatccaggttccacaagtggaactccccaccctgccctctctacccactcttcccacacttccatgcctggacacccaggaaggagctgcagtggtaaaagtccctaccctggatgtggcagctccgtctatgggggtggacctggctttgccgggtgcagaggtggaggcccagggagaggttcctgaagtggccctcaagatgccccggctcagtttcccccgttttgggattcgggggaaggaagccactgaagccaaagtagtcaagggcagccctgaggccaaagcaaagggtcccagacttcgaatgcccacctttgggctttctctcctggaaccccggccctctggccctgaagctgttgctgagagcaagctgaagctacccaccctcaagatgccctctttcggcattggtgtgactgggcctgaggtcaaggcacccaaggggcccgaagtaaagctccctaaggttcctgaggtcaaactcccgaaagtgcccgaggcagccattccagatgtgcaactccctgaggtacagctgcccaaaatgtcagacatgaaacttccaaagatccctgagatggttgtacccgacgttcgtcttccggaagtgcagctgcccaaagtccctgagatgaaagtcccagagatgaagctcccgaaggtgcccgagatggccgtgcccgatgtacaccttccagatgtacagctcccgaaagtcccagagatgaagctcccgaaggtgcccgagatggccgtgcccgatgtacaccttccagatgtacagctcccgaaagttccagagatgaagctaccagagatgaagctcccgaaggtgccggagatggccgtgccggatgtacgactcccggaagttcagctgcccaaagtgtctgaggtgaagctcccaaagatgcctgagatggccgtgcctgatgtccacctcccggagctacaacttcccaaaatgtccgaggtgaagctcccaaagatgcccgagatggccgtgcccgatgttcgcctcccggaagttcagctgcccaaagtgtcagagatgaaactccctaagatgccagagatgaccatgcccgacattcgcctcccagaagttcagttgcccaaagtgcctgacattaaacttcctgaaatgaagcttccagaaataaaactccccaaagtgcctgacatggcagtgcctgatgtcccccttccagagctgcagctgcccaaagtgtcggacattcggctgcctgaaatgcaagtgtcacaggtcccagaggtgcagcttcccaagatgccagagatgaagttgtccaaggttcctgaggtacagaggaaatctgcaggggcggagcaggcaaaagggactgaatttagtttcaagttgcccaagatgaccatgcccaagttggggaaagtgggcaagcctggggaggcaagtattgaggttccagacaaactcatgacacttccctgtctgcagccagaggtgggcactgaggcatcccatgttggtgtcccttccctctctctcccctctgtggagcttgacttgcctggggccctgggcctggagggacaagtccaagaagctgtcccaggcaaagtggagaagccagagggccccagggtagcagtgggtgttggagaggtgggctttcgtgtgccctctgtggagattgtcactcctcagctgcccacagttgaagttgagaaagagcagctagagatggtggagatgaaagtcaaaccctcttccaagttctctctgcccaaattcggactttcagggcccaaagctgtcaagggagaggtggaggggcctgggcgagccaccaagctgaaggtttccaagtttaccatctcacttcccaaagctcgagcagggactgaggccgaagcgaagggagctggggaagccgggttgctgccagcgctggatctgtccatcccacagctcagcctggatgcccagctgccctcaggcaaggtggaagtagctgatagcaagcctaaatcgtccagatttgctctgcccaagtttggggtgaaaggccgggactctgaggctgatgtactggtggcaggggaggctgagcttgagggaaagggttggggctgggatgggaaggtgaagatgcccaagctgaaaatgccatcttttgggttgtcccgaggaaaggaagcagaaactcaggatggacgtgtcagccccggggaaaagctggaggccatagctgggcagcttaagatccctgcggtggaattggtcacaccgggagctcaggagacagagaaggtcaccagtggagtgaagccgtcaggcctccaggtgtccaccactgggcaggtggttgcagagggccaggagagtgtgcagagggtgtccacactaggtatctctttgccccaggtggaattggccagctttggggaggcaggccctgagatcgtagccccttctgcagagggcacagcaggctctagggtccaggtgccacaggtgatgctggagctacctggaacccaggtggcagggggtgatctgttagtgggtgagggcatcttcaagatgcccacagtgacagtgccccagctagagctggatgtggggctgggccatgaagcccaggctggtgaagcagccaagagtgagggtgggataaagttgaagttgcccacactggggaccggaagcagaggagagggcgttgagccccagggccccgaggcccagcgcaccttccacctctcattgcccgatgtggaactcacgtcaccagtgagtagccacgctgagtaccaggtagttgagggtgatggggatggtgggcacaaactcaaggttcggctgcccctgtttggtctggcaaaggccaaggaagggatagaagttggagaaaaggctaagagtccaaagctcaggctaccccgagtgggcttcagccagagtgagtcggtctccggagaaggctctccaagtcctgaggaggaggaagaaggcagtggggaaggggcttccagtcgccggggtagggtaagggtccgcctgcctcgggtaggcttggcttccccttctaaagtctctaagggacaggagggtgatgcaacctccaagtccccagttggggagaagtcacccaaattccgttttcctagggtgtccttaagccccaaggcccggagtgggagtagggaccgggaagaaggtggattcagggtccgactgcccagtgtgggattttcagaaacagcagttccaggttccaccaggattgagggaacccaggctgctgccatctgaagccccaggacagctgtggattccccctcttgtctttccattccccagcctagccccccattttgtgtgtgacattactagcactaatcctcagagggcttgaaggtgggtaactgactcaggcaggagccagtggcctgtgccacctcattggccaaagtgcctgtatatcatgtcaaactatgggaataaaataattcaaaagttgtcatgtgtcttggttctcgtgggggacacaaggtctctttatgtttccttcatctggcttgtgcagtgttacctcagcttgaacttaaaatcttgcagccttgggggctggagaggtggcccagaggttaagagcactggctgctcatgcagaggtcctgagttcaattccc

SEQ ID NO: 400 - protein, 1288 aa, Mus musculus
VGYFSIYSQPPTVPQPPASLLSPQNIQSLAPVKKKKMVTGALGTPADLAPVDVEFSFPKFSRLRRGLKAEAVKGPVPAAPARRRLQLPRLRVREVAEEAQVARMAAAAPPPRKAKAEAEAATGAGFTAPQLELVGPRLPSAEVGVPQVSVPKGTPSTEAASGFALHLPTLGLGAPAAPAVEPPATGIQVPQVELPTLPSLPTLPTLPCLDTQEGAAVVKVPTLDVAAPSMGVDLALPGAEVEAQGEVPEVALKMPRLSFPRFGIRGKEATEAKVVKGSPEAKAKGPRLRMPTFGLSLLEPRPSGPEAVAESKLKLPTLKMPSFGIGVTGPEVKAPKGPEVKLPKVPEVKLPKVPEAAIPDVQLPEVQLPKMSDMKLPKIPEMVVPDVRLPEVQLPKVPEMKVPEMKLPKVPEMAVPDVHLPDVQLPKVPEMKLPKVPEMAVPDVHLPDVQLPKVPEMKLPEMKLPKVPEMAVPDVRLPEVQLPKVSEVKLPKMPEMAVPDVHLPELQLPKMSEVKLPKMPEMAVPDVRLPEVQLPKVSEMKLPKMPEMTMPDIRLPEVQLPKVPDIKLPEMKLPEIKLPKVPDMAVPDVPLPELQLPKVSDIRLPEMQVSQVPEVQLPKMPEMKLSKVPEVQRKSAGAEQAKGTEFSFKLPKMTMPKLGKVGKPGEASIEVPDKLMTLPCLQPEVGTEASHVGVPSLSLPSVELDLPGALGLEGQVQEAVPGKVEKPEGPRVAVGVGEVGFRVPSVEIVTPQLPTVEVEKEQLEMVEMKVKPSSKFSLPKFGLSGPKAVKGEVEGPGRATKLKVSKFTISLPKARAGTEAEAKGAGEAGLLPALDLSIPQLSLDAQLPSGKVEVADSKPKSSRFALPKFGVKGRDSEADVLVAGEAELEGKGWGWDGKVKMPKLKMPSFGLSRGKEAETQDGRVSPGEKLEAIAGQLKIPAVELVTPGAQETEKVTSGVKPSGLQVSTTGQVVAEGQESVQRVSTLGISLPQVELASFGEAGPEIVAPSAEGTAGSRVQVPQVMLELPGTQVAGGDLLVGEGIFKMPTVTVPQLELDVGLGHEAQAGEAAKSEGGIKLKLPTLGTGSRGEGVEPQGPEAQRTFHLSLPDVELTSPVSSHAEYQVVEGDGDGGHKLKVRLPLFGLAKAKEGIEVGEKAKSPKLRLPRVGFSQSESVSGEGSPSPEEEEEGSGEGASSRRGRVRVRLPRVGLASPSKVSKGQEGDATSKSPVGEKSPKFRFPRVSLSPKARSGSRDREEGGFRVRLPSVGFSETAVPGSTRIEGTQAAAI

SEQ ID NO: 401 - DNA, 4481 bp, Mus musculus
agagagcgagcgggaaaggagagctgtttaaccacaacgcgggtcctagagaaggaacgccatggcgagctctgggcgagttgccgtcttggagctccatggcgaccccttgctgcccctcgcaggagctgagacgggcggagttggtggagattatcgtggagaccgaggcacagaccggggtcagcggcttcaacgtagcaggcggcggcaaagaaggaatctttgtccgtgagctgcgagaggactcaccggcagctaagagcctcagcttgcaagaaggggaccagctgctgagtgcccgtgtgttctttgagaacttcaaatatgaggatgcacttcgcctgctgcaatgcgcagagccctacaaggtctccttctgcttgaagcgcactgtgcccaccggggatctggcactgaggcccgggacggtgtctggatacgagatgaagggcccacgggccaaagtggccaagctgaacatccagagtctggcccctgtgaagaagaagaagatggtgactggggccctggggacccctgcagatttggcccctgttgacgtcgagttctcttttcccaagttctcccgactgcgtcggggtctcaaagccgaggctgtcaagggacctgtcccagctgccccagcccgtcgccgcctccagctgcctcggctgcgtgtccgagaagtagctgaagaggcccaggtagcccgaatggctgctgctgctcctcccccaaggaaggccaaggcagaagctgaggcagccacaggagctgggttcacagcccctcagttagagctagttgggcctcggctgcctagtgccgaggtgggtgtccctcaggtctcagttcccaaggggaccccatcaacagaggcagccagcggctttgcccttcacctgccaacccttgggctaggtgccccagctgcaccggctgtggagcccccagccacgggaatccaggttccacaagtggaactccccaccctgccctctctacccactcttcccacacttccatgcctggacacccaggaaggagctgcagtggtaaaagtccctaccctggatgtggcagctccgtctatgggggtggacctggctttgccgggtgcagaggtggaggcccagggagaggttcctgaagtggccctcaagatgccccggctcagtttcccccgttttgggattcgggggaaggaagccactgaagccaaagtagtcaagggcagccctgaggccaaagcaaagggtcccagacttcgaatgcccacctttgggctttctctcctggaaccccggccctctggccctgaagctgttgctgagagcaagctgaagctacccaccctcaagatgccctctttcggcattggtgtgactgggcctgaggtcaaggcacccaaggggcccgaagtaaagctccctaaggttcctgaggtcaaactcccgaaagtgcccgaggcagccattccagatgtgcaactccctgaggtacagctgcccaaaatgtcagacatgaaacttccaaagatccctgagatggttgtacccgacgttcgtcttccggaagtgcagctgcccaaagtccctgagatgaaagtcccagagatgaagctcccgaaggtgcccgagatggccgtgcccgatgtacaccttccagatgtacagctcccgaaagtcccagagatgaagctcccgaaggtgcccgagatggccgtgcccgatgtacaccttccagatgtacagctcccgaaagttccagagatgaagctaccagagatgaagctcccgaaggtgccggagatggccgtgccggatgtacgactcccggaagttcagctgcccaaagtgtctgaggtgaagctcccaaagatgcctgagatggccgtgcctgatgtccacctcccggagctacaacttcccaaaatgtccgaggtgaagctcccaaagatgcccgagatggccgtgcccgatgttcgcctcccggaagttcagctgcccaaagtgtcagagatgaaactccctaagatgccagagatgaccatgcccgacattcgcctcccagaagttcagttgcccaaagtgcctgacattaaacttcctgaaatgaagcttccagaaataaaactccccaaagtgcctgacatggcagtgcctgatgtcccccttccagagctgcagctgcccaaagtgtcggacattcggctgcctgaaatgcaagtgtcacaggtcccagaggtgcagcttcccaagatgccagagatgaagttgtccaaggttcctgaggtacagaggaaatctgcaggggcggagcaggcaaaagggactgaatttagtttcaagttgcccaagatgaccatgcccaagttggggaaagtgggcaagcctggggaggcaagtattgaggttccagacaaactcatgacacttccctgtctgcagccagaggtgggcactgaggcatcccatgttggtgtcccttccctctctctcccctctgtggagcttgacttgcctggggccctgggcctggagggacaagtccaagaagctgtcccaggcaaagtggagaagccagagggccccagggtagcagtgggtgttggagaggtgggctttcgtgtgccctctgtggagattgtcactcctcagctgcccacagttgaagttgagaaagagcagctagagatggtggagatgaaagtcaaaccctcttccaagttctctctgcccaaattcggactttcagggcccaaagctgtcaagggagaggtggaggggcctgggcgagccaccaagctgaaggtttccaagtttaccatctcacttcccaaagctcgagcagggactgaggccgaagcgaagggagctggggaagccgggttgctgccagcgctggatctgtccatcccacagctcagcctggatgcccagctgccctcaggcaaggtggaagtagctgatagcaagcctaaatcgtccagatttgctctgcccaagtttggggtgaaaggccgggactctgaggctgatgtactggtggcaggggaggctgagcttgagggaaagggttggggctgggatgggaaggtgaagatgcccaagctgaaaatgccatcttttgggttgtcccgaggaaaggaagcagaaactcaggatggacgtgtcagccccggggaaaagctggaggccatagctgggcagcttaagatccctgcggtggaattggtcacaccgggagctcaggagacagagaaggtcaccagtggagtgaagccgtcaggcctccaggtgtccaccactgggcaggtggttgcagagggccaggagagtgtgcagagggtgtccacactaggtatctctttgccccaggtggaattggccagctttggggaggcaggccctgagatcgtagccccttctgcagagggcacagcaggctctagggtccaggtgccacaggtgatgctggagctacctggaacccaggtggcagggggtgatctgttagtgggtgagggcatcttcaagatgcccacagtgacagtgccccagctagagctggatgtggggctgggccatgaagcccaggctggtgaagcagccaagagtgagggtgggataaagttgaagttgcccacactggggaccggaagcagaggagagggcgttgagccccagggccccgaggcccagcgcaccttccacctctcattgcccgatgtggaactcacgtcaccagtgagtagccacgctgagtaccaggtagttgagggtgatggggatggtgggcacaaactcaaggttcggctgcccctgtttggtctggcaaaggccaaggaagggatagaagttggagaaaaggctaagagtccaaagctcaggctaccccgagtgggcttcagccagagtgagtcggtctccggagaaggctctccaagtcctgaggaggaggaagaaggcagtggggaaggggcttccagtcgccggggtagggtaagggtccgcctgcctcgggtaggcttggcttccccttctaaagtctctaagggacaggagggtgatgcaacctccaagtccccagttggggagaagtcacccaaattccgttttcctagggtgtccttaagccccaaggcccggagtgggagtagggaccgggaagaaggtggattcagggtccgactgcccagtgtgggattttcagaaacagcagttccaggttccaccaggattgagggaacccaggctgctgccatctgaagccccaggacagctgtggattccccctcttgtctttccattccccagcctagccccccattttgtgtgtgacattactagcactaatcctcagagggcttgaaggtgggtaactgactcaggcaggagccagtggcctgtgccacctcattggccaaagtgcctgtatatcatgtcaaactatgggaataaaataattcaaaagtt

SEQ ID NO: 402 - protein, 1384 aa, Mus musculus
SQELRRAELVEIIVETEAQTGVSGFNVAGGGKEGIFVRELREDSPAAKSLSLQEGDQLLSARVFFENFKYEDALRLLQCAEPYKVSFCLKRTVPTGDLALRPGTVSGYEMKGPRAKVAKLNIQSLAPVKKKKMVTGALGTPADLAPVDVEFSFPKFSRLRRGLKAEAVKGPVPAAPARRRLQLPRLRVREVAEEAQVARMAAAAPPPRKAKAEAEAATGAGFTAPQLELVGPRLPSAEVGVPQVSVPKGTPSTEAASGFALHLPTLGLGAPAAPAVEPPATGIQVPQVELPTLPSLPTLPTLPCLDTQEGAAVVKVPTLDVAAPSMGVDLALPGAEVEAQGEVPEVALKMPRLSFPRFGIRGKEATEAKVVKGSPEAKAKGPRLRMPTFGLSLLEPRPSGPEAVAESKLKLPTLKMPSFGIGVTGPEVKAPKGPEVKLPKVPEVKLPKVPEAAIPDVQLPEVQLPKMSDMKLPKIPEMVVPDVRLPEVQLPKVPEMKVPEMKLPKVPEMAVPDVHLPDVQLPKVPEMKLPKVPEMAVPDVHLPDVQLPKVPEMKLPEMKLPKVPEMAVPDVRLPEVQLPKVSEVKLPKMPEMAVPDVHLPELQLPKMSEVKLPKMPEMAVPDVRLPEVQLPKVSEMKLPKMPEMTMPDIRLPEVQLPKVPDIKLPEMKLPEIKLPKVPDMAVPDVPLPELQLPKVSDIRLPEMQVSQVPEVQLPKMPEMKLSKVPEVQRKSAGAEQAKGTEFSFKLPKMTMPKLGKVGKPGEASIEVPDKLMTLPCLQPEVGTEASHVGVPSLSLPSVELDLPGALGLEGQVQEAVPGKVEKPEGPRVAVGVGEVGFRVPSVEIVTPQLPTVEVEKEQLEMVEMKVKPSSKFSLPKFGLSGPKAVKGEVEGPGRATKLKVSKFTISLPKARAGTEAEAKGAGEAGLLPALDLSIPQLSLDAQLPSGKVEVADSKPKSSRFALPKFGVKGRDSEADVLVAGEAELEGKGWGWDGKVKMPKLKMPSFGLSRGKEAETQDGRVSPGEKLEAIAGQLKIPAVELVTPGAQETEKVTSGVKPSGLQVSTTGQVVAEGQESVQRVSTLGISLPQVELASFGEAGPEIVAPSAEGTAGSRVQVPQVMLELPGTQVAGGDLLVGEGIFKMPTVTVPQLELDVGLGHEAQAGEAAKSEGGIKLKLPTLGTGSRGEGVEPQGPEAQRTFHLSLPDVELTSPVSSHAEYQVVEGDGDGGHKLKVRLPLFGLAKAKEGIEVGEKAKSPKLRLPRVGFSQSESVSGEGSPSPEEEEEGSGEGASSRRGRVRVRLPRVGLASPSKVSKGQEGDATSKSPVGEKSPKFRFPRVSLSPKARSGSRDREEGGFRVRLPSVGFSETAVPGSTRIEGTQAAAI

SEQ ID NO: 403 - DNA, 1635 bp, Mus musculus
gggggattctgcggagcctgcgggacggcggcagcggcgcgagaggcggccgggacagtgctgtgcagcggtgtgggtatgcgcatgggactcactcagaggctcctgctcactgacagatgaagacaaacccacggtaaaggcagtccatctgcgctcagacccagatggtggcagagctatgaccaggcctgcaggcgccacgccaagtgggggtcagtcatggaacagccacaggaggagacccctgaggcccgggaagaggagaaagaggaagtggccatgggtgacggagccccggagctcaatgggggaccagaacacacgcttccttccagcagctgtgcagacctctcccagaattcctccccttcctccctgctggaccagctgcagatgggctgtgatggggcctcaggcggcagcctcaacatggaatgtcgggtgtgcggggacaaggcctcgggcttccactacggggtccacgcgtgcgaggggtgcaagggcttcttccgccggacaatccgcatgaagctcgagtatgagaagtgcgatcggatctgcaagatccagaagaagaaccgcaacaagtgtcagtactgccgcttccagaagtgcctggcactcggcatgtcgcacaacgctatccgctttggacggatgccggaggccgagaagaggaagctggtggcggggctgactgccagcgaggggtgccagcacaacccccagctggccgacctgaaggccttctctaagcacatctacaacgcctacctgaaaaacttcaacatgaccaaaaagaaggcccggagcatcctcaccggcaagtccagccacaacgcaccctttgtcatccacgacatcgagacactgtggcaggcagagaagggcctggtgtggaaacagctggtgaacgggctgccgccctacaacgagatcagtgtgcacgtgttctaccgctgccagtccaccacagtggagacagtccgagagctcaccgagttcgccaagaacatccccaacttcagcagcctcttcctcaatgaccaggtgaccctcctcaagtatggcgtgcacgaggccatctttgccatgctggcctccatcgtcaacaaagacgggctgctggtggccaacggcagtggcttcgtcacccacgagttcttgcgaagtctccgcaagcccttcagtgacatcattgagcccaagttcgagtttgctgtcaagttcaatgcgctggagctcgatgacagtgacctggcgctcttcatcgcggccatcattctgtgtggagaccggccaggcctcatgaatgtgccccaggtagaagccatccaggacaccattctgcgggctctagaattccatctgcaggtcaaccaccctgacagccagtacctcttccccaagctgctgcagaagatggcagacctgcggcagctggtcactgagcatgcccagatgatgcagtggctaaagaagacggagagtgagaccttgctgcaccccctgctccaggaaatctacaaggacatgtactaaggccgcagcccaggcctcccctcaggctctgctgggcccagccacggactgttcagaggaccagccacaggcactggcagtcaagcagct

SEQ ID NO: 404 - protein, 440 aa, Mus musculus
MEQPQEETPEAREEEKEEVAMGDGAPELNGGPEHTLPSSSCADLSQNSSPSSLLDQLQMGCDGASGGSLNMECRVCGDKASGFHYGVHACEGCKGFFRRTIRMKLEYEKCDRICKIQKKNRNKCQYCRFQKCLALGMSHNAIRFGRMPEAEKRKLVAGLTASEGCQHNPQLADLKAFSKHIYNAYLKNFNMTKKKARSILTGKSSHNAPFVIHDIETLWQAEKGLVWKQLVNGLPPYNEISVHVFYRCQSTTVETVRELTEFAKNIPNFSSLFLNDQVTLLKYGVHEAIFAMLASIVNKDGLLVANGSGFVTHEFLRSLRKPFSDIIEPKFEFAVKFNALELDDSDLALFIAAIILCGDRPGLMNVPQVEAIQDTILRALEFHLQVNHPDSQYLFPKLLQKMADLRQLVTEHAQMMQWLKKTESETLLHPLLQEIYKDMY

SEQ ID NO: 405 - DNA, 1532 bp, Mus musculus
agatggtggcagagctatgaccaggcctgcaggcgccacgccaagtgggggtcagtcatggaacagccacaggaggagacccctgaggcccgggaagaggagaaagaggaagtggccatgggtgacggagccccggagctcaatgggggaccagaacacacgcttccttccagcagctgtgcagacctctcccagaattcctccccttcctccctgctggaccagctgcagatgggctgtgatggggcctcaggcggcagcctcaacatggaatgtcgggtgtgcggggacaaggcctcgggcttccactacggggtccacgcgtgcgaggggtgcaagggcttcttccgccggacaatccgcatgaagctcgagtatgagaagtgcgatcggatctgcaagatccagaagaagaaccgcaacaagtgtcagtactgccgcttccagaagtgcctggcactcggcatgtcgcacaacgctatccgctttggacggatgccggaggccgagaagaggaagctggtggcggggctgactgccagcgaggggtgccagcacaacccccagctggccgacctgaaggccttctctaagcacatctacaacgcctacctgaaaaacttcaacatgaccaaaaagaaggcccggagcatcctcaccggcaagtccagccacaacgcaccctttgtcatccacgacatcgagacactgtggcaggcagagaagggcctggtgtggaaacagctggtgaacgggctgccgccctacaacgagatcagtgtgcacgtgttctaccgctgccagtccaccacagtggagacagtccgagagctcaccgagttcgccaagaacatccccaacttcagcagcctcttcctcaatgaccaggtgaccctcctcaagtatggcgtgcacgaggccatctttgccatgctggcctccatcgtcaacaaagacgggctgctggtggccaacggcagtggcttcgtcacccacgagttcttgcgaagtctccgcaagcccttcagtgacatcattgagcccaagttcgagtttgctgtcaagttcaatgcgctggagctcgatgacagtgacctggcgctcttcatcgcggccatcattctgtgtggagaccggccaggcctcatgaatgtgccccaggtagaagccatccaggacaccattctgcgggctctagaattccatctgcaggtcaaccaccctgacagccagtacctcttccccaagctgctgcagaagatggcagacctgcggcagctggtcactgagcatgcccagatgatgcagtggctaaagaagacggagagtgagaccttgctgcaccccctgctccaggaaatctacaaggacatgtactaaggccgcagcccaggcctcccctcaggctctgctgggcccagccacggactgttcagaggaccagccacaggcactggcagtcaagcagctagagcctactcacaacactccagacacgtggcccagactctctccccacacccccaccccca

SEQ ID NO: 406 - protein, 440 aa, Mus musculus; identical to SEQ ID NO: 404

SEQ ID NO: 407 - DNA, 2022 bp, Mus musculus
gactgtaaagaatacagatcaggtgtaaatgtgaatttctgtccattttttcgttggagggcggggtggggggaggggcagaaacgaagattagtggactaaaagctctactcctgcagggtcacctttgtccctcgattactcttggacattggtacaggtaacagccaatagaagactcctagtccttaaaaccacttgccataaccaatggctgtaattttaggaaaggagtggtcttaagatgtgagggcttaaaacaccctacggaatccataggatctgtaagttgagttgaagagatgtatctttggtgagaaattggagccagttttataatttgaccgtgtttgggcaaattggggttttactccatcttttctggtcagtttctatgtgtgactcaaaactgtcactttgctctccttggttaaaggagaggaaggtctcaggaagccaggaagcccactctaattcttacaaaccccagagcttgagccacactgattacccccctgtgttctttgccaagagcatgccacaaaatatgtgacccgaaggcatcgaagaagccaagaatggaaaaattccctaaaggaaagtgacatttaattgggaaatttcagagatctgtcactcctagtgacaacccagaaaaaactgctttgcagctttgtgactggaggtgagctgcaactgtcagctgaagttagcagggactccctgcagggaggcctttaggggcggagagcaagggacagctgcctttgcacatggctcccccaatctcgaatagaatatcgtgtgtgtgtgtgtgtgtgtgtgtgtgtgtgtgtgtgtgtgtgtgtgtgtgtgtgtgtttaaagctgtaccaaaactgtagtttaaaatgctgtcaattttccaattaagatatccagcttgataagccgagctatggacccatgggagggggagaaaaacatggttcttgggagtttgtacaaaaaatatggtgctgggtgggtgctaagaacaaacggtcttataacccatggtctttctacacagatccgtttggggaaagactgcccccagagtagcctgcttttcataagcttcccaatcagatttcgggggcaaagcactcccctcctccctcgcacagcctgcttcttctctctgccctctctcgtccctcccattctctatttccctccccggcagggtgtagttgagtgaaggcaggatcaggttccccgcctacccgtccaaatatcccgccaaggaagccccagagcacaagaaaacccaaagtggagagaggggaagaaagaaagcactgagtcatccatccagaaggggggagagcagagcgcagccgcccaggcaggagcatcagccagcgatacctggagtctgcagaaacctcgcccgcactttgcaacaaaggcagccagctagtcagcgaggacctctgcaagccaaagaaatgtcgtcccagcaatatcagcagcaacgtagaaaatttgcagctgccttcctggcattgattttcatcttggcagctgtggacactgctgaggccgggaagaaagagaaacctgaaaaaaaggtgaaaaagtctgactgtggagaatggcagtggagtgtgtgcgtgcctaccagcggggactgtggattgggcacccgggagggcactcgcactggcgccgagtgcaaacagaccatgaagactcagagatgtaagatcccttgcaactggaagaagcagtttggagctgagtgcaagtaccagttccaggcttggggagaatgtgacctcaataccgccttgaagaccagaactggcagcctgaagcgagctctgcacaatgctgactgtcagaaaactgtcaccatctccaagccctgtggcaagctcaccaagcccaagcctcaagcggagtcaaagaagaagaaaaaggaaggcaagaaacaggagaagatgctggattaaaagacgccaccgtctgtggaccaggaaaagggcatcagcaaaca

SEQ ID NO: 408 - protein, 168 aa, Mus musculus
MSSQQYQQQRRKFAAAFLALIFILAAVDTAEAGKKEKPEKKVKKSDCGEWQWSVCVPTSGDCGLGTREGTRTGAECKQTMKTQRCKIPCNWKKQFGAECKYQFQAWGECDLNTALKTRTGSLKRALHNADCQKTVTISKPCGKLTKPKPQAESKKKKKEGKKQEKMLD

SEQ ID NO: 409 - DNA, 974 bp, Mus musculus
cgatggcggcggcggcggcggcggcagcagcagcgggggctgcgggcggtcggggctccgggccggggcggcggcgccatcttgtgcccggggccggtggggaggccggggagggggacccggggggcgcaggggactacgggaacggcctggagtctgaggagctggagcctggggagctgctgccggagcccgagcccgaagaggagccgccccggccccgcgcccctccgggagctccgggtcctgggcccggctcgggagcccccggcagtcaggaggaggaggaagagccgggactggttgaggccgaccccggcgacggcgccattgaggacccggagctagaagcgatcaaagctcgagtcagggagatggaggaagaggctgagaagctaaaggagctacaaaacgaggtagagaagcagatgaatatgagtccacccccaggcaatgctggcccagtgatcatgtctcttgaggagaagatggaggctgatgcccgctctatctacgttggcaatgtggactatggtgcaacagcagaagagctggaagcccattttcatggctgtggttcagtcaaccgtgttactatactctgtgacaaatttagtggccatcccaaagggtttgcatatatagagttctcggacaaagagtcagtgaggacgtccctggccttagatgagtccctgttcagaggaagacaaatcaaggtgattcccaaacgaaccaacagaccaggcatcagcacaacagaccggggtttcccgcgctcccgataccgtgcccggactaccaactacaacagctcccgatctcgattctacagtggttttaacagcaggccccggggtcgaatctacaggggccgggctagagcgacatcatggtattccccttactaaaaaaagtgtgtattaggaggagagagaggaaaaaaagaggaaagaaggaaaaaaaaaagaatt

SEQ ID NO: 410 - protein, 302 aa, Mus musculus
MAAAAAAAAAAGAAGGRGSGPGRRRHLVPGAGGEAGEGDPGGAGDYGNGLESEELEPGELLPEPEPEEEPPRPRAPPGAPGPGPGSGAPGSQEEEEEPGLVEADPGDGAIEDPELEAIKARVREMEEEAEKLKELQNEVEKQMNMSPPPGNAGPVIMSLEEKMEADARSIYVGNVDYGATAEELEAHFHGCGSVNRVTILCDKFSGHPKGFAYIEFSDKESVRTSLALDESLFRGRQIKVIPKRTNRPGISTTDRGFPRSRYRARTTNYNSSRSRFYSGFNSRPRGRIYRGRARATSWYSPY

SEQ ID NO: 411 - DNA, 1582 bp, Mus musculus
tgagaaagtatgggtccgagatggagctgcatatttttatggccctatcttcattcatccagaagaaacagaacatgagcccacaaaaatgttctacaaaaaagaagtgtttctgagtaatctggaagagacctgccctatgagttgtattctggggaaatgtgcagtgctgtcattcaaggacttcctctcctgcaggccaactgaaataccagaaaatgacattctgctttgtgagagccgctataatgagagtgacaagcagatgaagaagttcaagggtttgaagaggttttcactctctgctaaagttgtagatgatgaaatctactacttcagaaaaccaatcattcctcagaaggaaccctcacctttgttagaaaagaagatacaattgctagaagctaaatttgcagagttagaaggaggagatgatgatattgaggagatgggagaagaggatagtgaagtcattgaagctccatctctacctcaactgcagacacccctggccaatgagttggacctcatgccctatacacccccacagtctaccccaaagtctgccaaaggcagtgcaaagaaggaaagttctaaacgaaaaatcaacatgagtggctacattttgttcagcagtgaaatgagagctgtgattaaagcccagcacccagactactcttttggggagctcagcagactggtggggacagaatggagaaaccttgaaacagccaagaaagcagaatatgaaggcatgatgggtggctatccgccaggccttccacctttgcagggcccagttgatggccttgttagcatgggcagcatgcagccacttcaccctggggggcctccacctcaccatcttccgccaggtgtgcctggcctcccaggcatcccaccaccgggtgtgatgaatcaaggagtagcccccatggtagggactccagcaccaggtggaagtccgtatggacaacaggtaggagttttgggacctccagggcagcaggcaccacctccatatcctggtcctcatccagctggcccccctgtcatacagcagccaacaacgcccatgtttgtggctcccccaccaaagacccaaaggcttctccactcagaggcctacctgaaatacattgaaggactcagtgctgaatccaacagcattagcaagtgggaccaaactttggcagctcgaagacgggatgtccatttgtccaaagaacaggagagccgcctaccttctcactggctcaaaagtaaaggggcacacaccaccatggcagatgccctctggcgcctacgggatttaatgcttcgagacactctcaacatccgacaggcatacaacctagaaaatgtttaatcacatcactgtttcttctgtggaagcaaagagttgtggagcggtagccattttagttactggggtgggagggaggaacaaaggatgataatttttattgcatttattgtacatcacacagccatttttatataaggacacttttaataagctatttcaaatttggttttgttacattaagttgactatcaaatacacaaaagattttttttg

SEQ ID NO: 412 - protein, 426 aa, Mus musculus
MFYKKEVFLSNLEETCPMSCILGKCAVLSFKDFLSCRPTEIPENDILLCESRYNESDKQMKKFKGLKRFSLSAKVVDDEIYYFRKPIIPQKEPSPLLEKKIQLLEAKFAELEGGDDDIEEMGEEDSEVIEAPSLPQLQTPLANELDLMPYTPPQSTPKSAKGSAKKESSKRKINMSGYILFSSEMRAVIKAQHPDYSFGELSRLVGTEWRNLETAKKAEYEGMMGGYPPGLPPLQGPVDGLVSMGSMQPLHPGGPPPHHLPPGVPGLPGIPPPGVMNQGVAPMVGTPAPGGSPYGQQVGVLGPPGQQAPPPYPGPHPAGPPVIQQPTTPMFVAPPPKTQRLLHSEAYLKYIEGLSAESNSISKWDQTLAARRRDVHLSKEQESRLPSHWLKSKGAHTTMADALWRLRDLMLRDTLNIRQAYNLENV

SEQ ID NO: 413 - DNA, 2249 bp, Mus musculus
acaaaaatgttctacaaaaaagaagtgtttctgagtaatctggaagagacctgccctatgagttgtattctggggaaatgtgcagtgctgtcattcaaggacttcctctcctgcaggccaactgaaataccagaaaatgacattctgctttgtgagagccgctataatgagagtgacaagcagatgaagaagttcaagggtttgaagaggttttcactctctgctaaagttgtagatgatgaaatctactacttcagaaaaccaatcattcctcagaaggaaccctcacctttgttagaaaagaagatacaattgctagaagctaaatttgcagagttagaaggaggagatgatgatattgaggagatgggagaagaggatagtgaagtcattgaagctccatctctacctcaactgcagacacccctggccaatgagttggacctcatgccctatacacccccacagtctaccccaaagtctgccaaaggcagtgcaaagaaggaaagttctaaacgaaaaatcaacatgagtggctacattttgttcagcagtgaaatgagagctgtgattaaagcccagcacccagactactcttttggggagctcagcagactggtggggacagaatggagaaaccttgaaacagccaagaaagcagaatatgaaggtgtgatgaatcaaggagtagcccccatggtagggactccagcaccaggtggaagtccgtatggacaacaggtaggagttttgggacctccagggcagcaggcaccacctccatatcctggtcctcatccagctggcccccctgtcatacagcagccaacaacgcccatgtttgtggctcccccaccaaagacccaaaggcttctccactcagaggcctacctgaaatacattgaaggactcagtgctgaatccaacagcattagcaagtgggaccaaactttggcagctcgaagacgggatgtccatttgtccaaagaacaggagagccgcctaccttctcactggctcaaaagtaaaggggcacacaccaccatggcagatgccctctggcgcctacgggatttaatgcttcgagacactctcaacatccgacaggcatacaacctagaaaatgtttaatcacatcactgtttcttctgtggaagcaaagagttgtggagcggtagccattttagttactggggtgggagggaggaacaaaggatgataatttttattgcatttattgtacatcacacagccatttttatataaggacacttttaataagctatttcaaatttggttttgttacattaagttgactatcaaatacacaaaagattttttttgcatatgtttcctttgtttaaaaccagtttcataattggttatatatagtaatagttttatctttacttgttaaaggacttaaatcatcaaaggttttggcttggcttagggttttcgttttcttttttataaatatatattatatatatatacacatataaaagaaaaaatgaaaaaaaagtttacaaatttaagttgacaatgaaatgtgaagttggtcctagtttacatcttagaggaatgtatatgtatgttttacatgcctaaatatctgcaggttttcttacaggtaaagcgaagtgctttgaaaagtttagattatacatgtgtgacagatgcggcatatttgctctattaacacagaggcttactatagaaatctaaagtcaatgctgtacatccatccagttagtgtaactgaagggaaatgtaactttgtgctgagttagacatctgtattgtcagtgattcttgtagaatatgtgctcagatctgagttatatttagttttggaaggtaagttgaagagtacttttgatcagtttatgattcagtttatgattttagtttttgccttcatgttatacatttatgatttgaaactgtacatctgttaccttgaaaaacattgaagaaagtactgaagtgtgcatggaggtggtttaagcataatacttaacccaagaaagagtgtaagtggacacaagctgtgcctgcacatagctgtgcagggtagactgcctacatacacatggccgggattctttatttccttgttatcaattatagtgctttgtttgtttcagggttggaattctcaaccagaaataatactttttaaaatattttaaaattcagcttgtgctttggattatagaaggaaattatactttaagaaaatgttc

SEQ ID NO: 414 - protein, 374 aa, Mus musculus
MFYKKEVFLSNLEETCPMSCILGKCAVLSFKDFLSCRPTEIPENDILLCESRYNESDKQMKKFKGLKRFSLSAKVVDDEIYYFRKPIIPQKEPSPLLEKKIQLLEAKFAELEGGDDDIEEMGEEDSEVIEAPSLPQLQTPLANELDLMPYTPPQSTPKSAKGSAKKESSKRKINMSGYILFSSEMRAVIKAQHPDYSFGELSRLVGTEWRNLETAKKAEYEGVMNQGVAPMVGTPAPGGSPYGQQVGVLGPPGQQAPPPYPGPHPAGPPVIQQPTTPMFVAPPPKTQRLLHSEAYLKYIEGLSAESNSISKWDQTLAARRRDVHLSKEQESRLPSHWLKSKGAHTTMADALWRLRDLMLRDTLNIRQAYNLENV

SEQ ID NO: 415 - DNA, 1784 bp, Mus musculus
ccaccaacaccaatggggatgctcaatcagcagttgacacctgttgcaggcatgatgggtggctatccgccaggccttccacctttgcagggcccagttgatggccttgttagcatgggcagcatgcagccacttcaccctggggggcctccacctcaccatcttccgccaggtgtgcctggcctcccaggcatcccaccaccgggtgtgatgaatcaaggagtagcccccatggtagggactccagcaccaggtggaagtccgtatggacaacaggtaggagttttgggacctccagggcagcaggcaccacctccatatcctggtcctcatccagctggcccccctgtcatacagcagccaacaacgcccatgtttgtggctcccccaccaaagacccaaaggcttctccactcagaggcctacctgaaatacattgaaggactcagtgctgaatccaacagcattagcaagtgggaccaaactttggcagctcgaagacgggatgtccatttgtccaaagaacaggagagccgcctaccttctcactggctcaaaagtaaaggggcacacaccaccatggcagatgccctctggcgcctacgggatttaatgcttcgagacactctcaacatccgacaggcatacaacctagaaaatgtttaatcacatcactgtttcttctgtggaagcaaagagttgtggagcggtagccattttagttactggggtgggagggaggaacaaaggatgataatttttattgcatttattgtacatcacacagccatttttatataaggacacttttaataagctatttcaaatttggttttgttacattaagttgactatcaaatacacaaaagattttttttgcatatgtttcctttgtttaaaaccagtttcataattggttatatatagtaatagttttatctttacttgttaaaggacttaaatcatcaaaggttttggcttggcttagggttttcgttttcttttttataaatatatattatatatatatacacatataaaagaaaaaatgaaaaaaaagtttacaaatttaagttgacaatgaaatgtgaagttggtcctagtttacatcttagaggaatgtatatgtatgttttacatgcctaaatatctgcaggttttcttacaggtaaagcgaagtgctttgaaaagtttagattatacatgtgtgacagatgcggcatatttgctctattaacacagaggcttactatagaaatctaaagtcaatgctgtacatccatccagttagtgtaactgaagggaaatgtaactttgtgctgagttagacatctgtattgtcagtgattcttgtagaatatgtgctcagatctgagttatatttagttttggaaggtaagttgaagagtacttttgatcagtttatgattcagtttatgattttagtttttgccttcatgttatacatttatgatttgaaactgtacatctgttaccttgaaaaacattgaagaaagtactgaagtgtgcatggaggtggtttaagcataatacttaacccaagaaagagtgtaagtggacacaagctgtgcctgcacatagctgtgcagggtagactgcctacatacacatggccgggattctttatttccttgttatcaattatagtgctttgtttgtttcagggttggaattctcaaccagaaataatactttttaaaatattttaaaattcagcttgtgctttggattatagaaggaaattatactttaagaaaatgttc

SEQ ID NO: 416 - protein, 221 aa, Mus musculus
PPTPMGMLNQQLTPVAGMMGGYPPGLPPLQGPVDGLVSMGSMQPLHPGGPPPHHLPPGVPGLPGIPPPGVMNQGVAPMVGTPAPGGSPYGQQVGVLGPPGQQAPPPYPGPHPAGPPVIQQPTTPMFVAPPPKTQRLLHSEAYLKYIEGLSAESNSISKWDQTLAARRRDVHLSKEQESRLPSHWLKSKGAHTTMADALWRLRDLMLRDTLNIRQAYNLENV

SEQ ID NO: 417 - DNA, 381 bp, Mus musculus
atggaggatgtcacgctccatatcgttgagcggccgtattccggatttcccgatgcttcctcagagggcccggagcccacccaaggggaggcgcgggccacggaggagccgtcggggaccggctccgacgagctgatcaagtcggaccaggtgaacggtgtgctggtgctgagccttctggataaaatcatcggcgccgttgaccagatccagctgacccaagcccagctggaggagcgacaggcggagatggagggcgctgtgcagagcatccagggagagctgagctccctagctggaagctggagcagcagggccagctggcttgcccaccctaactccctctcagctgcttctaccatggatctttctctaatgtga

SEQ ID NO: 418 - protein, 126 aa, Mus musculus
MEDVTLHIVERPYSGFPDASSEGPEPTQGEARATEEPSGTGSDELIKSDQVNGVLVLSLLDKIIGAVDQIQLTQAQLEERQAEMEGAVQSIQGELSSLAGSWSSRASWLAHPNSLSAASTMDLSLM

SEQ ID NO: 419 - DNA, 1397 bp, Mus musculus
tcctccgctctgggctcctgctcgctgtccagtctctcgctcctccttctctcccggtctcccgctccagttccacccggtcggccccgcacggctccgggaagccatggaggatgtcacgctccatatcgttgagcggccgtattccggatttcccgatgcttcctcagagggcccggagcccacccaaggggaggcgcgggccacggaggagccgtcggggaccggctccgacgagctgatcaagtcggaccaggtgaacggtgtgctggtgctgagccttctggataaaatcatcggcgccgttgaccagatccagctgacccaagcccagctggaggagcgacaggcggagatggagggcgctgtgcagagcatccagggagagctgagcaagctgggcaaggcgcacgccaccacgagcaacaccgtgagcaagttgctggagaaggtgcgcaaggtcagcgtcaacgtgaagaccgtgcgcggcagcctggagcgccaggccggccagataaagaaactggaggtcaacgaggcggagctgctgaggcgccgcaacttcaaagtcatgatctaccaggatgaagtcaagctgccggccaaactgagcgtcagcaagtcgctgaaagagtcggaggcactgcctgagaaggagggtgacgagctgggcgagggcgagcggcccgaggatgacaccgcggcgatcgagctgtcgtccgacgaggcggtggaggtggaggaggtgatcgaggagtcccgcgccgagcgcatcaagcgcagcggcctgcggcgcgtggacgacttcaagaaggccttctccaaggagaagatggagaagaccaaggtgcgcacgcgtgagaacctggagaagacgcgcctgaagaccaaggagaacctggagaagacacggcacacgctggagaagcgcatgaacaagctgggcacgcgcctggtgcccgtggagcgacgagagaagctgaagacatcccgggacaagctgcgcaagtccttcacgcccgaccatgtggtgtatgcgcgctccaagaccgctgtctacaaggtgccgcctttcaccttccacgtcaagaagatccgcgagggcgaggtggaggtgctgaaggccaccgagatggtggaggtgggtcccgaggacgacgaggttggcgcggagcgcggcgaggccactgacctgctgcgcgggagcagccccgacgtgcacacgctgctggagatcaccgaggagtcggacgccgtcctggtggacaagagcgacagcgactgagcaggactcgcagggctctgccctggaggccggcgcctgaccctgccgccccctgatcccccacccctgcccacaccgcctttcccttttcaaactttctcttttgcattct

SEQ ID NO: 420 - protein, 392 aa, Mus musculus
MEDVTLHIVERPYSGFPDASSEGPEPTQGEARATEEPSGTGSDELIKSDQVNGVLVLSLLDKIIGAVDQIQLTQAQLEERQAEMEGAVQSIQGELSKLGKAHATTSNTVSKLLEKVRKVSVNVKTVRGSLERQAGQIKKLEVNEAELLRRRNFKVMIYQDEVKLPAKLSVSKSLKESEALPEKEGDELGEGERPEDDTAAIELSSDEAVEVEEVIEESRAERIKRSGLRRVDDFKKAFSKEKMEKTKVRTRENLEKTRLKTKENLEKTRHTLEKRMNKLGTRLVPVERREKLKTSRDKLRKSFTPDHVVYARSKTAVYKVPPFTFHVKKIREGEVEVLKATEMVEVGPEDDEVGAERGEATDLLRGSSPDVHTLLEITEESDAVLVDKSDSD

SEQ ID NO: 421 - DNA, 4794 bp, Mus musculus
gtcaagtatgtcatagcagaggaggagggtctacaagactgctagttttaaagaggaaaactcaaatcaagcaccaaaacacacagcaagggagaggaagaacagaaaggcattcctctgtggaggtgagccctcacagcactgaggcagacaggcactgaagctcgatttggcagtacctggctcgagactcaagtttagctgttaactactttgatttcttggatctccggcttggagcagcatacaaggtcaacatggccatgccagaaaagtcaagtgatgtcaaaccgaccgaggagtgcggcagttttcctgagattattgaactcaatgtaggtggccaggtgtacataactcgctatcctactttgatcagcattcctggttcccggctctgggaaatgttcagtgtaaagaatccttgctcactgatccaggacaacaaagggagattcttcatagatcgagatggttttctctttcgctatgtcctagactatatgagagacatgcaagtagtgcttccggatcattttccagagtgtggccggctccatagagaagcagaatactttaagctgccagaactagccaaaatgttggctcctaaaatgaacaagctcaactcaattggaaatgactcatgtccgattgatctagaagagctctcacccagcattgacactacgttcaatttctcttcaaccaatagcattcatattagtggccctgataatcccatggttctgagagctgcccctggttctgagctcaagaaggctggtttcatcactattggctatcgaggctcctatactctgggcagggacagccaagcagatgccaaattccgccgtgtggctagaatcatggtatgtggtaagatctcattagccaaagaagtgttcggagacactctgaatgagagcagagacccagatcgccctccagagcgatatacttctcgatactacctcaaattcactttcttggaacaagcttttgacaaactagctgatgctggcttccacatggtagcatgcaactccactggcacctgcactgtcacacatgaccaaacagatgacaggatctggacctcgtatactgaatatgttttctatcgtgagtgacagttaaaatcactcagaaaatacaaaccctcaaacagtctctctcctctgtttccatgccaactgtctcctttagaaatagacacattaatcactctaggttcgtgagtgttctgtataatattgagaaatgccacttctctcatcataactacttgaacctttgttggttttgttcttatacatcattgcagtccatctgtctatcttttttggactgtggagtgaaagctgtgcatcagtatagatagtagaggtaaatttctggagtgaatgctattaaatataaccactaaattacatgttttgagaactattaagctatgacttccaagttgtttctcagtaataacccacactgaacttgattatgtaccttgctatctgtatttgtctacataaaatcctgtatagctgggctgagattataataggtagtgtgaatgtgctttgcagatgttttaccatgcttagtggaaaaacttgacagcactcctctaggaggttcatagaaaggtggaccaattcaagaattattaaggacttttgatagatgctagacaaacaattgtatgactattattctcagtaataaaaggcttagcactcaatttgcttttgcatgaaaaagatagtaaggaagtatttcatagctattacctcagtcataagtagctgtgccattaaaaaaaaaaactgtcctaaaatacctttcactagaattaaatgcaaataatgtagggaagaaaacaatggataaccttgctttgtgtaagtatatacatgtattatagtgtagtttcactagtcaaataattagctgtatttatccattgttaacttgtttgtgttggttgatgctgtgagtgtgtgttttgcttttctagaggtggggatgggagaagaggagaagaaagaagaaaataactataacaaaacaaaacacctgagatttatcatctgactccctgccaatgtctttgtaatcaatcaggttggaagcaagaatttattcttagatgagaacattggggacctaagtgaaggaattataaaagaccacgaactagtcaagaaaaagggttttagggctcattttagaggatcgtcctcacctctgtaaaagcttttagcaatcaggtggtcaggcagccttgtcttttctttcttctgtccttaacatgcgccatgcgcctttattgcttgcattgtcttttaacgccttttctaatcaggtctttttaagtttcaaagaactaaaactcacgtaaaatggcttgagaaagaaaaaactgttcatatgtcagtgatgtgactgtgtgagcattttaagctcaccttttatttaatctttttttctgttgagtttaaaggaaatataaacaaattaagtctcagaggatctggggagctgtcaataattgatattctatcttctctttcaacggctgtatgattttcttgtggtcatcttcaaacctcattgattccatatttctccatgccattcacattctttctcacaatttataggagacctaaacagtatgctagcctttcagtgaacgtcaactcccaggcatattctccatatttaacttcttttgttgttaatcccattttctaaatccaaattatctctggtctaagacagaaaggctgagtggttggtagctctgtggcttggacagacagttattcacattactacatggattatcacatagtaggcatacaatcagtacagcacttcagataccctctggtcactaagtcctttagagatcagttgaatacagaaattaagatgcagcacattttagatgctcttaaagagatgttccacattttatttttgtactattctcatggttgttgtcatttccatgctctccctatgaagtgaaatctttatattagcttacctttctgtaggtacatttactagccttagctcctctggcatgtttcaagtattaccaaagtctcaattgccccatctgcccagtagataagtggtcaccatttatttaaagtggtgagttaatatattccataataccgaaagtgaagtagctgtgccctggtgacttactatgtgatgtagttgtctacagtttgatctttcagaaatatggctaactttttaaaatagaggacttataataccatttttattttttactctgtcatcaatttccattattcttggttcaagattatttctgaaacactagtcatttgctattcaaatgactttcttttccactcacaaataatttaatggaggaaataatgaaaagaaatataaattctctggggtttgctgtgttaagtgctaagaaggcataaaacagaaaaattcatagactaaacaggaggcagctaagaatgtgactgaatatttgagctcagctgccttaggtttttagtgagagaggtgctcatcaataatcacacttagagttgctaagtttcttgttggcaaaagaagaaactgacttttttaagaaaaaaaaaagccgtaattggttcaaaaagttctgaaagtatagagaaccatatctgatgttacacagccatgagcaatatccagaattattgcttgttagtggtaatctgctatgattcttgggtatttgcttgctgcagcttgtactatctacattaatggaattgtacacaaatgctgaaacctctaaaacctctctctctctctctctctctctctctctctctctctctctctctctctctctctctcctctctctgccctagagatgttgtactcagaagcaaattgctgtaggttcagaataccaatactctttagctagacttgtggctcccaaactttagtttagctccttaaccgtaggtgactctgtcaaccttttgttaccatgcttttcagcccctagagtctcaactcctatcttcaacttatcagagtctcttgctgcctcaatacatctgccttccttcatagtgatacactatcacactgtctaccttcactttctctatggaactcttagttgcctcttgatattacaattccaatctttgggaaccagggttcttagttaagggtgactctctagaatgttgctatcacctcttacttgtcattgccactgccaaggctaaaaagcaaaatataaatacaacctgttcagccttctctatgagtacaaaataccacaagctggtatatagactaatcactgtatggctacactcatgaaatttcaacaacgtgaacagctgaacaagctcaacacaatgacaataccagttgccatgcctgactggattggggaaatcttacaaggctcatcaccagatgaagaactacaggcaattaatggctgctaagagaggcagaactagtcttcttcagggacagagccctgatgggttattcaatcccaaatactaaacacaaatacatacgaccaatactaaatggacagcagagtgtatttctttaaacacatgtgtatgtaaataaatatatatgtaacaatcataattaaaaaagacattgtgaatttgagagggagttgggaggaattggaggaagaggggtggaaatgatgtaaatacagtactcatgtatgaaaaaaatcagaataataaaaagtatataaaccc

SEQ ID NO: 422 - protein, 292 aa, Mus musculus
MAMPEKSSDVKPTEECGSFPEIIELNVGGQVYITRYPTLISIPGSRLWEMFSVKNPCSLIQDNKGRFFIDRDGFLFRYVLDYMRDMQVVLPDHFPECGRLHREAEYFKLPELAKMLAPKMNKLNSIGNDSCPIDLEELSPSIDTTFNFSSTNSIHISGPDNPMVLRAAPGSELKKAGFITIGYRGSYTLGRDSQADAKFRRVARIMVCGKISLAKEVFGDTLNESRDPDRPPERYTSRYYLKFTFLEQAFDKLADAGFHMVACNSTGTCTVTHDQTDDRIWTSYTEYVFYRE

SEQ ID NO: 423 - DNA, 1731 bp, Mus musculus
gcggcggaggctgaggaacggggtcggggcccggcggaccggagacccgggcgagcggcggcggcccgaggggatcctcaaggaagacttgcatttagtaagttgtgtataatcagtgcaagcgaaattaaggaaaaatggatatagaaaatgagcagacactgaatgtgaaccccactgaccctgacaatttaagcgactctctcttttctggagatgaagaaaatgctggcactgaagaaataaagaatgaaataaatggaaattggatttccgcatctactattaatgaagctagaatcaatgcaaaagccaaaagacgactgcggaaaaattcatcccgggactctggccgaggagactcagtcagtgacaatggaagtgaagcggttagaagtggagttgctgtgcccaccagtccaaaaggaaggttgctagataggcggtccagatctgggaaaggaagggggctgccaaagaaaggtggtgcaggcggcaagggtgtctggggcacacctggacaggtgtatgatgtggaagaggtggatgtgaaagatccaaactatgatgacgaccaggagaactgtgtttatgaaactgtagttttgcccctggatgagaccgcatttgagaagactctaacaccaattatacaggaatactttgagcatggagatacaaatgaagttgcggagatgttaagagacttaaaccttggggagatgaagagtggcgtgccggtgttggcagtgtccttagccttggaggggaaggccagccaccgggagatgacatccaagctgctttctgacctttgcgggacggtgatgagcacaaatgacgtggaaaagtcatttgacaagttgctgaaggatctccctgagctagccttggacactcctagggcaccgcagttggtgggccagtttattgctagagctgttggagatggaatcttatgtaatacctatatcgatagttacaaaggaactgtagattgtgtacaggctcgagctgctctggataaggctactgtgctcctgagtatgtccaaaggcgggaagcggaaagacagtgtgtggggatctggaggcgggcaacagcctgtcaatcaccttgttaaagagattgatatgctgcttaaagagtatttactctctggagatatatctgaagctgaacactgccttaaggaactggaagtacctcattttcaccacgagcttgtatatgaagccattgtaatggttttagagtcaactggagaaagtgcattcaagatgatcttagatttattaaaatccttgtggaagtcttctactattaccatagaccaaatgaaaagaggctatgagagaatttacaatgaaatcccagacattaatctggatgtcccacactcatactctgttcttgagagatttgtggaggaatgttttcaggctggaataatttccaaacaactccgtgatctttgtccatcaaggggaagaaagcgttttgtaagtgaaggagatggaggccgtcttaaacctgagagctactgagcacagcaactcttacagtcttaggtgttaccaagaacagatctcaactggaacatattgattggtcttaaatattagacagttaagtaaatggtggctggaacatctatttttctacaaaactggaaaaacgaacccggttctacaagaatgtacagcaaaataaaacatgtgaaacactgtt

SEQ ID NO: 424 - protein, 469 aa, Mus musculus
MDIENEQTLNVNPTDPDNLSDSLFSGDEENAGTEEIKNEINGNWISASTINEARINAKAKRRLRKNSSRDSGRGDSVSDNGSEAVRSGVAVPTSPKGRLLDRRSRSGKGRGLPKKGGAGGKGVWGTPGQVYDVEEVDVKDPNYDDDQENCVYETVVLPLDETAFEKTLTPIIQEYFEHGDTNEVAEMLRDLNLGEMKSGVPVLAVSLALEGKASHREMTSKLLSDLCGTVMSTNDVEKSFDKLLKDLPELALDTPRAPQLVGQFIARAVGDGILCNTYIDSYKGTVDCVQARAALDKATVLLSMSKGGKRKDSVWGSGGGQQPVNHLVKEIDMLLKEYLLSGDISEAEHCLKELEVPHFHHELVYEAIVMVLESTGESAFKMILDLLKSLWKSSTITIDQMKRGYERIYNEIPDINLDVPHSYSVLERFVEECFQAGIISKQLRDLCPSRGRKRFVSEGDGGRLKPESY

SEQ ID NO: 425 - DNA, 2203 bp, Mus musculus
cgagcggcggcggcccgaggggatcctcaaggaagacttgcatttagtaagttgtgtataatcagtgcaagcgaaattaaggaaaaatggatatagaaaatgagcagacactgaatgtgaaccccactgaccctgacaatttaagcgactctctcttttctggagatgaagaaaatgctggcactgaagaaataaagaatgaaataaatggaaattggatttccgcatctactattaatgaagctagaatcaatgcaaaagccaaaagacgactgcggaaaaattcatcccgggactctggccgaggagactcagtcagtgacaatggaagtgaagcggttagaagtggagttgctgtgcccaccagtccaaaaggaaggttgctagataggcggtccagatctgggaaaggaagggggctgccaaagaaaggtggtgcaggcggcaagggtgtctggggcacacctggacaggtgtatgatgtggaagaggtggatgtgaaagatccaaactatgatgacgaccaggagaactgtgtttatgaaactgtagttttgcccctggatgagaccgcatttgagaagactctaacaccaattatacaggaatactttgagcatggagatacaaatgaagttgcggagatgttaagagacttaaaccttggggagatgaagagtggcgtgccggtgttggcagtgtccttagccttggaggggaaggccagccaccgggagatgacatccaagctgctttctgacctttgcgggacggtgatgagcacaaatgacgtggaaaagtcatttgacaagttgctgaaggatctccctgagctagccttggacactcctagggcaccgcagttggtgggccagtttattgctagagctgttggagatggaatcttatgtaatacctatatcgatagttacaaaggaactgtagattgtgtacaggctcgagctgctctggataaggctactgtgctcctgagtatgtccaaaggcgggaagcggaaagacagtgtgtggggatctggaggcgggcaacagcctgtcaatcaccttgttaaagagattgatatgctgcttaaagagtatttactctctggagatatatctgaagctgaacactgccttaaggaactggaagtacctcattttcaccacgagcttgtatatgaagccattgtaatggttttagagtcaactggagaaagtgcattcaagatgatcttagatttattaaaatccttgtggaagtcttctactattaccatagaccaaatgaaaagaggctatgagagaatttacaatgaaatcccagacattaatctggatgtcccacactcatactctgttcttgagagatttgtggaggaatgttttcaggctggaataatttccaaacaactccgtgatctttgtccatcaaggggaagaaagcgttttgtaagtgaaggagatggaggccgtcttaaacctgagagctactgagcacagcaactcttacagtcttaggtgttaccaagaacagatctcaactgtaagagttgtcagtacaggttttcttttccttttgtttttgttattgttttttttttttttttttttttttttaaagaatttgttttgggtacaaggcatttctaaaattttataaacttaagtttaatgggattttttgaaggattttctttctttttctttttctttcttttttttttttttgaggggaaattaatggagggacagaagaggaaccaccgaagtgtgggtgttctgataagctactttctaagtgccatgtttaggacctgatcattccaagtttcacgttcatgtatgactgccgctcctttctttcaaggacagtgttttttgtagtaaaatcactggtttattcaaagctttagttaggggtgagtgaagctactaaaccccatgttggctgctgctgtggaaatgctgtgctttgagagtaaacacacacacacacacacacacactttttgttttaaagaatttttaaaaaaacgagttagtcatgagactttttcatctttccagggaacatattgattggtcttaaatattagacagttaagtaaatggtggctggaacatctatttttctacaaaactggaaaaacgaacccggttctacaagaatgtacagcaaaataaaacatgtgaaacactgt

SEQ ID NO: 426 - protein, 469 aa, Mus musculus; identical to SEQ ID NO: 424

SEQ ID NO: 427 - DNA, 1920 bp, Mus musculus
agccttccttaggagcaggcgacagaggcctgggatgggaatcttggcggctgtcgaggaggcccagggtgggctgaagcccttaccatggagtccatgtttgaagatgacatcagcatcctgacccaagaggccttggggcccagtgaggtgtggctggatggtcctggagacccgtccctgggaggggacatgtgttctgcctcccactttgccctcatcacagcctacggagacatcaaggaaaggctaggaggcctggagagggagaatgccaccctccgccgtcgcctcaaagtctatgagatcaagtatccgctgatcactgattttggagaggagcatggcttccctctgtatgaactcaaggatggctccctgctggaggtggagaaggtcagtctgcagcaacgactcaaccaattccaacacgagttgcagaagagtaaggagcaggaggagcagctcggggagatgatccaggcttacgagaaactgtgcgtggagaaaagcgacttggagacagagctgggggagatgcgggccctggtagagactcatctacggcagatctgtggtctggagaaacagctgcagcaacagcagggcctccgggacgcagctttctccagcctgagccccccagctgtccccgcctcagcctgtcctgacttggacctgcactatctggctctgagagggggacctgccttgggtcatggttggcctggccctacgagtgtaagtgtgagcgagctggagaggaggcgcctggaagaggccctggaggctgcgcagggggaggctcggggggctcagctccgggaggagcaactccaggcggaatgcgagagacttcagggagagctgaagcaactgcaggagacccgggcccaggatctggcctccaaccagtcggaatgtgacatggcttgggtcaagagagttggggatgatcaggtgaacttggcgctggcctacacagaactgacagaggagctgggtcggcttcgggagctgagttccctgcaggggaggatcttgaggactttgctgcaggaacaggcccgcaacgcaggccaaaggcactcaccgctgtcgcaacgtcactccccggcccctgcgtgcccctcaccctccccgcctgcccgaccgccgccctgtgccccgtgccagtcccccgctgcacagcgccgttcgcccgtgcccccgtgcccttcgccccagcagcgccgctcgcccgcctcgccgtcctgcccgtccccagtcccacagcgccgctcgcccgtgccgccgtcgtgccagtcgcccagtcctcagcgccgctcgcctgtgccacccagctgcccggccccgcagccccggccgccgccaccaccgggggagaggacgctggccgagcgtgtctacgccaagccgcccagccaccacgccaaggccggcttccagggccgccgcagctactcggagctggcggagggggcggcctacgctggtgcctcccccgcctggctacaggccgaggctgccacacttcccaagccccgcgcctatggcggcgagctctacggcaggccgctcagcccgcgccgagcctttgagggcatccgcctgcgctttgagaagcagccatctgaagaagaggagtgggctatgccggccagcccgcccagtcccgaagcgggcaccatccgctgcgcttcattctgtgcgggcttccccatcccagagtcgcctgcggccaccgcctatgcccacgctgagcacgcacagtcctggccatccatcaacctactgatggagacggtgggctctgatatccgcagctgccccctctgccagctgggtttccctgttgggtacccagatgatgctctcatcaaacacatagactcccaccttgagaacagcaagatctag

SEQ ID NO: 428 - protein, 610 aa, Mus musculus
MESMFEDDISILTQEALGPSEVWLDGPGDPSLGGDMCSASHFALITAYGDIKERLGGLERENATLRRRLKVYEIKYPLITDFGEEHGFPLYELKDGSLLEVEKVSLQQRLNQFQHELQKSKEQEEQLGEMIQAYEKLCVEKSDLETELGEMRALVETHLRQICGLEKQLQQQQGLRDAAFSSLSPPAVPASACPDLDLHYLALRGGPALGHGWPGPTSVSVSELERRRLEEALEAAQGEARGAQLREEQLQAECERLQGELKQLQETRAQDLASNQSECDMAWVKRVGDDQVNLALAYTELTEELGRLRELSSLQGRILRTLLQEQARNAGQRHSPLSQRHSPAPACPSPSPPARPPPCAPCQSPAAQRRSPVPPCPSPQQRRSPASPSCPSPVPQRRSPVPPSCQSPSPQRRSPVPPSCPAPQPRPPPPPGERTLAERVYAKPPSHHAKAGFQGRRSYSELAEGAAYAGASPAWLQAEAATLPKPRAYGGELYGRPLSPRRAFEGIRLRFEKQPSEEEEWAMPASPPSPEAGTIRCASFCAGFPIPESPAATAYAHAEHAQSWPSINLLMETVGSDIRSCPLCQLGFPVGYPDDALIKHIDSHLENSKI

SEQ ID NO: 429 - DNA, 756 bp, Mus musculus
atgcctcttctgtccagcatcgtgggcctcacaggccttctcctttggatgggtcacacagtgggggccttacggatgcccaacaccacactggtccagggccgacccaagaacacagctgtgtggcccctgtctggcctgggggtgccccggcaccgccggaagcgccacatctctgctcgggacatgagcgctttactggattatcacaaccacatccgggccagcgtacacccacctgctgccaacatggagtatatggtttgggatgagcagctggccaggtctgctgaagcctgggccacccagtgcatctggacccatggaccctcacagctgatgaagtacgtgggccagaacctctctatccattccggccggttccgttctgtggtagaccttgtgaggtcttggtctgaggagaagcgccattactcattcccggctccaaaggattgcaccccacactgcccttggctctgcagtggtcctgtctgctcccactatacccagatggtgtgggcatcctccagtcggctgggctgtgccattaacacctgtagcagcatcaatgtgtggggcaacacctggcagcaggctgtctacctggtctgcaactacgccattaagggcaactggatcggagaggcaccctacaaggccgggaagccatgttctgcctgtcctcccagttaccaaggcaactgcaacagcaacatgtgcttctctgggctcaaatccaacaggctcccatgg

SEQ ID NO: 430 - protein, 252 aa, Mus musculus
MPLLSSIVGLTGLLLWMGHTVGALRMPNTTLVQGRPKNTAVWPLSGLGVPRHRRKRHISARDMSALLDYHNHIRASVHPPAANMEYMVWDEQLARSAEAWATQCIWTHGPSQLMKYVGQNLSIHSGRFRSVVDLVRSWSEEKRHYSFPAPKDCTPHCPWLCSGPVCSHYTQMVWASSSRLGCAINTCSSINVWGNTWQQAVYLVCNYAIKGNWIGEAPYKAGKPCSACPPSYQGNCNSNMCFSGLKSNRLPW

SEQ ID NO: 431 - DNA, 1035 bp, Mus musculus
atcggtctcagggagagcaggcccggtggtcagagatcatgggggagagcgcactggagcccggacctgtgcctgagacgcccgcagggggtccggtgcacgcagtcaccgtggtgaccttgctggagaaattggccaccatgctggaggctctgcgggagcggcaaggcggcctggctgagaggcagggcggcctggcgggctccgtgcgtcgcatacagagtggcctgggtgcgctgagtcgcagccacgacaccaccagcaacacactgacgcagctgctggccaaggcggagcgcgtgggctcgcacgccgacgcagcccaggagcgggccgtgcgtcgcgctgctcaggtgcagcggttggaggccaaccacgggctgctggtggcgcgcgggaagctgcacgtcctgctcttcaaggaggagactgaaattccagcccgcgccttccagaaagtcccagagctcttgggtccggaggaccagttggtgctgggcccagatcagccagaggatgaagttggagagagttctgaagaggagccagtggagtccagggctcagcggctgcgccgcactggtttacagaaagttcaaagcctgaaaagggctctttccagtcgtaaagcagcacagcccacaccagtcaagccgccacgcgtagggcctgtccggagctctgaaggcccatcagaaggccagcctgcagctcagcctgaaatggagtccgagctcgagactgccctggagccagaacctcctcaacctaccaaggaagatcctgagaaacccgtgcttcaaatagagagcgcagcctgatccctggggctgcctgtcccattcggtgcttaagccttgtcccaaaataagtacttatagagtgcagcacttacatccaaataaggagagaatcctgcatccactgcccagctccaaagcttccttcctggctttccagtctgaaccctgtgtcctctgacagaggagctttcagcctaatttaggttcaccaccaataaaagcaattttctct

SEQ ID NO: 432 - protein, 260 aa, Mus musculus
MGESALEPGPVPETPAGGPVHAVTVVTLLEKLATMLEALRERQGGLAERQGGLAGSVRRIQSGLGALSRSHDTTSNTLTQLLAKAERVGSHADAAQERAVRRAAQVQRLEANHGLLVARGKLHVLLFKEETEIPARAFQKVPELLGPEDQLVLGPDQPEDEVGESSEEEPVESRAQRLRRTGLQKVQSLKRALSSRKAAQPTPVKPPRVGPVRSSEGPSEGQPAAQPEMESELETALEPEPPQPTKEDPEKPVLQIESAA

SEQ ID NO: 433 - DNA, 3152 bp, Mus musculus
gcctttctttgcaacctcgcctcctgcggctgggtggtcctttctctcgccgggctttggagacacgcgcccgatttcgaggggagggagacgatggactgagacgatgcacgccatggaatcccgggtgttactgagaacgttctgcgtgatcctcgggcttggagcggtttgggggcttggtgtggacccctccctacagattgacgtcttaacagagttagaacttggggagtctacagatggagtgcgccaagtcccgggactgcataatgggacgaaagccttcctcttccaagagtcccccagaagcataaaggcatccactgctacagctgagcggtttttccagaagctgagaaataaacacgagttcacaatcttggtgaccctgaaacagatccacttaaattcgggagttatcctctccatccaccacttggatcacaggtacctggaactggaaagcagtggccatcggaatgagatcagactccactaccgctctggcactcaccgtccccacacggaagtgtttccttatattttggctgatgccaagtggcacaagctctccttagccttcagtgcctctcacttaattttacacatcgactgcaataagatctatgaacgagtggtggaaatgccttcaacagacttgcctctgggcaccacattttggttgggacagagaaataatgcacatggctattttaagggaataatgcaggatgtgcacgttcttgtcatgcctcagggcttcattgctcagtgcccggaccttaatcgaacctgtccaacatgcaacgacttccatgggcttgtgcagaaaatcatggagctgcaggacattttatcaaagacgtcagccaagttgtccagagctgaacaaagaatgaacaggctggatcagtgctactgtgagcggacatgcactgtgaagggaaccacctaccgagagtctgagtcctggacagacggctgtaagaactgcacatgcttgaacgggaccatccagtgcgagactctggtctgccctgctcctgactgccctcctaaatcggcccctgcgtatgtggatggcaagtgctgtaaggagtgcaaatcaacctgccagttccagggacggagctactttgagggagaaaggaacacggtatactcatcttctggaatgtgtgtcttatatgaatgcaaggatcagaccatgaagcttgttgagaacattggctgcccacccttagattgtcccgagtctcatcagattgccttgtctcacagctgctgcaaggtttgtaaaggttatgacttctgttctgagaagcatacctgcatggagaactcggtctgcaggaacctgaacgacagggctgtgtgcagctgcagggatggttttcgggctctccgagaggacaacgcctactgtgaagacattgacgagtgtgcagaagggcgccattactgccgtgagaacaccatgtgtgtgaatacacctggttctttcatgtgtatctgcaaaactgggtacatcaggatcgacgattactcatgtacagaacatgatgagtgtctcacaaaccagcacaattgtgatgaaaacgctttgtgctttaacactgttggaggacacaactgtgtctgcaagcctggctacaccgggaatggaaccacgtgcaaagctttctgcaaagatggctgtagaaacggaggagcgtgcattgctgccaatgtgtgtgcctgcccacaaggcttcacgggacccagctgtgagacagacattgacgagtgctctgagggctttgttcagtgtgacagccgtgccaactgcatcaacctgcctgggtggtatcactgtgagtgcagagacggctaccatgacaatgggatgtttgcgccaggcggagaatcctgtgaagatattgacgaatgcgggactgggaggcacagctgcaccaacgacaccatttgcttcaacttggacgggggatacgattgccggtgtccccatgggaagaactgcactggggactgcgtgcacgaggggaaagtgaagcacaccggccagatctgggtgctggaaaacgacaggtgctccgtgtgttcctgccagactgggtttgtcatgtgtcgacggatggtctgcgactgcgaaaaccccacagttgacctttcctgctgccctgagtgtgacccaaggctgagcagtcagtgcctgcatcaaaacggggaaaccgtgtacaacagcggcgacacctgggtccaggattgccgtcagtgccgctgcttgcaaggagaagttgactgttggcccctggcttgcccagaggtagaatgtgaatttagcgtccttcctgagaacgagtgctgcccacgctgtgtcaccgatccttgtcaggccgacaccatccgcaatgacatcaccaaaacctgcctggacgagatgaacgtggttcgcttcaccgggtcttcctggatcaagcacggcacggagtgtaccctctgccagtgcaaggggtcgcctgagacaagagctggtggcaagaacagatggtccagcaaaagccacccagagggatatggtgaagctacgtgtgtgacagctatttcagaagtccaagaggatggcatgctgcacagattaagtggggactccgaaaccacactctgtgacctgaactgaaatcgattgatttacccagtgaatttaatagatgagccttggctgccttgaatcggaacagaaacctgctgcatcttccctattcatgagctcattctcaaattcaggaaggttgcctcgcgcgcagagccaaagcacagcttcctggctgggaagcagagagtttctcagtgctcagatgttaatgttttctgcgctcaggctatttttatccagccacacagacgacagtgtaagtacagatttcttctgcagttttcatgagagcaggtgtgggatcctaggccattgtcctcaaagcacacacgttcgcgccctgtatccgaacagtttaggagtgaacgctaccctttgtatctatgatcattcagctgtctgcctattgttcaaaagaagaaaagatataaaacgtatcttcaggatatctctcggggatgagaatgagtaagacgttattcatttcagacgc

SEQ ID NO: 434 - protein, 858 aa, Mus musculus
MHAMESRVLLRTFCVILGLGAVWGLGVDPSLQIDVLTELELGESTDGVRQVPGLHNGTKAFLFQESPRSIKASTATAERFFQKLRNKHEFTILVTLKQIHLNSGVILSIHHLDHRYLELESSGHRNEIRLHYRSGTHRPHTEVFPYILADAKWHKLSLAFSASHLILHIDCNKIYERVVEMPSTDLPLGTTFWLGQRNNAHGYFKGIMQDVHVLVMPQGFIAQCPDLNRTCPTCNDFHGLVQKIMELQDILSKTSAKLSRAEQRMNRLDQCYCERTCTVKGTTYRESESWTDGCKNCTCLNGTIQCETLVCPAPDCPPKSAPAYVDGKCCKECKSTCQFQGRSYFEGERNTVYSSSGMCVLYECKDQTMKLVENIGCPPLDCPESHQIALSHSCCKVCKGYDFCSEKHTCMENSVCRNLNDRAVCSCRDGFRALREDNAYCEDIDECAEGRHYCRENTMCVNTPGSFMCICKTGYIRIDDYSCTEHDECLTNQHNCDENALCFNTVGGHNCVCKPGYTGNGTTCKAFCKDGCRNGGACIAANVCACPQGFTGPSCETDIDECSEGFVQCDSRANCINLPGWYHCECRDGYHDNGMFAPGGESCEDIDECGTGRHSCTNDTICFNLDGGYDCRCPHGKNCTGDCVHEGKVKHTGQIWVLENDRCSVCSCQTGFVMCRRMVCDCENPTVDLSCCPECDPRLSSQCLHQNGETVYNSGDTWVQDCRQCRCLQGEVDCWPLACPEVECEFSVLPENECCPRCVTDPCQADTIRNDITKTCLDEMNVVRFTGSSWIKHGTECTLCQCKGSPETRAGGKNRWSSKSHPEGYGEATCVTAISEVQEDGMLHRLSGDSETTLCDLN

SEQ ID NO: 435 - DNA, 3125 bp, Mus musculus
tggactgagacgatgcacgccatggaatcccgggtgttactgagaacgttctgcgtgatcctcgggcttggagcggtttgggggcttggtgtggacccctccctacagattgacgtcttaacagagttagaacttggggagtctacagatggagtgcgccaagtcccgggactgcataatgggacgaaagccttcctcttccaagagtcccccagaagcataaaggcatccactgctacagctgagcggtttttccagaagctgagaaataaacacgagttcacaatcttggtgaccctgaaacagatccacttaaattcgggagttatcctctccatccaccacttggatcacaggtacctggaactggaaagcagtggccatcggaatgagatcagactccactaccgctctggcactcaccgtccccacacggaagtgtttccttatattttggctgatgccaagtggcacaagctctccttagccttcagtgcctctcacttaattttacacatcgactgcaataagatctatgaacgagtggtggaaatgccttcaacagacttgcctctgggcaccacattttggttgggacagagaaataatgcacatggctattttaagggaataatgcaggatgtgcacgttcttgtcatgcctcagggcttcattgctcagtgcccggaccttaatcgaacctgtccaacatgcaacgacttccatgggcttgtgcagaaaatcatggagctgcaggacattttatcaaagacgtcagccaagttgtccagagctgaacaaagaatgaacaggctggatcagtgctactgtgagcggacatgcactgtgaagggaaccacctaccgagagtctgagtcctggacagacggctgtaagaactgcacatgcttgaacgggaccatccagtgcgagactctggtctgccctgctcctgactgccctcctaaatcggcccctgcgtatgtggatggcaagtgctgtaaggagtgcaaatcaacctgccagttccagggacggagctactttgagggagaaaggaacacggtatactcatcttctggaatgtgtgtcttatatgaatgcaaggatcagaccatgaagcttgttgagaacattggctgcccacccttagattgtcccgagtctcatcagattgccttgtctcacagctgctgcaaggtttgtaaaggttatgacttctgttctgagaagcatacctgcatggagaactcggtctgcaggaacctgaacgacagggctgtgtgcagctgcagggatggttttcgggctctccgagaggacaacgcctactgtgaagacattgacgagtgtgcagaagggcgccattactgccgtgagaacaccatgtgtgtgaatacacctggttctttcatgtgtatctgcaaaactgggtacatcaggatcgacgattactcatgtacagaacatgatgagtgtctcacaaaccagcacaattgtgatgaaaacgctttgtgctttaacactgttggaggacacaactgtgtctgcaagcctggctacaccgggaatggaaccacgtgcaaagctttctgcaaagatggctgtagaaacggaggagcgtgcattgctgccaatgtgtgtgcctgcccacaaggcttcacgggacccagctgtgagacagacattgacgagtgctctgagggctttgttcagtgtgacagccgtgccaactgcatcaacctgcctgggtggtatcactgtgagtgcagagacggctaccatgacaatgggatgtttgcgccaggcggagaatcctgtgaagatattgacgaatgcgggactgggaggcacagctgcaccaacgacaccatttgcttcaacttggacgggggatacgattgccggtgtccccatgggaagaactgcactggggactgcgtgcacgaggggaaagtgaagcacaccggccagatctgggtgctggaaaacgacaggtgctccgtgtgttcctgccagactgggtttgtcatgtgtcgacggatggtctgcgactgcgaaaaccccacagttgacctttcctgctgccctgagtgtgacccaaggctgagcagtcagtgcctgcatcaaaacggggaaaccgtgtacaacagcggcgacacctgggtccaggattgccgtcagtgccgctgcttgcaaggagaagttgactgttggcccctggcttgcccagaggtagaatgtgaatttagcgtccttcctgagaacgagtgctgcccacgctgtgtcaccgatccttgtcaggccgacaccatccgcaatgacatcaccaaaacctgcctggacgagatgaacgtggttcgcttcaccgggtcttcctggatcaagcacggcacggagtgtaccctctgccagtgcaagaatggccatttgtgctgctcagtggatccacagtgccttcaggagctgtgaagttaactgcctcatgggagatatctgttcaaagaatgttttctcatttcaaaagaccaaataaataaataaataaataaaaagtgaggtgtggccagccagatgcaactttgttagcagctggatagactgatgtcgattatggattcgtggggcctgaggaacatctctgaggaagcgagatgaccattctgcttttactattcctgggatcaccttgcagaggaatgggtgtggagcccaggccatgccatcctcgcccctggataagaagcctgagccccatcagctctgggagagcctctcgctctgtccgcagccaggcgcaggacacgtccttctatctcagactcttcctgagtcagcgaggctcctcactgaggctgtcgaacgtgaggtgacagcggtgagcgagttatattttcagaatccaagaagctgatgcgtctgtacagtgcactccgcaacccgaaacaagctattgtcatgataaataacgcacaggcatggttacgtaaccttttctaacacgaaaagtcacccctcccccccccccccagtttccttgtttactgcccttaatattgtttggttgaatttgttcagtagacgcttgttcttgtgcaaaataaaataactatttctcttacctt

SEQ ID NO: 436 - protein, 819 aa, Mus musculus
MHAMESRVLLRTFCVILGLGAVWGLGVDPSLQIDVLTELELGESTDGVRQVPGLHNGTKAFLFQESPRSIKASTATAERFFQKLRNKHEFTILVTLKQIHLNSGVILSIHHLDHRYLELESSGHRNEIRLHYRSGTHRPHTEVFPYILADAKWHKLSLAFSASHLILHIDCNKIYERVVEMPSTDLPLGTTFWLGQRNNAHGYFKGIMQDVHVLVMPQGFIAQCPDLNRTCPTCNDFHGLVQKIMELQDILSKTSAKLSRAEQRMNRLDQCYCERTCTVKGTTYRESESWTDGCKNCTCLNGTIQCETLVCPAPDCPPKSAPAYVDGKCCKECKSTCQFQGRSYFEGERNTVYSSSGMCVLYECKDQTMKLVENIGCPPLDCPESHQIALSHSCCKVCKGYDFCSEKHTCMENSVCRNLNDRAVCSCRDGFRALREDNAYCEDIDECAEGRHYCRENTMCVNTPGSFMCICKTGYIRIDDYSCTEHDECLTNQHNCDENALCFNTVGGHNCVCKPGYTGNGTTCKAFCKDGCRNGGACIAANVCACPQGFTGPSCETDIDECSEGFVQCDSRANCINLPGWYHCECRDGYHDNGMFAPGGESCEDIDECGTGRHSCTNDTICFNLDGGYDCRCPHGKNCTGDCVHEGKVKHTGQIWVLENDRCSVCSCQTGFVMCRRMVCDCENPTVDLSCCPECDPRLSSQCLHQNGETVYNSGDTWVQDCRQCRCLQGEVDCWPLACPEVECEFSVLPENECCPRCVTDPCQADTIRNDITKTCLDEMNVVRFTGSSWIKHGTECTLCQCKNGHLCCSVDPQCLQEL

SEQ ID NO: 437 - DNA, 2675 bp, Mus musculus
attgtctccgcctttccaacagagggagacgatggactgagacgatgcacgccatggaatcccgggtgttactgagaacgttctgcgtgatcctcgggcttggagcggtttgggggcttggtgtggacccctccctacagattgacgtcttaacagagttagaacttggggagtctacagatggagtgcgccaagtcccgggactgcataatgggacgaaagccttcctcttccaagagtcccccagaagcataaaggcatccactgctacagctgagcggtttttccagaagctgagaaataaacacgagttcacaatcttggtgaccctgaaacagatccacttaaattcgggagttatcctctccatccaccacttggatcacaggtacctggaactggaaagcagtggccatcggaatgagatcagactccactaccgctctggcactcaccgtccccacacggaagtgtttccttatattttggctgatgccaagtggcacaagctctccttagccttcagtgcctctcacttaattttacacatcgactgcaataagatctatgaacgagtggtggaaatgccttcaacagacttgcctctgggcaccacattttggttgggacagagaaataatgcacatggctattttaagggaataatgcaggatgtgcacgttcttgtcatgcctcagggcttcattgctcagtgcccggaccttaatcgaacctgtccaacatgcaacgacttccatgggcttgtgcagaaaatcatggagctgcaggacattttatcaaagacgtcagccaagttgtccagagctgaacaaagaatgaacaggctggatcagtgctactgtgagcggacatgcactgtgaagggaaccacctaccgagagtctgagtcctggacagacggctgtaagaactgcacatgcttgaacgggaccatccagtgcgagactctggtctgccctgctcctgactgccctcctaaatcggcccctgcgtatgtggatggcaagtgctgtaaggagtgcaaatcaacctgccagttccagggacggagctactttgagggagaaaggaacacggtatactcatcttctggaatgtgtgtcttatatgaatgcaaggatcagaccatgaagcttgttgagaacattggctgcccacccttagattgtcccgagtctcatcagattgccttgtctcacagctgctgcaaggtttgtaaaggttatgacttctgttctgagaagcatacctgcatggagaactcggtctgcaggaacctgaacgacagggctgtgtgcagctgcagggatggttttcgggctctccgagaggacaacgcctactgtgaagacattgacgagtgtgcagaagggcgccattactgccgtgagaacaccatgtgtgtgaatacacctggttctttcatgtgtatctgcaaaactgggtacatcaggatcgacgattactcatgtacagaacatgatgagtgtctcacaaaccagcacaattgtgatgaaaacgctttgtgctttaacactgttggaggacacaactgtgtctgcaagcctggctacaccgggaatggaaccacgtgcaaagctttctgcaaagatggctgtagaaacggaggagcgtgcattgctgccaatgtgtgtgcctgcccacaaggcttcacgggacccagctgtgagacagacattgacgagtgctctgagggctttgttcagtgtgacagccgtgccaactgcatcaacctgcctgggtggtatcactgtgagtgcagagacggctaccatgacaatgggatgtttgcgccaggcggagaatcctgtgaagatattgacgaatgcgggactgggaggcacagctgcaccaacgacaccatttgcttcaacttggacgggggatacgattgccggtgtccccatgggaagaactgcactggggactgcgtgcacgaggggaaagtgaagcacaccggccagatctgggtgctggaaaacgacaggtgctccgtgtgttcctgccagactgggtttgtcatgtgtcgacggatggtctgcgactgcgaaaaccccacagttgacctttcctgctgccctgagtgtgacccaaggctgagcagtcagtgcctgcatcaaaacggggaaaccgtgtacaacagcggcgacacctgggtccaggattgccgtcagtgccgctgcttgcaaggagaagttgactgttggcccctggcttgcccagaggtagaatgtgaatttagcgtccttcctgagaacgagtgctgcccacgctgtgtcaccgatccttgtcaggccgacaccatccgcaatgacatcaccaaaacctgcctggacgagatgaacgtggttcgcttcaccgggtcttcctggatcaagcacggcacggagtgtaccctctgccagtgcaagaatggccatttgtgctgctcagtggatccacagtgccttcaggagctgtgaagttaactgcctcatgggagatatctgttcaaagaatgttttctcatttcaaaagaccaaataaataaataaataaataaaaagtgaggtgtggccagccagatgcaactttgttagcagctggatagactgatgtcgattatggattcgtggggcctgaggaacatctct

SEQ ID NO: 438 - protein, 819 aa, Mus musculus; identical to SEQ ID NO: 436

SEQ ID NO: 439 - DNA, 3337 bp, Mus musculus
ggccgcgcagtcgcctctagtcacccgcaggctccgaccgagctactcagaaagaagtaggcgacggcgggcgccgggccgcgcgggcagccttgggacaatggggccccggcgcttgctgatcgtcgccctcggcctcagcctgtgcggtcccttgctgtcttcccgcgtccctatgagccagccagaatcagagaggacagatgctacggtgaacccccgctcattctttctaaggaatcccagtgaaaatacatttgaactggtccccctgggggatgaggaggaggaggagaaaaatgaaagcgtcctgctggagggtagggcagtctacttaaatataagcctccctcctcacacgccgcctcctcccttcatctccgaggacgcctccggatatctgaccagcccctggctgacgctcttcatgccctccgtgtacacgattgtgttcattgtcagccttcctctgaacgtcctggccatcgcagtgttcgtcttgaggatgaaggtcaagaagccggccgtggtgtacatgctgcacctggccatggccgacgtgctcttcgtgtcggtgctccccttcaagatcagctactacttctccggcactgattggcagttcgggtctggaatgtgccgcttcgccaccgcagcgttttacgggaacatgtacgcctccatcatgctcatgacggtcataagcattgaccggttcctggcggtggtgtatccgatccagtccctgtcctggcgcactctgggccgagccaacttcacttgcgtggtcatttgggtgatggccatcatgggggtggtgccccttctcctcaaggagcagaccacccgagttccgggactcaacatcaccacctgccacgacgtcctcagtgagaacctgatgcaaggcttttactcgtactacttctcggccttctccgccatcttctttcttgtgccgttgatcgtttccacggtctgctacacgtccatcatccggtgcctgagctcctccgcggttgccaaccggagcaagaagtcgcgggctttgttcctgtctgccgcggtgttctgcatcttcatcgtctgctttgggcccaccaacgtcctcctgattgtgcactaccttttcctctccgacagtcctggtacagaggcagcctactttgcttacctcctctgcgtctgtgtgagcagcgtgagctgctgcatcgatccgttgatttactactacgcctcctccgagtgccagaggcacctctacagcatcttgtgctgcaaagaaagctctgatcccaacagttgcaacagcaccggccagctgatgccgagtaaaatggatacctgctctagtcacctgaataacagcatatacaaaaagctattagcttagggaaagggttgctggaaggttccatgagaaaaggttggaaagccaacagcggggaatcccattagtccctgcaaagaactgtatttacttcgaaacctaaaaaacaaccaatatccgatatgcacgaatacttctgctatcaagagtctagattggataattaccagcaaggtgacgggaacggaaataaaggtgtccagtgttgctagtgctatgatagtaactggatgtcacttcttatatatctaggtgactttaatatatagatggtatgcacacactcatttgtcatgcaggagggaatctgcactttgacacatttttgtttattccctggccgttactatggaaataatctgattctctgacttaataaacaaagtctgagttggtgggtgttagcactgggcagctggagatcctaatgataggggaggagtccgtagtttagacttaacacagcttttgcctatattttttttcaaattatttgataataatggttagtgatggaaggatgagacagtattacctgtgtaggggaagctctaatacttttcatcttgaacataccgtagttttaagaattatcaaggctgttggaaaacccgttttgatatgggtagcattttttttttaacttgcaatttacttactgaatacatggaccaagactgagcataagactcaccaggactgtaataaaccttacaaagcagccaagcctagacacagccatctgcatggaggcctctgagcaccaggtacatcacaccccttcggctatgcctcccagagagcagagatggatgggaagcaccaggcccaccccatcctgctaggattctcattagctgtgagctgactgtgtcttttagaaattggcaaggtaaggtatgccatcttgggaggcagtaactatgaaagactgacgagaggagaaaggtgtgtttacatccagtagctgtcctgcaaggctggcccttgcacagacagacacacccacatgccctggtcacactgttggatagtgggccatagactgactataggagaataaccgagtcctgtccttactcaggcaacgcagagagctggcatgtggtcagctatgatgcacatagaacttgtcttcagctggatgtgaccaagtgtatttcacataagcaaggcctatcagctaaactgctttgcatatctgagtttctgcttccagtagctatagattaggataaaaacacagtataagatgtatatttttaatacatatgcccttcagcctacaaaattacacactatttatttacaaatgttttttcaaaaattactcaaatcagccaggcattatggtatacacctttaatcccagaacttgggaggcagaggcaggcagatcttaaacaattttttttttaagaaacaagcaaacacaaaaagttttacttaagtccaattttaagaaatatataggtcagtttggttaaaaataatagtaatgaaaggaaatttcattgattgaaatttattctgtatttttcttgagttattgagattatttgtaaagcatttttaatgccacagtgactaacaagcatataaaatcttcatacctttgacaaaataatttgaaaattaatttaaaacatatcctttttctgatgaaaaaatatgttggcattttaagcaaataagagtagaaaggttgtttatttaagagaacaaagtatttccaaatactgtagagtcgcttccacgaaagtcctatggttgtatggttaacttggttccggtgttggctgatctcaattactgactccctgtcccgtgttctgtctgtgacttaatgtaactgttatcaccgcgcttgtgaccttttacgtcattgttttgtgttcaccctcttttttaaaaaaaaatatattaataaactaaaaccatgcttgg

SEQ ID NO: 440 - protein, 430 aa, Mus musculus
MGPRRLLIVALGLSLCGPLLSSRVPMSQPESERTDATVNPRSFFLRNPSENTFELVPLGDEEEEEKNESVLLEGRAVYLNISLPPHTPPPPFISEDASGYLTSPWLTLFMPSVYTIVFIVSLPLNVLAIAVFVLRMKVKKPAVVYMLHLAMADVLFVSVLPFKISYYFSGTDWQFGSGMCRFATAAFYGNMYASIMLMTVISIDRFLAVVYPIQSLSWRTLGRANFTCVVIWVMAIMGVVPLLLKEQTTRVPGLNITTCHDVLSENLMQGFYSYYFSAFSAIFFLVPLIVSTVCYTSIIRCLSSSAVANRSKKSRALFLSAAVFCIFIVCFGPTNVLLIVHYLFLSDSPGTEAAYFAYLLCVCVSSVSCCIDPLIYYYASSECQRHLYSILCCKESSDPNSCNSTGQLMPSKMDTCSSHLNNSIYKKLLA

SEQ ID NO: 441 - DNA, 3219 bp, Mus musculus
cgcggagccgcgggagccgcctgggccgcgccggaggagggcggggagaggaccatgtgaatgtgctccggagctgagcgccaagccaagcagtgtttgaaaggaacaggatgctgatctaatcgtggcaaaaagtcagtccgaccgctggtttcgaagacatgtggtgtatataaagtttgtgatagttggtggaaatttgggagcttggataatgggctgtgtgcaatgtaaggataaagaagcagcgaaactgacagaggagagggacggcagcctgaaccagagctctgggtaccgctatggcacagaccccacccctcagcactaccccagcttcggcgtgacctccatcccgaactacaacaacttccacgcagctgggggccagggactcaccgtctttgggggtgtgaactcctcctctcacactgggaccctacgcacgagaggagggacaggagtgacactgtttgtggcgctttatgactatgaagcacggacggaagatgacctgagttttcacaaaggagaaaaatttcaaatattgaacagctcggaaggagactggtgggaagcccgctccttgacaaccggggaaactggttacattcccagcaattacgtggctccagttgactccatccaggcagaagagtggtactttggaaaacttggccgcaaagatgctgagagacagctcctgtcctttggaaacccaagaggtacctttcttatccgcgagagcgaaaccaccaaaggtgcctactcactttccatccgtgattgggatgatatgaaaggggaccacgtcaaacattataaaatccgcaagcttgacaatggtggatactatatcacaacgcgggcccagtttgaaacacttcagcaactggtacagcattactcagagaaagctgatggtttgtgttttaacttaactgtggtttcatcaagttgtaccccacaaacttctggattggctaaagatgcttgggaagttgcacgtgactcgttgtttctggagaagaagctggggcaggggtgtttcgctgaagtgtggcttggtacctggaatggaaatacaaaagtagccataaagacccttaagccaggcaccatgtctccggagtccttcctggaggaggcgcagatcatgaagaagctgaagcatgacaagctggtgcagctctacgcggtcgtgtctgaggagcccatttacatcgtcacggagtacatgagcaaaggaagtttgcttgacttcttaaaagatggtgaaggaagagctctgaagttgccaaaccttgtggacatggcggcacaggttgctgcaggaatggcttacatcgagcgcatgaattatatccacagagatctgcgatcagcaaacattctagtggggaatggactaatttgcaagattgctgactttggattggctcggttgattgaagacaatgaatacacagcaagacaaggtgcgaagtttcccattaagtggacagcccccgaagcggccctgtatggaaggttcacaatcaagtctgacgtatggtcttttggaatcttactcacagagctggtcaccaaaggaagagtgccatacccaggcatgaacaaccgggaggtgctggagcaggtggagagaggctataggatgccctgcccacaggactgcccgatctccctgcacgagctcatgatccactgctggaaaaaggatccggaagagcgcccgaccttcgagtacttgcagggcttcctggaggactactttacggccacagagccccagtatcagcccggtgaaaacctgtgagagcctgcgcttcagacgcctcttcccgaggcctccctacccctccccattagcttccaattctgtagccagctgccccagagcagcgagaaccgtccaggatcagattgcatgtgactctgaagctgaacttccacggccctcattaatgacacttgtcccccagtccgaacctcctctgtgaaccatctgagacagaagcgtgttatttctcagacttggaaatgcattgtatcgatgttatgtcaaaggccaaacctctgttcagtgtaaatagctgctcctgtgccaacaatcccagtgctttccttttttaaaaaagaaaaagcaaatcctatgtgattttaactctgtcttcacctgattcaactaaaaaaaaaaaagtattattttccaaaagtggcctctttgtctaaaacaataaaattttttttcatgttttaacaaaaaatgatcaggacaggtgtttgggttttttttcccttttttatacatatgatatatatgttaacatatgttcctgtacatacaccatgtgggtgctaccatggagactggccagcgtaggccacatagctacaggaccggagtggggattactgcagaaccctgccagcaaagcactggtgtcagcctgcaagccggtggcctcattttttgacttctacgaagcatgacgtcctctccatttggactgcacttttttggttcctaatcatacctatagattgttcatgtgacttttttcaggtcccagggcctagtcacgagttttagtgccagtttttgctccagcgaactgtgattcgttcttgaaacttaggagtgagcattttaagcaaaaagcagccagccagttctaccacaagagctgcaagacggagaccacacaaacttcctgtataaatatgaatgctgaagggttcaggtgttttccttttatttaataaatcttgtaaccacatttaaatggtctaaacccatagcattgtagtcatggcaacctactaaactttctcatgcaactaaaaattatgggaaggcaagggtggggggttgtacacgtcccattgtaaaataagtgttttactgtcctgtactgctaatgagtgactctccgtgtcaggagtgctccagtgaataactatgcactactttacatttcatgggggtgcacaaaaaaaaaaaagtattacatttttagttgctgtttgtaccaacctcgaattacgtatgtttaacaacaaatcaattcctatttctattgagttttttaatactgactagcaattctgaagtcttaattccttttttttgttaatgatttacttgtgagtttacatttttaaattgtttaactttcctaatttagtaattaaaaagagagcattttacatttg

SEQ ID NO: 442 - protein, 534 aa, Mus musculus
MGCVQCKDKEAAKLTEERDGSLNQSSGYRYGTDPTPQHYPSFGVTSIPNYNNFHAAGGQGLTVFGGVNSSSHTGTLRTRGGTGVTLFVALYDYEARTEDDLSFHKGEKFQILNSSEGDWWEARSLTTGETGYIPSNYVAPVDSIQAEEWYFGKLGRKDAERQLLSFGNPRGTFLIRESETTKGAYSLSIRDWDDMKGDHVKHYKIRKLDNGGYYITTRAQFETLQQLVQHYSEKADGLCFNLTVVSSSCTPQTSGLAKDAWEVARDSLFLEKKLGQGCFAEVWLGTWNGNTKVAIKTLKPGTMSPESFLEEAQIMKKLKHDKLVQLYAVVSEEPIYIVTEYMSKGSLLDFLKDGEGRALKLPNLVDMAAQVAAGMAYIERMNYIHRDLRSANILVGNGLICKIADFGLARLIEDNEYTARQGAKFPIKWTAPEAALYGRFTIKSDVWSFGILLTELVTKGRVPYPGMNNREVLEQVERGYRMPCPQDCPISLHELMIHCWKKDPEERPTFEYLQGFLEDYFTATEPQYQPGENL

SEQ ID NO: 443 - DNA, 2101 bp, Mus musculus
ctcggatttgtaagcatagtttctcactgattcaactgctcacagagtcagtccgaccgctggtttcgaagacatgtggtgtatataaagtttgtgatagttggtggaaatttgggagcttggataatgggctgtgtgcaatgtaaggataaagaagcagcgaaactgacagaggagagggacggcagcctgaaccagagctctgggtaccgctatggcacagaccccacccctcagcactaccccagcttcggcgtgacctccatcccgaactacaacaacttccacgcagctgggggccagggactcaccgtctttgggggtgtgaactcctcctctcacactgggaccctacgcacgagaggagggacaggagtgacactgtttgtggcgctttatgactatgaagcacggacggaagatgacctgagttttcacaaaggagaaaaatttcaaatattgaacagctcggaaggagactggtgggaagcccgctccttgacaaccggggaaactggttacattcccagcaattacgtggctccagttgactccatccaggcagaagagtggtactttggaaaacttggccgcaaagatgctgagagacagctcctgtcctttggaaacccaagaggtacctttcttatccgcgagagcgaaaccaccaaaggtgcctactcactttccatccgtgattgggatgatatgaaaggggaccacgtcaaacattataaaatccgcaagcttgacaatggtggatactatatcacaacgcgggcccagtttgaaacacttcagcaactggtacagcattactcagagaaagctgatggtttgtgttttaacttaactgtggtttcatcaagttgtaccccacaaacttctggattggctaaagatgcttgggaagttgcacgtgactcgttgtttctggagaagaagctggggcaggggtgtttcgctgaagtgtggcttggtacctggaatggaaatacaaaagtagccataaagacccttaagccaggcaccatgtctccggagtccttcctggaggaggcgcagatcatgaagaagctgaagcatgacaagctggtgcagctctacgcggtcgtgtctgaggagcccatttacatcgtcacggagtacatgagcaaaggaagtttgcttgacttcttaaaagatggtgaaggaagagctctgaagttgccaaaccttgtggacatggcggcacaggttgctgcaggaatggcttacatcgagcgcatgaattatatccacagagatctgcgatcagcaaacattctagtggggaatggactaatttgcaagattgctgactttggattggctcggttgattgaagacaatgaatacacagcaagacaaggtgcgaagtttcccattaagtggacagcccccgaagcggccctgtatggaaggttcacaatcaagtctgacgtatggtcttttggaatcttactcacagagctggtcaccaaaggaagagtgccatacccaggcatgaacaaccgggaggtgctggagcaggtggagagaggctataggatgccctgcccacaggactgcccgatctccctgcacgagctcatgatccactgctggaaaaaggatccggaagagcgcccgaccttcgagtacttgcagggcttcctggaggactactttacggccacagagccccagtatcagcccggtgaaaacctgtgagagcctgcgcttcagacgcctcttcccgaggcctccctacccctccccattagcttccaattctgtagccagctgccccagagcagcgagaaccgtccaggatcagattgcatgtgactctgaagctgaacttccacggccctcattaatgacacttgtcccccagtccgaacctcctctgtgaaccatctgagacagaagcgtgttatttctcagacttggaaatgcattgtatcgatgttatgtcaaaggccaaacctctgttcagtgtaaatagctgctcctgtgccaacaatcccagtgctttccttttttaaaaaagaaaaagcaaatcctatgtgattttaactctgtcttcacctgattcaac

SEQ ID NO: 444 - protein, 534 aa, Mus musculus; identical to SEQ ID NO: 442

SEQ ID NO: 445 - DNA, 4213 bp, Mus musculus
cgcggcggatgcgagccgcgtcagagctcgcttgctgggggggggggttgacggcttatggcgggtgttggtgtcgggaggaggcgagagtcggcttagcctgtgtcgcgtctgtctcaggaaccggacggagagtgagggcaccagggctcactctctaggggggctgccattttccgcgttcacgccgtcgtgaggagcgcagcccggactctccacgacccctccgactccctactcgcgggcctcgaggccgcggcggccaccgagacagcgccgcacctcccccaccccttcccctcgtcccccgcccgccagggcccggccggtgccccacccccgcctgcctgcccgcccgaccgcccgcccgctacgccgccgccatgtcggcgcaggcccagatgcgcgctatgctggaccagttaatgggcacctctcgggacggagatactactcgtcaacgaatcaaattcagcgatgacagagtatgcaagagccaccttctcaactgttgcccccacgatgtcctttctggaacaagaatggatcttggagaatgcttgaaagtccatgacctggctttaagagcagattatgaaattgcgtccaaagaacaagactttttctttgaacttgatgccatggatcatctgcagtcattcattgcagattgtgatagaagaacagaagtatctaagaaaagactagcagaaactcaagaagagataagtgctgaagtggctgcaaaggcagagcgtgttcatgagttaaatgaggaaataggcaagttgttggccaaagtggaacaactaggagctgaaggaaatgtggaagaatctcagaaagtcatggatgaagtcgagaaagcacgggcaaagaaaagagaagcagaggaagtttatcggaactctatgccagcttccagcttccagcagcagaaacttcgtgtctgcgaggtctgctctgcgtatttaggtcttcatgacaatgacaggcgactggctgatcattttgggggtaaattgcacctgggatttattgaaataagagagaagctggaagaattaaagagagttgtagctgagaagcaggagaagagaaaccaggaacgtctgaaacgaagagaagagagggagagagaagaacgggagaaactgaggagatctagatccagagagcatcgcagacaccgatctcgctccatgtcacgagaacgcaagaggaggactcgatccaagtctcgtgagaaacgccatcgccacaggtccaggtccagtagccgaagccgcagccgtagccaccagagaagtcggcacagttcaagagataggagcagagagcgatccaagaggaggtactgaagtgccgatcagaggatgcggagctacctttatgttttagccttttgtttcttatgttacttatgcttagattattggcttgaaacctgcacctgatatattgatatgtactcaattgtaggtgtatacatttttttctgattgtatgagtagttcatgcacagttaatgcatgagccggagtaagaaattgaagccagtatgtgcagaggttattgcttttctttacttggaatgttggggagacgggagggatgctgataaaaactattttataggcaaataattttaggtactaatactcttgagggttgtaggggattttgtttatttgttttccaatatgtattaacaaatagggactctgagaagtcctttcattaaaagcattgtttagctttgtttgcctgttttccacattttggtgcacttctaaagagcaaaccgattctgctatgttgtttaatccacagtataaatcatacattttcatgttcacctttagtgtaatgggaatattctgagtttggaggaagctacaaaacaccttagtatagcaggaaacttcaaaagatgcaatgagagcagacattaattatatagtgagagctaacaaagggttagaatatagtggagctgtttaattcccaaaattcaggtcacataatcctatggagcataaactatacttaaaattactttttccctccttgacaactattattaggtaaatataggagaaaaactcggaaaccctagttactagtcttaaattttctttggcttactccacataaattaaacccacagaaagctgacaaaatctttgttagactgagttaccctttccctgaaatcacaagctgagtttcttaataggctttcaatcagctttttattttgtgtatttctgtctatgttcttagtagcccttaaagtgatttttaactaggtagggatttgtgtgtgtgtgtgtgtgtgtgtgtccttgtgtctctgtgtgtgtctgttggggggagggcttgcgggagaggtcaggaggccaagctcttgagtagctcaaattgacctcatattcatcctttagcctcagcttcctcttgagtgctgggattataggtatatgacaccctgcctggctttatgaattagatactttcctctgtgctaggcttgttaaaaaatagccaagtaatagtagtgtatataaacaaccatttttatgttgctctatggagttttctgtgtgggagaatacttagccacagattataaagtgataaactgaatatcataggataaataacataaatttagatgaggaaaattttcagaaagattctttaaaactggtttgaggtaatggatcaggcttgaataactggttgtaattaaacaagtatggaaatacctgtaggcttcttacatttcaaaactgggtttgtcctcagtgcagtggccagaaacattttttttttggtagtgttctttatgattctaaatctgcacactaaatctgagaatcgggtggtttaggcaataaaggatctagctgattcttgtgttgacctgctcagctgtcatttttctgatgtttatcttacttgtctttattggtgatggagatgggaggggtgggtgggaagtctgtcctatcactgtgtcatcctgaggcttcctgaacttgggaagtttagttatataggaaaacttcccaccatattcagcatgttcaaaagaggattatttttgtaaaattattaaaaattttgcttttctcaagagtatttcatatctttgaattcaaattacttttaaaacatcattgtttttaacaaaaaagcaaatgattacttgttatttcaaatatataacatcaaattattgttatatatgtgagtttagtttttgatggtaaaaaaagtccattaaaagtcttggcagtttgctgttttcttgcccttgctgtgaagtacttatatctctgttactacaagtaggttgtctatatgaaccttgtcttggcaacagttcccataggtcagtgaggaccttcagcaattttgtgcttttgggggtgttctgtcctatagtagacttcaaagtcacactacttgggttcagaattctttgccaaataatttaattacatcccgttgtttttccatatttcattagagataatagagacatttggcttattaggctttcactagtaacaagtaacaaatggtgtgtaggaggatatttgtaatcttgtacaaacattagttcatgtctttgttctttttcagttatcactgacctcagggacttgccagcatctaatgtcatgttcttagtgatcatttctatcattaatagaagctttgaagatggcttgtgtagacttggaatgtggttattattatttttccttgtataatgcttattaagcaggggctcctgaaatgataacttttgaggggctgaggctcaggaggcttgtcataaattgaggccagcttgggctagggagagagaacttgattccaaaaacaaaaggggaaaaaggcttatataacttcaagtagaatgcttgaaattggtgttgatttttcaagctttttaaatcttaatttctgttgccatagttttgtattacgacaaagtatttgaaaacaatttgtgggctggtgagatggctcagtgggtaagagcacccgactgctcttccgaaggtccgaagttcaaatcccagcaaccacatggtggctcacaaccatccgtaatgagatctgactccctcttctggagtgtctgaagacagctcagtgtacttatatacaataaaaataaataaatctttaaaaa

SEQ ID NO: 446 - protein, 324 aa, Mus musculus
MSAQAQMRAMLDQLMGTSRDGDTTRQRIKFSDDRVCKSHLLNCCPHDVLSGTRMDLGECLKVHDLALRADYEIASKEQDFFFELDAMDHLQSFIADCDRRTEVSKKRLAETQEEISAEVAAKAERVHELNEEIGKLLAKVEQLGAEGNVEESQKVMDEVEKARAKKREAEEVYRNSMPASSFQQQKLRVCEVCSAYLGLHDNDRRLADHFGGKLHLGFIEIREKLEELKRVVAEKQEKRNQERLKRREEREREEREKLRRSRSREHRRHRSRSMSRERKRRTRSKSREKRHRHRSRSSSRSRSRSHQRSRHSSRDRSRERSKRR

SEQ ID NO: 447 - DNA, 2652 bp, Mus musculus
gcggcggatgcgagccgcgtcagagctcgcttgctgggggggggggttgacggcttatggcgggtgttggtgtcgggaggaggcgagagtcggcttagcctgtgtcgcgtctgtctcaggaaccggacggagagtgagggcaccagggctcactctctaggggggctgccattttccgcgttcacgccgtcgtgaggagcgcagcccggactctccacgacccctccgactccctactcgcgggcctcgaggccgcggcggccaccgagacagcgccgcacctcccccaccccttcccctcgtcccccgcccgccagggcccggccggtgccccacccccgcctgcctgcccgcccgaccgcccgcccgctacgccgccgccatgtcggcgcaggcccagatgcgcgctatgctggaccagttaatgggcacctctcgggacggagatactactcgtcaacgaatcaaattcagcgatgacagagtatgcaagagccaccttctcaactgttgcccccacgatgtcctttctggaacaagaatggatcttggagaatgcttgaaagtccatgacctggctttaagagcagattatgaaattgcgtccaaagaacaagactttttctttgaacttgatgccatggatcatctgcagtcattcattgcagattgtgatagaagaacagaagtatctaagaaaagactagcagaaactcaagaagagataagtgctgaagtggctgcaaaggcagagcgtgttcatgagttaaatgaggaaataggcaagttgttggccaaagtggaacaactaggagctgaaggaaatgtggaagaatctcagaaagtcatggatgaagtcgagaaagcacgggcaaagaaaagagaagcagaggaagtttatcggaactctatgccagcttccagcttccagcagcagaaacttcgtgtctgcgaggtctgctctgcgtatttaggtcttcatgacaatgacaggcgactggctgatcattttgggggtaaattgcacctgggatttattgaaataagagagaagctggaagaattaaagagagttgtagctgagaagcaggagaagagaaaccaggaacgtctgaaacgaagagaagagagggagagagaagaacgggagaaactgaggaggtcccgatcacatagcaagaatcccaaaagatctagatccagagagcatcgcagacaccgatctcgctccatgtcacgagaacgcaagaggaggactcgatccaagtctcgtgagaaacgccatcgccacaggtccaggtccagtagccgaagccgcagccgtagccaccagagaagtcggcacagttcaagagataggagcagagagcgatccaagaggagatcctcaaaagaaagattcagagatcaagacttagcatcacgtgacagagacaggagttcaagagacagatcacctcgtgaccgagatcgaaaagataagaagcggtcctatgagagtgctaatggcagatcagaagacaggaggagctctgaagagcgtgaagcaggggagatctaactagctgtgtacatatcttcaatccttaagcttcccatggagttacatgctattgtttatagttgtaaagggtgacagttctagacaccgatccagtcagactagatgtatagtatccaatgatttgaactgaacctgttttccttcataaagcctaaaactacatccatagttttttgtgaacctgaacataacagtttatatgatgagatactgttctctattctttcaagttaggagtgatagtgaatgaattgtgttaatgtcttgcagtttttgaacatttgtaaaatattgtcttcttttctattccaaacagcagcagctttaggattttttttttccattataattcttcttcctttgacttttatatctcctgatacctgttcctccaactataagaggagagggtgaagggaagtattgtaacttcttttctaaggttctgttcacgttggttattagttgattacagttgagcatttctactggattgtgtgctggagacatttaaacacggggctgttttgttaggggcctatagagttggaagttgaacagctgttgcattacatacttttgcttttatattgaaaatttgaaatcagacttgccttgattttttttttttttttttgttctaagaaactgctatgttcagtatattgaggggggtgggggggcagggactatttcataatagcacttgtgtgtgtgtgtgtgtgtgtgtgtgtgtgtgtgtgtgtgtgtagagtttaaagactataattgtaaaaaaaatgaaaagaatcatcaccaccactgtaacttgttgatagtaagttgccactagaactatttgctgtggttattttctattttgtaacatcttaacagtgcctttctgtataaggcaccaaaggaagtaaatatttaactctggatttcagatgaattgttgctccacccaaatctcttgctgcctatactatacttcagagctgtagtgagcagcttctgtaaggaaagagtgaacctgtagaagcaactaagagttgcttggtttgtatttcttaattgacaagcctgaataaaaaccatatgtaacc

SEQ ID NO: 448 - protein, 392 aa, Mus musculus
MSAQAQMRAMLDQLMGTSRDGDTTRQRIKFSDDRVCKSHLLNCCPHDVLSGTRMDLGECLKVHDLALRADYEIASKEQDFFFELDAMDHLQSFIADCDRRTEVSKKRLAETQEEISAEVAAKAERVHELNEEIGKLLAKVEQLGAEGNVEESQKVMDEVEKARAKKREAEEVYRNSMPASSFQQQKLRVCEVCSAYLGLHDNDRRLADHFGGKLHLGFIEIREKLEELKRVVAEKQEKRNQERLKRREEREREEREKLRRSRSHSKNPKRSRSREHRRHRSRSMSRERKRRTRSKSREKRHRHRSRSSSRSRSRSHQRSRHSSRDRSRERSKRRSSKERFRDQDLASRDRDRSSRDRSPRDRDRKDKKRSYESANGRSEDRRSSEEREAGEI

SEQ ID NO: 449 - DNA, 3980 bp, Mus musculus
ttttgtctaacgcatttaaaatttttacttttaacagaaattagcagagtacggaaagacatgtacaatgacacgttaaatggcagtacagagaaaagaagtgcagaattgcctgacgcggtgggacccattgttcagttacaagagaaactttatgtgcctgtaaaagaataccctgattttaattttgttgggagaatccttggacctagaggacttacagctaaacaacttgaagcagaaacgggatgtaaaataatggtccgaggcaaaggctcaatgagggataaaaagaaggaggagcaaaatagaggcaagcccaattgggagcatctaaatgaagacttacatgtactaatcactgtggaagatgctcagaacagagcagaaatcaagctgaagagagcggttgaagaagtgaagaagttactggtacctgcggctgaaggtgaagacagcctgaagaagatgcagctgatggagcttgcaattctgaatggcacctacagagacgccaacattaaatcaccagcccttgccttttctcttgcagcaactgcccaggctgctccaaggatcatcactgggcctgcgcctgtcctcccaccagctgctctgcgtacacctacgccagctggccctaccataatgcctttgatcagacaaatacagaccgctgtcatgccaaacggaactcctcacccaactgctgcaatagtccctccagggcctgaagctgggttaatctacacaccctatgaatacccctacacattggcaccagctacatcaatccttgagtaccctattgaacccagtggtgtgttaggtgcggtggctactaaagttcgaaggcacgatatgcgtgtccatccttaccaaaggattgtgaccgcagaccgagccgccaccggcaactaacctatgaccttctgacctctgaactcttcacccaatgatgacctgaccatgcctgcctgctgatcagttaactggtaatcgcctttgcttgcctgtcgtcagtgcagcgagctgaggcacttgtccgttcgtcttaccatctaaccaaacaaaagacaaagaaattgtcctccaactcagcttttccccccctgtttgggtgaaagtggttctagaacctgcactgaatagtagtaaagcaataaggcccgattcatcccacagcactgatcatctctcaatgccccaccccaagcgaacggtaagaaggcctctcttaagaaggggagacagatggccctaactactcagtgacagaggcagttactgtgagagacttgtaggaatttttttcttctcctagcgaagtcaaagctctctctgaatgtactgtgtgacaatgcatcatgcatgaaccttcggtcagggatgtcgttggggaagtgacttcaaaagtattcaaaatttgacatgctgtttgtttagtcactacagtgccctcaaagggcagacattgcagcctttttatattgcctgccaaaatttgaagtattagaacaaagtgtgccatgagagaaaaacttaacaaggagttttgaaaagaaatgcaaagaacaaaactacaacactattttttaaaaagttgagtatctgagttaaaatttccaaatctttattttacaccaccttaaaaattatatgagaacaaggtacatgcattatgtgtcacattactgggcaaactgttcaaatattttttttaaacctccctgtatagaaaatatcattaaggatgtaaaagccatgcttgcctatttgctgtatacatgtaatgaaattgtagataaagtgtagtgcattgaaacaaatgaacaaaaaagtagatacttttactatacaagggtgctggtgcagaaaaaaatatatatatttttggaaatgtagcattttatactttcaagtgttataaaaaaaaagaaaaagaacaaagaaaccctttatttcattaaatgattttttctggtggttgtcaagaaacaaaagaccaaaagagcctttttgtctttcttttttattttttaagtattggaataagtctaatgaaaaagaaagtgccttatttttcttcatggtcatttagtcaagtgtcctgtaagatcagctcctccctcagaataaagttactgcatgttcctcagtcgcccagtatgtgaaaggagatatgagaggagacaaatgagttgatggtctaaattataagatttgtgtcacattatcttgatgccagtttgccaaatctgatactgtgaaaaaatttgatagcttttctaatgtctgactagtaaattttaaaatgtcattcttttacaaatcataattagtacttttggttattaccgtcttcagtgttagcccaaagattctgaggtttagaaaaaaattatgtaagatctgaacatcagtttgcagacaaaattaaattagagctttattttatttggagaagagggatacaatggaatttttccttaccaattagaaataattgtaatgcctaaaaaactttttcacaaaaatgaatctttgaaattttttattgttgaaaaagtgttaagtaacataaatctaatcagatatcttatgtagtccatctctgctggctttagtaactgctcctaaactttttaactctaaaggagcgtggaaagcccgcatcacagtgttcagtgactgctctgctccattctttctcctctccagtttctctcttgaaagtcaaacagttttgtagttgaagcagtccgtgtgcaaagcctgcatctaaacacttgcgttaataagtcattaaccgctcagtaccagatgtggcaaatctcaagtgattgtggactcctggctcatcaactcatgccctcttccataccctcatggcttcacagtcaaggtcagcaggaagctcattggtcaccttcatggtgacctctccattattctgtctcacttggaaccattttcagtttatttactatgcaatagacagtccttgttttgtactcagctagctttgatttaatgtaccactgctttgtctttctgttacacatatggttttgatttatttacaatatatgctgtgccattttgatttttattttggttggttggttgaataaatatgcgacactcagaacacttgaggtgatagttttaaaaaaaacaaacaaacagtaccagtatttgatccagtctcatctcagctgtgttatacctggacaatttagatgtttatcaaaggtcttttatggggaagaaagcaaatgtgtaaaacagtagacgtgtgacgtttatgagtaatgctggctctgaacaaacttttgaaaacttagttgacagtgttttgagtcaactgaaaaaaagcatgacttttggaatctctgaatgccttggttctcagtattatcactctattgaatttttttttcttattaaagtatgtagtttaaaagtaagacttttttcctgacagtattatgtaatttttagcgtgggtagatgggagtgtcgcttgtatgttaccatacagctgacatgtattttttgtctattctttattatcttagtagtttcatgctgtgtatgtaccataaccaacctattgcctatgagaaacatgtaagataatgtatttacagccattgttacaagtttataatgtatttttctatcttgttttatatgtatgttatataacattcaaaagaatttttttcttgattgagaaaaggatacaaaatgcaaaatccacaattttgataactgaaaattgccaattgttttgcagtactttattatattgggtgtcttgtctttcttgggcttttagttagctgatgaatgaatacattagacacttctgggttttagttgggattttacatagcttgcattttagttctttggttctttgctgtttctattaacccatagcattattttaataaatgttataataccaacct

SEQ ID NO: 450 - protein, 99 aa, Mus musculus
FCLTHLKFLLLTEISRVRKDMYNDTLNGSTEKRSAELPDAVGPIVQLQEKLYVPVKEYPDFNFVGRILGPRGLTAKQLEAETGCKIMVRGKGSMRDKKK

SEQ ID NO: 451 - DNA, 6114 bp, Mus musculus
ttttgtctaacgcatttaaaatttttacttttaacagaaattagcagagtacggaaagacatgtacaatgacacgttaaatggcagtacagagaaaagaagtgcagaattgcctgacgcggtgggacccattgttcagttacaagagaaactttatgtgcctgtaaaagaataccctgattttaattttgttgggagaatccttggacctagaggacttacagctaaacaacttgaagcagaaacgggatgtaaaataatggtccgaggcaaaggctcaatgagggataaaaagaaggaggagcaaaatagaggcaagcccaattgggagcatctaaatgaagacttacatgtactaatcactgtggaagatgctcagaacagagcagaaatcaagctgaagagagcggttgaagaagtgaagaagttactggtacctgcggctgaaggtgaagacagcctgaagaagatgcagctgatggagcttgcaattctgaatggcacctacagagacgccaacattaaatcaccagcccttgccttttctcttgcagcaactgcccaggctgctccaaggatcatcactgggcctgcgcctgtcctcccaccagctgctctgcgtacacctacgccagctggccctaccataatgcctttgatcagacaaatacagaccgctgtcatgccaaacggaactcctcacccaactgctgcaatagtccctccagggcctgaagctgggttaatctacacaccctatgaatacccctacacattggcaccagctacatcaatccttgagtaccctattgaacccagtggtgtgttagagtggattgaaatgccagtcatgcctgatatttcagcccattgacttgctggatgaaggactagaatacagcagctgttataacacgaccagtcaatgtggaaaaaacaaaaaacaaaacaaaacaaacaaaaaaaaaaactgtttctgtgcaaccccactgttttaccagacagaatttgaaacttttttgtgtatgaccttggtgctgtgtgcctgctgttgactcctaggactttgatcttttaaaggttccctcccccatcctccacttaatattaattttgaaagtctttagtgaacttggacattaagatttaaacttgaaaattcattgttcatttaaagaaagccgcagcgctctgtatgttatctgtgtgtgtgcatgcacttaggtgcctttgtttataaacattttattgtacatgttttctgtcttaagtcattgtataaaataattataagtcagaattatacaacagaagtgttagtaagaggctgtattctattgcacattacttgaagcattttaaaaaaaaaataacatgtaacctatatataaccttatttaagttttcctttctattaattctctgtcctgtggcccccgtgcatgctccttccccagaactcctctctgccgcactcacagaagctcttgttcctgaggagttagggctctcagcttccagctgctgctcctgactgttagtgcctagttttgccaaatagaattactatgcagtctgcttatctaaaatgaaaaataggttttcaaccagtttactgcttagagacagcaagaggcactgctgtaaaatttctccattataaagtaacatgtcgtttggtttggttaggacatttatatatataaagaattgattgaaaccaacactattaacaaaatatgcagataccaaattaacatcgtcaaggttctcaataagtaccaagttagaaattattatcattatcatcattattattattattattattatcatcatcatcatcattatttcttgctttgccacctaagcagtaaaacaatgatattagtcctttggagaactgaggaaattactttaaattcccaagttacagtaaatttgcacacagataacatgcatgttatgtatcaagtttcacattattttaaaataagcagtgcctttcaaaacagatgcagacatatgtgttggtggtagtgaggagattggtattagcatcaaatcttcattgatgactaatgtttaattcccttccttttatctttaggtatggctttcccaacgaaaggctaagaattcaagaacggtcttaaccgaaccctcatcagatctgaatttaacaaatgcttagtctcagcagcctccgggaaaaaccttagcctagcagtcagtgacttacttgcactttttgcacatagatataaagtaaaatgatactattaatttggattagtctgtaatactgcaaagcaacagtaatttataaaggagtgtatagaagtaaactgactgctaagtgtactgtactgtttgctttactaatcacctaattcattgcagttcatacttattgactcaaaagtttaaatccacaatctgtaggctttaattaagagttgctttttaaaccttttttaagtgataaactctgaaagttaaggttagcaaaataattgtcagtattaaatgtggcattatttaagtagtcctgctgcaagaaaggcacttcagtgaatatgtgactagtaaagctcagacacgtctggttctaatagagctcgtgagatactgtgacttggggactgtcaatgaagaggtgaagtaggtagaaggccaacctgtttgaaatgaatgcaatattgatagatacatgacatactacagttgattttaaaactactgtgccttaacatgtttcttaagcttttgtagtaagtgaacctttgagatccattttgataaacctgctgtcaatgtttcccttatgtatgttttctaactttgtcttggtaattgcaatttaactaggtgcggtggctactaaagttcgaaggcacgatatgcgtgtccatccttaccaaaggattgtgaccgcagaccgaggttagtttagttctgcagttcttgtttataagcaatgtgctgggtgtccaaaaagtttgcaacaccagacctgatggaaaaatgtaactgtctacctgcacaccattttcttttctttttccctttctaaatttaataattgattgatttaaggttggtttggttttgtggttttgtttttggtttgggttttcacccctcccctttacattttaatttattaaatcttctattactttgtcctaagatttattccagctaaaacataaattagtctatttggggagctattaaatttttacattatcatagcaatgtttagtaataattgttgctaaatttttccctttaattattctgaatatttcagttggtactgcaaaatgaattgagcagatgatgtttttatgagagaagtaaaaaaaaaaaattttgcttccatgtaattttggagaaaactgaagatttattatccatttttctatattataaaacattgagccactatataaatatgagggtatatgtgtcaagaacatacctaaaatcaacagtcaggactgtgaagataattttaatctaagtggatactttatgaatagaaaacaagttccctcttactctattttctggccaaaacggatgctttgagttttgtcatttgctgctaaattacagtacctgaacgttaactgtcctgcagttctgtggtatgcgaggtccagctccttggatatccttttttactaacctgtgactggaaacaagtcttcatttttctcactttcatatttgtaacttgtgccctatatatgcccttggacccatttttaaattatttatgcttatttgagtagtagtagttttgtttgggttttttttttttgttttgttttgtttttgttttttttttttttgttttgacttttttgtgtgattcttttgtgttttgtttttaattgaaagattggaatcccaagcatagtagaaaaggagctagctcacttgacatggttactctactcttgaataaccactataaatacggcacacagttgccttgtgtattagaaataaaataaccttccaaagacatcagtgatacttatttactatcacactaaaatagagtcctgaaaactttacctaacatatatttttgtagtggtttttcattgaacaaaatctggtggcatatgcataacaatactactacatgcagttgtgccaagtgtgagcatatcaaccattgtatcagagtcgcatagagatgaggaagttagatgggaaaggttacttcagatgtgggcagtctcatagatactttgaagctgcatcatactgcaaaagtctaacataattattttacagagtgttttgattttgaagtaatttttccccctctttggtttttctttccccgtgttccttttaaattttttcactaacacaataatcctttctcactttgtactccagagccttcagatagttgagaatattagactaagatcttactgtatttggaaaatgacaacacattccatgcatggctcatctggagctgtgtttattttgattagttctgtttgtgttcaaaatgcagtgtcagcaaaccaaaacggtttttatcccccctgctccatctccaacttttcctttcttctagagatagatcacttaggaacacgatcaccacatgtactcactgggtccaagggagaggaccgaagcccttgacttacattattttatgatactactgtttctctctctctctctctctctctctctctctctttctctctctctctctctctctcatcttttgagaagattattattagcattcatttgatgcaaggaagcagcccgaggacatataaccatgtaactgtctgtatgtaagcacttagagtatctagttgcttactaaaaacaaacccacttccatagttatttcacaattggtttgaaacttaaagaccaactgactttatagttgtaacgaactatacgtgattttgcacagttaacattacctgtgtgtactgtaggagtccaggacatggcagaggatgtattttagatgtactggatatgataatgtactttgttaagtaatccacactcaaatataatcagaaattatctaagtaatgatttgaccaaaacattacttacacaaatttaagactatgggacaaccgtttttgttttaaataaaagtctgcttccttttaagaaattcagggaagatttgattatattgaagatacaatatttttgtagtatttataaactgtcctaattgatagactatagaaaccatttttgtcatacaaaggtaaataggtctattatatagaacatttaaaccctgtgaacatgacacctactaggtttgatttatgaagtggcatagactctaaccttgcactgagcatcttttcattcacatctctcctgcctttgtctcaatggcaacagtacagaaaattctgtcaaacctcagaatatagtagaaataattaagctgttgaatgagtcttaaaaattatactactgttaagtggaccaagtttgatgaagtagaatgtgagaggttgattaaagaaggagctactcaaggactttggagtgataacttttccacttgagaactactttatgttttactgtaattttttaaatttttttttgttcttttttgttactttgcaaaagaaaatagtatttacaggtggcttcttttaaaatataaaaatataaagcaggaatgtatatgaaatgtcagattttattgtatttgcagagtattagctttgaaattgaataaagaaagctgtttgtagttttaaaaatgccttcttggtatcagttagaaatttcttctattttttatgtacttagagttctttgaggtatagagttttaaatggcaggattttacagtgtttacatgcaagtgcattttataagtgttctatatgtgtaaattagtattttcaactggaaaatgttggctggtgcaaaaggcctggccttttttctggttcccatgatgttgcctacactgctagactacagtattgctttgtatcatgaggccaagaaattccatgttgtttgtaaatagaataattgaaaaagcaataaacatttattg

SEQ ID NO: 452 - protein, 99 aa, Mus musculus; identical to SEQ ID NO: 450

SEQ ID NO: 453 - DNA, 462 bp, Mus musculus
gctgaaggtgaagacagcctgaagaagatgcagctgatggagcttgcaattctgaatggcacctacagagacgccaacattaaatcaccagcccttgccttttctcttgcagcaactgcccaggctgctccaaggatcatcactgggcctgcgcctgtcctcccaccagctgctctgcgtacacctacgccagctggccctaccataatgcctttgatcagacaaatacagaccgctgtcatgccaaacggaactcctcacccaactgctgcaatagtccctccagggcctgaagctgggttaatctacacaccctatgaatacccctacacattggcaccagctacatcaatccttgagtaccctattgaacccagtggtgtgttaggtgcggtggctactaaagttcgaaggcacgatatgcgtgtccatccttaccaaaggattgtgaccgcagaccga

SEQ ID NO: 454 - protein, 154 aa, Mus musculus
AEGEDSLKKMQLMELAILNGTYRDANIKSPALAFSLAATAQAAPRIITGPAPVLPPAALRTPTPAGPTIMPLIRQIQTAVMPNGTPHPTAAIVPPGPEAGLIYTPYEYPYTLAPATSILEYPIEPSGVLGAVATKVRRHDMRVHPYQRIVTADR

SEQ ID NO: 455 - DNA, 474 bp, Mus musculus
gctgaaggtgaagacagcctgaagaagatgcagctgatggagcttgcaattctgaatggcacctacagagacgccaacattaaatcaccagcccttgccttttctcttgcagcaactgcccaggctgctccaaggatcatcactgggcctgcgcctgtcctcccaccagctgctctgcgtacacctacgccagctggccctaccataatgcctttgatcagacaaatacagaccgctgtcatgccaaacggaactcctcacccaactgctgcaatagtccctccagggcctgaagctgggttaatctacacaccctatgaatacccctacacattggcaccagctacatcaatccttgagtaccctattgaacccagtggtgtgttagaggtatggctttcccaacgaaaggctaagaattcaagaacggtcttaaccgaaccctcatcagatctgaatttaacaaatgcttag

SEQ ID NO: 456 - protein, 157 aa, Mus musculus
AEGEDSLKKMQLMELAILNGTYRDANIKSPALAFSLAATAQAAPRIITGPAPVLPPAALRTPTPAGPTIMPLIRQIQTAVMPNGTPHPTAAIVPPGPEAGLIYTPYEYPYTLAPATSILEYPIEPSGVLEVWLSQRKAKNSRTVLTEPSSDLNLTNA

SEQ ID NO: 457 - DNA, 432 bp, Mus musculus
gctgaaggtgaagacagcctgaagaagatgcagctgatggagcttgcaattctgaatggcacctacagagacgccaacattaaatcaccagcccttgccttttctcttgcagcaactgcccaggctgctccaaggatcatcactgggcctgcgcctgtcctcccaccagctgctctgcgtacacctacgccagctggccctaccataatgcctttgatcagacaaatacagaccgctgtcatgccaaacggaactcctcacccaactgctgcaatagtccctccagggcctgaagctgggttaatctacacaccctatgaatacccctacacattggcaccagctacatcaatccttgagtaccctattgaacccagtggtgtgttagagtggattgaaatgccagtcatgcctgatatttcagcccattga

SEQ ID NO: 458 - protein, 143 aa, Mus musculus
AEGEDSLKKMQLMELAILNGTYRDANIKSPALAFSLAATAQAAPRIITGPAPVLPPAALRTPTPAGPTIMPLIRQIQTAVMPNGTPHPTAAIVPPGPEAGLIYTPYEYPYTLAPATSILEYPIEPSGVLEWIEMPVMPDISAH

SEQ ID NO: 459 - DNA, 2738 bp, Mus musculus
aggcccaggagtggacggttcctactgcggctgggcaccggctgggctcccgcgtcggcctcgcgtttcaagcttgcgcctggctcaacctcaatccggccccggtctcggaacgaaggcgccgctgccgctgggcctctcgcaagaccatgaagaagcggtggcagccactgcggccctcgtcaaggtgaccagcccggactacagcggacctctcagacaggttatgtcaccagcagaggtggcgccgaagttccctgcggcctggagactatgtacaagaggaatggtctgatggctagcgtgttggtcacctctgccactccacagggcagcagcagctcagactcgctggagggccagagctgcgactatgccagcaagagctacgatgctgtcgtcttcgacgttctgaaagtgactcccgaggagtttgccagtcagatcacattgatggacatccccgtgttcaaagccatccagccagaggagttggccagttgtggatggagtaaaaaggagaaacacagtcttgcccccaacgtcgtggcctttacccggaggttcaaccaggtcagtttttgggtcgtacgagaaattctaacagcacagactttaaaaataagggcagaaatcctgagccattttgtgaaaatagccaagaaacttctagaactgaacaaccttcattctctcatgtctgtggtgtcagcattacaaagtgctcccatcttcaggctgacaaaaacctgggctcttttgaatcgaaaagacaagactacttttgagaaacttgactacctgatgtccaaagaagacaactacaagcgaacccgggactacatccgaagtctgaagatggtgcccagcattccctatctaggaatctaccttctggacttgatctacattgattctgcataccctgcctctggcagcatcatggaaaacgaacaacgatccaaccagatgaacaacatcctccgaatcattgccgatttacaagtttcctgtagctatgatcacctcactaccctgccacatgtgcaaaagtacctgaagtctgtgcgctacatcgaggagctccagaagtttgtagaagatgataattacaagttgtcactcagaatcgaaccaggaagcagctctccaagactagtttcgtccaaggaagatcttgcaggcccctctgccggctccagctcagccaggttccgccggaggcccacctgtccagatacatctgtggccggcagcctccccacaccgccagtccccagacacaggaagagccacagcctaggcaacaatctgatgtgtcagttgagtgtagttgaaagtaagagtgcgacattcccatcggagaaggccaggcacctgctggacgacagtgtcctagagtcccgcagcccccgcaggggcctcacccacacctcctccaccgccatcaccaacggactctccctaggcagtagtgagagctcagagtttagtgaagaaatgtctgcagggctggaaagcaggggacgtctttatgccacgctgggacctaactggcgggttccagttcggaattctcccagaactcggagctgtgtctacagccccacgagcccttgcacctgtactgtgggaagctcagccactgtgcccactatggaggggcctctgagacggaaaaccctgctcaaggaaggccggaagcctgcactgtcctcgtggaccaggtactgggttgtactctcaggagccaccctcctttactatggagccaagtctttgcggggtacagacagaaaacattataaatctacacctggcaagaaggtctccatcgtaggctggatggtgcagctgccagatgaccccgagcacccagatatcttccagctgaataaccctgacaaaggcaatgtttacaagttccagacgggctcccgtttccatgcgatactgtggcacaagcatttggatgatgcatgtaaaagcagcaggcctcaggtacctgcaaaccttatgtcctttgaatgagtatctgcaggacttggcgagactgcaaaggcttctgagagcctagactaggtctgtggaggagagcagctctgggcataagctgtgggccaaggcactggagcctcatcgctggactcgaggaatatggccatggcctcacagtcctggatggctccccagtgtgagatccacctgtcaacccacagcaactctcatgaatcattctgcagcagcaccccaccgggtggctgtcagaccccaaactgcgcaccctatgccccctctctgggccatcgtctgtccaccagctgcttttgcatcaggggagcatttgacccatgttgggttctccatgctttctgctgcacacagagtggatggcgttaatcttcgagagggctggaaagcagagacgggctgctggacaggcttgttacaccccaagtgcaccggccactcacccacagggccgcctccgattttgtatacccttaaagcatcctgtgtgtgtgtgcgcgcggtgtgtgtgtgtgagcgagtgagtgtgaacgctctgagaaacatacattttggcacaagacttgtgacatcacacacttattggctttgagtccctgcttgaagctttagttacagccttgtcctctaagaaaagtctgaagggagtccagaagctccgtgttaagggtcccttgagttcttttactgtaaacaaacaatgcctt

SEQ ID NO: 460 - protein, 625 aa, Mus musculus
RSGGSHCGPRQGDQPGLQRTSQTGYVTSRGGAEVPCGLETMYKRNGLMASVLVTSATPQGSSSSDSLEGQSCDYASKSYDAVVFDVLKVTPEEFASQITLMDIPVFKAIQPEELASCGWSKKEKHSLAPNVVAFTRRFNQVSFWVVREILTAQTLKIRAEILSHFVKIAKKLLELNNLHSLMSVVSALQSAPIFRLTKTWALLNRKDKTTFEKLDYLMSKEDNYKRTRDYIRSLKMVPSIPYLGIYLLDLIYIDSAYPASGSIMENEQRSNQMNNILRIIADLQVSCSYDHLTTLPHVQKYLKSVRYIEELQKFVEDDNYKLSLRIEPGSSSPRLVSSKEDLAGPSAGSSSARFRRRPTCPDTSVAGSLPTPPVPRHRKSHSLGNNLMCQLSVVESKSATFPSEKARHLLDDSVLESRSPRRGLTHTSSTAITNGLSLGSSESSEFSEEMSAGLESRGRLYATLGPNWRVPVRNSPRTRSCVYSPTSPCTCTVGSSATVPTMEGPLRRKTLLKEGRKPALSSWTRYWVVLSGATLLYYGAKSLRGTDRKHYKSTPGKKVSIVGWMVQLPDDPEHPDIFQLNNPDKGNVYKFQTGSRFHAILWHKHLDDACKSSRPQVPANLMSFE

SEQ ID NO: 461 - DNA, 4577 bp, Mus musculus
gcagccagacaggccaagcgctggtgtgaggaagacaaaattaccccagttttccagagcccttatcatttgagtttaacgaaccagttcttcactctgcttccttcatgcccttcccagggatgacaactgcccttggcatcttttcagacctggaactctatctgtatgaaaatagattagcattcttgaagtataattaagaaggaacattacctgccaaagggcgagagaaccactgcctcgtacagatatggagatagtctgtctgctgctggaaatgtctccagatttttgacaacggctaaagaaccatggggtccaacgggctcgggaaagcggcaacactagatgaacttctcagcacatgcattgagatgtttgatgacaatggagacctgaacgacagttacttgcccagaatcgtgttactgatgcaccgatggtatttatcctccactgaactggcaggaaaactcctctgcatatatcttttcaaaggctgtgtaatgcttttggtcacaattcaagttctgtatttagatagagtgtactggattctgaaatttcctgcagagtttaatttggatcttggtttgattcgcatgactgaggagttccgggaagtagctagtcaactaggacatgaaaaacacatcagcctcatggacatatctagcgttccttcctatgactggatgaggagagtcacacagaggaaaaaagtatccaaaaggggaaaggcctgcctcttatttgaccatctggagcccattgagttggcggagcacctcacttttctggagcataaatcttttagaaggatctcattcacagattatcagagctatgtcatccatggctgtctggagaataacccgacattggagagatctattgctttatttaatggaatctctaagtgggtccagttgatggttcttagcaaaccaagtgcgcaacaaagggcagaagtcatcacaaagttcatcaatgtagcccagaaactccttcaactaaaaaattttaacaccttgatggcagtggttggtggccttagtcacagctccatttcccgactcaaagacacccattctcacctctcttccgaagttacaaagaactggaatgaaatgacagagttggtctcctccaatggcaattactgcaattaccgcaaagcctttgctgactgtgatggcttcaaaatccccatccttggcgtgcacttgaaagacttgatagcagtccatgtcattttcccagactggatggaggagaacaaagtgaacgttgtgaaaatgcaccagctttctgttaccctgagtgaactggtctccctgcagaatgcctctcaccacttggaacctaacatggatttgatcaacctactcactctctctctggacctctaccacacagaggatgatatttacaaactgtcactggtgttggagcctagaaattccaaatcgccaacctccccaacgacacctaataagcctgtggtacctctggagtgggcttcagaagtggtaccaaagccagaccccacaatcatcaacaaacacataaggaagttggttgagtctgtgtttcgaaactacgatcatgaccacgatggttacatctcccaagaggactttgagagcatagctgccaatttccccttcctggattccttctgcgtactagacaaagatcaggacggcctaattagcaaagacgaaatgatggcttatttcctgagagctaaatctcagctacactgcaaaatgggaccaggcttcatccataattttcaggagatgaactatctcaagccgaccttctgcgaacactgtgcgggatttctctggggcataatcaaacaaggctacaagtgcaaagactgtggagccaactgccacaagcagtgcaaagacctcttggttctggcctgcaggagacttgccagggcaccctccttgagcagcaaccccgggtcactgcctggaagcccagccttgcccccagtgcaggatgaggtatttgagtttcctggggtcacggctggacaccgagacctggacagcagagccattaccctggttacaggatcttcccggaagatctccgtgaggctgcagagagccaccactagtcaagccacccagacggaacctgtgtggtcagaggctgtctggggagactcagggtcccataccttccccaaaatgaaatccaagttccatgacaaagcagcaaaggacaagggctttgccaagtgggaaaacgagaagcccacggtacaagctggtgtggatgttgtagatcgaggcactgcatttgaacctgaccaggatgatgggcaagatgaagccaagcagggtggtgaggatggctgaggtcaagcttgggaaaccaaaggcaatcaagtcggctatgaggaggagagagaagaggcgctctgaaaggcacggtctctctcagaagcggtctggaaaagagatttggatatgctcacagcctccagtcatcctggaatccccatgactggactacgggatagagaatttaccctgactgaactatttatttcctgtactctgtctgcccctgctgaggtgccacgaaaactacttaagcagcttcccacatctctctaaagccatttgtagccagggggatgaaagctttggtgcacgtgcgtggttttctctaaaatcaaaacttagctcttttggacaatattatttttgtaaagtgtgtgcgtgtgtgtaggggtgtctcaaaagaagttgaatttgagctcctttgtgtgtgccttttagatgggaccaggacttgaagttttattgagggacaaagacattctttagaccctgaaaggcagtgaaccctctgctgctgattggctgtaaggagtgtttatagtgtcctaccacacagtggctgtgcttgtaatgccatgtgtgtgtatcacctaggtctcaatcaatcctggatcactaaggggaatcatatccccaaagcccccctaatactcatgctagatatggtaaaaacaaacaaaacaaaacaaaacaaatcaaaacagcatacacctggccacctaattgagttccccactctttctgaagattcccaaaatagaatgttaattaagaaagcaaatcaagttctgagggatgaaatttagtagaaagacccaccaaattactaggttaaagataaacaaccagtttggtaagctgaaagtaagcctatgatttttattttagataatttctagatgcaaaaggtaacttaatttcttcctaataaattctcacccatagttagaaaaacatttacaattctcatctctagctcttcttcttccccacccttcccccctttctccatgtggccatggctggccacagggctctctcttccaaccttctctcttcttctctgcctttctacagtaaagctttaaaaccatgaaaaaaaaattcacaaaagaaaaaatgaccataaacttcaactatggattgatattccatgtacacatttaaaatattaataatttaaatgtctttctttgagtgtgtatcttttgaaatagagacgccaggctgatattccaatacctataatctctgcacttgggccatgagataggaggaccccaagtctgaggtcatcctgggcaatttagcaagaatctgtctaaaaaaaaaatgtaggggctggagagatggctcagcagttaagagcactggctgctcttctagaggtcctgagttcaattcctagcaaccacatggcggctcacaaccatctagggatctgatgccctctcctagtatgtctgaagacagctacagtgcactcatatacataagtctttaaaaagtaataatcaaaataaaagaaaaattgaggtgattgagtctgtcattgagggaaccatatcatatcaaataaccagttaggaaatattccaggtgggtaccaggtgggctaacgtgtgtatcccatgtaaaactgactatggtcttatttgtgaaagtcacttccatacagctcaactgctaatactatgctcctccttagaaatggagagcatgaggccataactgctaagtggttccagtgtcttaagacaaccttggtagaggtgacacaatgtgccccgaaggttctggaatggggcatgattcagattggggatactaaacaataagtgatgtctctacttgaaggagccgtgattaactagatgagaacgagaactcattaatggtcgagcgcctcgggcagtgctgttggatctatgtatatagactgttactattcataaatacagcagagtacgtgttaacggattcaaaacagaaactgacaagtcaagtgctggcaaaccctctaaaaacacccagaaggaaaccttagggaaggctggagtctttgtatttcttttcaaaggaattatctcacctgccatttggtttatatatttattagttttcatatatagaaggaattttgtatctctggtcttcctatgataaggaagacaaaatgtaccttcaatgaaaaataaacat

SEQ ID NO: 462 - protein, 552 aa, Mus musculus
MGSNGLGKAATLDELLSTCIEMFDDNGDLNDSYLPRIVLLMHRWYLSSTELAGKLLCIYLFKGCVMLLVTIQVLYLDRVYWILKFPAEFNLDLGLIRMTEEFREVASQLGHEKHISLMDISSVPSYDWMRRVTQRKKVSKRGKACLLFDHLEPIELAEHLTFLEHKSFRRISFTDYQSYVIHGCLENNPTLERSIALFNGISKWVQLMVLSKPSAQQRAEVITKFINVAQKLLQLKNFNTLMAVVGGLSHSSISRLKDTHSHLSSEVTKNWNEMTELVSSNGNYCNYRKAFADCDGFKIPILGVHLKDLIAVHVIFPDWMEENKVNVVKMHQLSVTLSELVSLQNASHHLEPNMDLINLLTLSLDLYHTEDDIYKLSLVLEPRNSKSPTSPTTPNKPVVPLEWASEVVPKPDPTIINKHIRKLVESVFRNYDHDHDGYISQEDFESIAANFPFLDSFCVLDKDQDGLISKDEMMAYFLRAKSQLHCKMGPGFIHNFQEMNYLKPTFCEHCAGFLWGIIKQGYKCKDCGANCHKQCKDLLVLACRRLARAPSL

SEQ ID NO: 463 - DNA, 4292 bp, Mus musculus
cagatttttgacaacggctaaagaaccatggggtccaacgggctcgggaaagcggcaacactagatgaacttctcagcacatgcattgagatgtttgatgacaatggagacctgaacgacagttacttgcccagaatcgtgttactgatgcaccgatggtatttatcctccactgaactggcaggaaaactcctctgcatgtatcggaatgccagtggagaaagctgtgatgagttccgactgaagatctgctatttcatgaggtactggattctgaaatttcctgcagagtttaatttggatcttggtttgattcgcatgactgaggagttccgggaagtagctagtcaactaggacatgaaaaacacatcagcctcatggacatatctagcgttccttcctatgactggatgaggagagtcacacagaggaaaaaagtatccaaaaggggaaaggcctgcctcttatttgaccatctggagcccattgagttggcggagcacctcacttttctggagcataaatcttttagaaggatctcattcacagattatcagagctatgtcatccatggctgtctggagaataacccgacattggagagatctattgctttatttaatggaatctctaagtgggtccagttgatggttcttagcaaaccaagtgcgcaacaaagggcagaagtcatcacaaagttcatcaatgtagcccagaaactccttcaactaaaaaattttaacaccttgatggcagtggttggtggccttagtcacagctccatttcccgactcaaagacacccattctcacctctcttccgaagttacaaagaactggaatgaaatgacagagttggtctcctccaatggcaattactgcaattaccgcaaagcctttgctgactgtgatggcttcaaaatccccatccttggcgtgcacttgaaagacttgatagcagtccatgtcattttcccagactggatggaggagaacaaagtgaacgttgtgaaaatgcaccagctttctgttaccctgagtgaactggtctccctgcagaatgcctctcaccacttggaacctaacatggatttgatcaacctactcactctctctctggacctctaccacacagaggatgatatttacaaactgtcactggtgttggagcctagaaattccaaatcgccaacctccccaacgacacctaataagcctgtggtacctctggagtgggcttcagaagtggtaccaaagccagaccccacaatcatcaacaaacacataaggaagttggttgagtctgtgtttcgaaactacgatcatgaccacgatggttacatctcccaagaggactttgagagcatagctgccaatttccccttcctggattccttctgcgtactagacaaagatcaggacggcctaattagcaaagacgaaatgatggcttatttcctgagagctaaatctcagctacactgcaaaatgggaccaggcttcatccataattttcaggagatgaactatctcaagccgaccttctgcgaacactgtgcgggatttctctggggcataatcaaacaaggctacaagtgcaaagactgtggagccaactgccacaagcagtgcaaagacctcttggttctggcctgcaggagacttgccagggcaccctccttgagcagcaaccccgggtcactgcctggaagcccagccttgcccccagtgcaggatgaggtatttgagtttcctggggtcacggctggacaccgagacctggacagcagagccattaccctggttacaggatcttcccggaagatctccgtgaggctgcagagagccaccactagtcaagccacccagacggaacctgtgtggtcagaggctgtctggggagactcagggtcccataccttccccaaaatgaaatccaagttccatgacaaagcagcaaaggacaagggctttgccaagtgggaaaacgagaagcccacggtacaagctggtgtggatgttgtagatcgaggcactgcatttgaacctgaccaggatgatgggcaagatgaagccaagcagggtggtgaggatggctgaggtcaagcttgggaaaccaaaggcaatcaagtcggctatgaggaggagagagaagaggcgctctgaaaggcacggtctctctcagaagcggtctggaaaagagatttggatatgctcacagcctccagtcatcctggaatccccatgactggactacgggatagagaatttaccctgactgaactatttatttcctgtactctgtctgcccctgctgaggtgccacgaaaactacttaagcagcttcccacatctctctaaagccatttgtagccagggggatgaaagctttggtgcacgtgcgtggttttctctaaaatcaaaacttagctcttttggacaatattatttttgtaaagtgtgtgcgtgtgtgtaggggtgtctcaaaagaagttgaatttgagctcctttgtgtgtgccttttagatgggaccaggacttgaagttttattgagggacaaagacattctttagaccctgaaaggcagtgaaccctctgctgctgattggctgtaaggagtgtttatagtgtcctaccacacagtggctgtgcttgtaatgccatgtgtgtgtatcacctaggtctcaatcaatcctggatcactaaggggaatcatatccccaaagcccccctaatactcatgctagatatggtaaaaacaaacaaaacaaaacaaaacaaatcaaaacagcatacacctggccacctaattgagttccccactctttctgaagattcccaaaatagaatgttaattaagaaagcaaatcaagttctgagggatgaaatttagtagaaagacccaccaaattactaggttaaagataaacaaccagtttggtaagctgaaagtaagcctatgatttttattttagataatttctagatgcaaaaggtaacttaatttcttcctaataaattctcacccatagttagaaaaacatttacaattctcatctctagctcttcttcttccccacccttcccccctttctccatgtggccatggctggccacagggctctctcttccaaccttctctcttcttctctgcctttctacagtaaagctttaaaaccatgaaaaaaaaattcacaaaagaaaaaatgaccataaacttcaactatggattgatattccatgtacacatttaaaatattaataatttaaatgtctttctttgagtgtgtatcttttgaaatagagacgccaggctgatattccaatacctataatctctgcacttgggccatgagataggaggaccccaagtctgaggtcatcctgggcaatttagcaagaatctgtctaaaaaaaaaatgtaggggctggagagatggctcagcagttaagagcactggctgctcttctagaggtcctgagttcaattcctagcaaccacatggcggctcacaaccatctagggatctgatgccctctcctagtatgtctgaagacagctacagtgcactcatatacataagtctttaaaaagtaataatcaaaataaaagaaaaattgaggtgattgagtctgtcattgagggaaccatatcatatcaaataaccagttaggaaatattccaggtgggtaccaggtgggctaacgtgtgtatcccatgtaaaactgactatggtcttatttgtgaaagtcacttccatacagctcaactgctaatactatgctcctccttagaaatggagagcatgaggccataactgctaagtggttccagtgtcttaagacaaccttggtagaggtgacacaatgtgccccgaaggttctggaatggggcatgattcagattggggatactaaacaataagtgatgtctctacttgaaggagccgtgattaactagatgagaacgagaactcattaatggtcgagcgcctcgggcagtgctgttggatctatgtatatagactgttactattcataaatacagcagagtacgtgttaacggattcaaaacagaaactgacaagtcaagtgctggcaaaccctctaaaaacacccagaaggaaaccttagggaaggctggagtctttgtatttcttttcaaaggaattatctcacctgccatttggtttatatatttattagttttcatatatagaaggaattttgtatctctggtcttcctatgataaggaagacaaaatgtaccttcaatgaaaaataaacatac

SEQ ID NO: 464 - protein, 559 aa, Mus musculus
MYRNASGESCDEFRLKICYFMRYWILKFPAEFNLDLGLIRMTEEFREVASQLGHEKHISLMDISSVPSYDWMRRVTQRKKVSKRGKACLLFDHLEPIELAEHLTFLEHKSFRRISFTDYQSYVIHGCLENNPTLERSIALFNGISKWVQLMVLSKPSAQQRAEVITKFINVAQKLLQLKNFNTLMAVVGGLSHSSISRLKDTHSHLSSEVTKNWNEMTELVSSNGNYCNYRKAFADCDGFKIPILGVHLKDLIAVHVIFPDWMEENKVNVVKMHQLSVTLSELVSLQNASHHLEPNMDLINLLTLSLDLYHTEDDIYKLSLVLEPRNSKSPTSPTTPNKPVVPLEWASEVVPKPDPTIINKHIRKLVESVFRNYDHDHDGYISQEDFESIAANFPFLDSFCVLDKDQDGLISKDEMMAYFLRAKSQLHCKMGPGFIHNFQEMNYLKPTFCEHCAGFLWGIIKQGYKCKDCGANCHKQCKDLLVLACRRLARAPSLSSNPGSLPGSPALPPVQDEVFEFPGVTAGHRDLDSRAITLVTGSSRKISVRLQRATTSQATQTE

SEQ ID NO: 465 - DNA, 3320 bp, Mus musculus
ggacccagcgggaacccaacccatcttcagccagagcctcagccctccgtagccgaggtgggaaccagacccgcctcgcctgcctctcacccactatcgccaagtgcaacagtccggctgcactgtccgtgagccagctcttatccgagatggcttcagtgactgatggtaagactggaatcaaagatgcctccgaccagaactttgactacatgttcaaactgctcatcattggcaacagcagcgtcgggaagacctccttccttttccgctatgctgatgacaccttcacccctgcctttgtcagcactgtgggtatcgacttcaaagtgaagacagtctaccgccatgagaagcgtgtgaagctgcagatatgggacacagctgggcaagagcggtaccggaccatcaccacagcctactaccgtggggccatgggcttcattctcatgtatgacatcaccaacgaggagtccttcaatgctgtccaggactgggctactcagattaagacctactcctgggacaacgcacaggtcattctcgtgggaaataagtgtgacatggaagaggaaagagtggtcccaactgagaagggccggctcctggcagaacagcttgggtttgacttctttgaagccagcgccaaggagaacatcagtgtgaggcaggccttcgagcggctggtggatgccatctgcgataagatgtctgactcgatggacacagacccctccgtgctaggcgcctccaagacgacgcggctctcagacaccccacctctgctgcagcagaactgctcttgttagacaaggcccaccctcctgtttccccatgtcgtgccctgtttctcctccgcttctctccattactgtccattccccaatcccaagcaagatgagttctttgccagcccctgcggttctctgcagatggccccagctacagatactaactgcaggttacggggtgggtgaacactccttttacaacagaaaactccctcttatgaagaaggttcaagatagagacttggaaagaatcttttctgcccttaaaatataataaaattcctttcatttaccaagcccctcctcctacgcacactcctcggggggctggccagtgtgtaaagtgaggcccacctgcacagctaatactattaaagaaaatgtctcaaagtacaacctgcttgtttcctatcaggctccctgtggggcaagcaaagctttgatttgtagagccctgagcctgttaccacggatgcccacagggccccgggcagttgctgtggtgacaggacagtgctaatccctggagagctcagattctagtgatgcagaagaagcaggggctgagtcagaaacacacttaaaagagaaggattatcttctgcaaaatgtcaaaggccccagccatctaaaagcacaatgaccagaaggagaaaaagcaacatagatggacacaggttcttacctttctagcctgctcttttgtctcacgatgtagccttaggctaggctcaaatgtgttatttaatttaggctgaacttgaacctaatcctcctgcctcagtttccccagtgctagaatgcagatgtgtaccatcacacccagtttctccagttggttcttgactgttgggataccatagactttgtcactgattctcaggccctcagagtctgcactctgaagctgatgagcttcctcctcctttcccagtttatctagtttgacaaatcagttccagactttctagttctggcacgtggcctgcatggctttgggactgacttgcccacggtgactggcaatgaagaacctataaatgcaatgaagaacctacaaacacaagtacaaaaaagttgggatatggtaggctgtgggctctgatggagactattactagcagcctggaaatgcagctctgaacaaggaggtgggtttattatacccgaatgaggagagaggttagctgatctaggtaaagggagctctatagggaagcaggctcaggctgtagtggccaggagcaggaagctgtggttggtattttctgcacactcttgtcaacatccttagtggaccaggggaaggcttggttatttccacaggcccaaggcattgtctttgacatagttgtgttagttcaacaatttacattcaccctggacttcactagctccccacaaccctctttcttttaaagcacaccttctatgagatgggagcggtggctcaggactgtaattccagcatattgaaggttgaggcagaaggatcaactgttccagggcagcctgggctgcagatgccggtcctttttttttttttttttttttttaagctagcatgtctttggggcaggcaccagagctgtccatagccaggatctgtctttgcttcaaactgaaaatggactcggggaaaccccccaccttctcaccccatttgcaccaattctgctgccagccatcttcccgtccctactcagaatctctttgatttaagcacaagaatcatggcctactctttcccaggggcagccctaactgcatatccatttgccattctgcagagggtcttcccccatcttgctcaccttttctaacctgtcaggcactcctccacagcccacctggaaagggggagtcaggcagaattagacaaggggacatagtcctgaacaaatgctaatatagcgactcaagggcatctcgttgtcctggaaaggcacacagctggtatcaggcccagtgatcaaatgaaagggccaaatagagtcagctctgtggacatgttgcagtctttgataaactgtaaaagagagattttgggtgtggaatttaggacgtctgccatttaatcagggtttttgttagatgttactcttacaagacacatagttcagcaatttccatgtattaactcatttatcttcgtaacactttagtcaacctcagttgaagatgaggaatcaaggctctggtttgcataaggtcaactaattagcaaatggtagagtggggatccaaaggcagggagtgcatccctaggtctgtgcttttacaacattctgcaccacagctcttttccaataagtgtgatcccgtcgcttggaatcctgcccaagctgtcaggtccaagtccacctgagaaaagatgtatgtctgtgatatggtaacaaattgctcaactactcggactaatctgcggtgatggatatccagagcgcagcagaattagtttctgaggcaaccagatcccatgggcttaagcaaaataaaatgcccattgctccttacgaccatgtgctg

SEQ ID NO: 466 - protein, 219 aa, Mus musculus
MASVTDGKTGIKDASDQNFDYMFKLLIIGNSSVGKTSFLFRYADDTFTPAFVSTVGIDFKVKTVYRHEKRVKLQIWDTAGQERYRTITTAYYRGAMGFILMYDITNEESFNAVQDWATQIKTYSWDNAQVILVGNKCDMEEERVVPTEKGRLLAEQLGFDFFEASAKENISVRQAFERLVDAICDKMSDSMDTDPSVLGASKTTRLSDTPPLLQQNCSC

SEQ ID NO: 467 - DNA, 960 bp, Mus musculus
gcggcggcagcagcagcggtggcgacatgagcagcggggcggcgtccgggactgggcgggggcggccccggggcggggggccgggacccagggaccccccgcccggcgagactcacaagctggtggtcgtaggcggcggcggcgtgggcaagagcgcgctgaccatccagttcatccagtcctactttgtgtctgactatgatcccaccattgaagattcctacacaaagatctgcactgtggacggcatccctgcacggctggacatcctggacactgcggggcaagaggaatttggtgccatgcgggagcagtacatgcgtgctggcaacggcttcctgctggtgtttgccattaacgacaggcagagtttcaatgaggtgggcaagctcttcacacagatcctcagagtcaaggaccgggatgatttccccattgtgttggttgggaacaaggcagatctggagaaccagcgccaggtcctccggtctgaagcctcctctttcagtgcttcccaccacatgacttactttgaggcctcagccaaactgcgtctgaatgtcgatgaggcatttgagcagctggtgcgcgctgtccggaaataccaggaacaagaactccctcctagcccacctagtgctcccaggaagaaggatggaggatgtccctgtgtcctgctgtagccaaatagcctcaagtgaccagcacaagctctcgggaccagctgcctcacacttactgtgtggaccaaggctcgctctagctgagcctctgtttcatcctctgggttccccaggacacactacaccctcttacttttacttcctggcctcctggggctaccactgtgtgccttctgtcaatacctcctcctttccccacaagaccctgtaggtggggggagcatcttgtcactgctgtatataagccccatctttcagaaaaataaatatcactgcc

SEQ ID NO: 468 - protein, 218 aa, Mus musculus
MSSGAASGTGRGRPRGGGPGPRDPPPGETHKLVVVGGGGVGKSALTIQFIQSYFVSDYDPTIEDSYTKICTVDGIPARLDILDTAGQEEFGAMREQYMRAGNGFLLVFAINDRQSFNEVGKLFTQILRVKDRDDFPIVLVGNKADLENQRQVLRSEASSFSASHHMTYFEASAKLRLNVDEAFEQLVRAVRKYQEQELPPSPPSAPRKKDGGCPCVLL

SEQ ID NO: 469 - DNA, 3009 bp, Mus musculus
aaacagctgcggtggccgcgggagtctgagaatgcaaagtgccatgttcctggctgtccagcacgactgcgtacccatggacaagagtgcaggcaacggccccaaggtcgaggagaagcgggagaaaatgaagcggacactcttaaaggattggaagacccgtttgagctacttcttgcagaattcctctgctcctgggaagcccaaaactggcaagaaaagcaaacagcaaacttttatcaagccttctcctgaggaagcgcagctctgggcagaagcatttgatgaactgctggccagtaaatatgggctggctgcattcagggcgtttttaaagtccgagttctgtgaagaaaacattgaattctggttggcttgtgaagacttcaaaaaaaccaaatcaccccaaaaactgtcctcaaaagcaaggaaaatctataccgacttcatagagaaggaagctcccaaagagataaacatagacttccaaacgaaatctctgattgcccaaaatatccaagaggctacaagtggctgcttcaccacagctcagaagagggtgtacagtttgatggagaacaattcttatcctcggttcttggagtccgaattctaccaggacttatgtaaaaagccacagatcaccacggagccccatgctacatgagaccaggagtccccccacacacaaaggacattccattctgtctcccaagagcaaaggctgtgacctgccagaaaaaaaaaaaaaactgaccttgaattcagcctgagtgttaggaaaacatcgctcagaactattgattcaatgttgggtagtgaatcaggaagtcagcaacctaggagaggctctgtgtgagaacggcttccctcactgtgtgaagaacagagggagggaacaggcctctgaatgtgttcttcctccttgtcgggaaagcagagtttgagatgaaagatccgatgcaatgttgttggagcatttaaaatcaataggtctgggattatgtggccttagctagttggctgtacaccttccctaaactagtccatgttaccacatagtggtgttagttctagttttaatattttagtactaagtaacattacaatgtttactgtgtgcaagggtgttgacgttcttaggactacagatcattagtactagtgtgtcacgtatcactgaaactgagaagtatgtttgagttgttaaatggtgtgtgtgatggaccgaatgctgtgccgtgctgtagaaccagcgtctgttacgagtgccaaaaactgtcttgcgggcagctaaactttgaagtggtttttgaatacttttaataaatttattttgctaaataatgtcattgaacatttggaagtcccgatgtggttctgttgtttgatttcagtaactggaaatatgtcagctatcagagaaaagaactttctagcaaagaggtatcagtgtggatcaattgttgtacctgcccactgagaaatcaacagctgagaagtgggaaatgcttgcttcgaggaagatgttctccttaaacctatagacattatgtagtcttaaaaacatcagaccacattcctagaaccactcattgtgaaagtcaaatgtgttatttaataaaagaaaaagaaaaaaagagcattgacctgtgtgttaaggaccagctaaatattagtaagtaaagttacagggccaaacagcctaagaaaaggaaaaggttcgtgtaaatgtgggcctgcctggcgtatgcttggttccagacacctggcatgggcaagaacctggtcagttctttcttctgtgatggggcaatacgaaaaccccaagtttcctgcacctcctgccttcatttggctaataatctgtgctactctgggtaacactgaagaagaaagcaagtgctttgcttgcactaaatgcaggaatatgttctagctgagaaaagccttcattctggctaatttggaggaattccctttctgaagcaaattttctatatctggaagttttagtaaatgggaggagatggggggcaccctcagcttgaaattggaagaccttaactcaatgacatcccatcgctttgtgtccctgggccctccctggatacctctctacccatctccctaatatacacaataatggggacttgagaattggaacatactaaatgggtaactttttatctatttgccaaaagaaatagtctttatgactaccctaattcacacctttaaccagatgtctggaacaagcacaagtacaggagggacaacctggctcatttctgtatcaccagaagccagaatgacatataacaggtacagaataaaataaataccgttggcataagtgagttctgaattcattgaaacagtgatactgtgatggaaatatgacaaatatgccaggtctctatagcgcttaattcataaaggctttgcctaacaaatctcctttgccattaagttccatttacctcacactctgtgcagcttttcctcagtccccagtctgatagaagatgccaccatgcctgcagttaacccaccactctctgctacctcctacaccttatatagttccttcttaacgctagtgatgctttcaacacacaaacctgatcttgcctcctgtcacttaccaaccgctgacggctctcctgaacattaagatgaaagcagcattcctaatatagcataaccccacagggctgacttcctcttacgttccaacctggtacacaatcccctgcaccagcattgctggccgccttccatttgcttgaagatgctatgtccctcagccccagggaatctttctgtctaatggttcctctccgcagtgtaattttagctcttgctcaccacacacctatcaatgcaattgccacttccccagggaagtggactctgatctcctacctagaccacatctcgttttagatgttgtcacagcaatgggttctgtaatttaatacttaataaaggtatttctcatttttc

SEQ ID NO: 470 - protein, 211 aa, Mus musculus
MQSAMFLAVQHDCVPMDKSAGNGPKVEEKREKMKRTLLKDWKTRLSYFLQNSSAPGKPKTGKKSKQQTFIKPSPEEAQLWAEAFDELLASKYGLAAFRAFLKSEFCEENIEFWLACEDFKKTKSPQKLSSKARKIYTDFIEKEAPKEINIDFQTKSLIAQNIQEATSGCFTTAQKRVYSLMENNSYPRFLESEFYQDLCKKPQITTEPHAT

SEQ ID NO: 471 - DNA, 2205 bp, Mus musculus
gccctcctctctcagttgctcatctgggcggcggcggctgctgcaactgaggacagggcgggtggcgcatctcgagcgcggaggcaggaggagaagtcttattgttcctggagctgtcgcctttgcgggttcctcggcttggttcggccagcccggcctctgccagtcctgcccaacccccacaaccgcccgcggctctgaggagaagtggcccgcggcggcagtagctgcagcatcatcgccgaccatggaagacatagaccagtcgtcgctggtctcctcgtccgcggatagcccgccccggcccccgcccgctttcaagtaccagttcgtgacggagcccgaggacgaggaggacgaggaagacgaggaggaggaggaggacgacgaggacctggaggaattggaggtgctggagaggaagcccgcagccgggctgtccgcggctccggtgccccccgccgccgcaccgctgctggacttcagcagcgactcggtgccccccgcgccccgcgggccgctgccggccgcgccccccaccgcccctgagaggcagccgtcctgggaacgcagccccgcggcgtccgcgccatccctgccgcccgctgccgcagtcctgccctccaagctcccggaggacgacgagcctccagcgcggcctccggcgccagccggcgcgagccccctagcggagcccgccgcgcccccttccacgccggccgcgcccaagcgcaggggctcgggctcagtggttgttgacctcctgtactggagagacattaagaagactggagtggtgtttggtgccagcttattcctgctgctgtctctgacagtgttcagcattgtcagtgtaacggcctacattgccttggccctgctctctgtgactatcagctttaggatatataagggtgtgatccaagctatccagaaatcagatgaaggccacccattcagggcatatttggaatctgaagttgccatatcagaggaattggttcagaaatatagtaattctgctcttggtcatgtgaacagcacaataaaagaattgaggcgtctcttcttagttgatgatttagttgattccctgaagtttgcagtgttgatgtgggtatttacttacgttggtgccttgttcaatggtttgacactactgattttagctctgatctcactcttcagtattcctgttatatatgaacggcatcaggcgcagatagatcattatctaggacttgcaaacaagagcgttaaggatgccatggccaaaatccaagcaaaaatccctggattgaagcgcaaagcagaatgaaaaggccccaaacagtagacattcatctttaaaggggacactcccttggttacggggtgggcgggtcaggggtgagccctgggtggccgtgcagtttcagttatttttagcagtgcactgtttgaggaaaaattacctgtcttgacttcctgtgtttatcatcttaagtattgtaagctgctgtgtatggatctcattgtagtcatacttgttttccccagatgaggcacttggtgaataaaggatgctgggaaaactgtgtgttatattctgttgcaggtagtctggctgtatttggaaagttgcaaagaaggtagatttgggggcaggaaaaacaacccttttcacagtgtactgtgtttggttggtgtaaaactgatgcagatttttctgaaatgagatgtttagatgagcatactactaaagcagagtggaaaaatctgtctttatggtatgttctaggtgtattgtgatttactgttagattgccaatataagtaaatatagacataatctatatatagtgtttcacaaagcttagatctttaaccttgcagctgccccacagtgcttgacctctgagtcattggttatacagtgtagtcccaagcacataaactaggaagagaatgtatttgtaggagcgctaccacctgttttcaagagaacatagaactccaacgtaaccgtcatttcaaagatttactgtatgtatagttgattttgtggactgaatttaatgcttccaaatgtttgcagttaccaaacattgttatgcaagaaatcataaaatgaagacttataccattgtgtttaagctgtattgaattatctgtggaatgcattgtgaactgtaaagcaaagtatcaataaagcttatagactta

SEQ ID NO: 472 - protein, 438 aa, Mus musculus
PSSLSCSSGRRRLLQLRTGRVAHLERGGRRRSLIVPGAVAFAGSSAWFGQPGLCQSCPTPTTARGSEEKWPAAAVAAASSPTMEDIDQSSLVSSSADSPPRPPPAFKYQFVTEPEDEEDEEDEEEEEDDEDLEELEVLERKPAAGLSAAPVPPAAAPLLDFSSDSVPPAPRGPLPAAPPTAPERQPSWERSPAASAPSLPPAAAVLPSKLPEDDEPPARPPAPAGASPLAEPAAPPSTPAAPKRRGSGSVVVDLLYWRDIKKTGVVFGASLFLLLSLTVFSIVSVTAYIALALLSVTISFRIYKGVIQAIQKSDEGHPFRAYLESEVAISEELVQKYSNSALGHVNSTIKELRRLFLVDDLVDSLKFAVLMWVFTYVGALFNGLTLLILALISLFSIPVIYERHQAQIDHYLGLANKSVKDAMAKIQAKIPGLKRKAE

SEQ ID NO: 473 - DNA, 4618 bp, Mus musculus
cctctctcagttgctcatctgggcggcggcggctgctgcaactgaggacagggcgggtggcgcatctcgagcgcggaggcaggaggagaagtcttattgttcctggagctgtcgcctttgcgggttcctcggcttggttcggccagcccggcctctgccagtcctgcccaacccccacaaccgcccgcggctctgaggagaagtggcccgcggcggcagtagctgcagcatcatcgccgaccatggaagacatagaccagtcgtcgctggtctcctcgtccgcggatagcccgccccggcccccgcccgctttcaagtaccagttcgtgacggagcccgaggacgaggaggacgaggaagacgaggaggaggaggaggacgacgaggacctggaggaattggaggtgctggagaggaagcccgcagccgggctgtccgcggctccggtgccccccgccgccgcaccgctgctggacttcagcagcgactcggtgccccccgcgccccgcgggccgctgccggccgcgccccccaccgcccctgagaggcagccgtcctgggaacgcagccccgcggcgtccgcgccatccctgccgcccgctgccgcagtcctgccctccaagctcccggaggacgacgagcctccagcgcggcctccggcgccagccggcgcgagccccctagcggagcccgccgcgcccccttccacgccggccgcgcccaagcgcaggggctcgggctcagtggatgagaccctttttgctcttcctgctgcatctgagcctgtgataccctcctctgcagaaaaaattatggatttgaaggagcagccaggtaacactgtttcgtctggtcaagaggatttcccatctgtcctgtttgaaactgctgcctctcttccttctctatctcctctctcaactgtttcttttaaagaacacggataccttggtaacttatcagcagtggcatccacagaaggaactattgaagaaactttaaatgaagcttctagagaattgccagagagggcaacaaatccatttgtaaatagagagtcagcagagttttcagtattagaatactcagaaatgggatcatctttcaatggctccccaaaaggagagtcagccatgttagtagaaaacactaaggaagaagtaattgtgaggagtaaagacaaagaggatttagtttgtagtgcagcccttcataatccacaagagtcacctgcgacccttactaaagtggttaaagaagacggagttatgtctccagaaaagacaatggacatttttaatgaaatgaaaatgtcagtggtagcacctgtgagggaagagtatgcagattttaagccatttgaacaagcatgggaagtgaaagatacttatgagggaagtagggatgtgctggctgctagagctaatatggaaagtaaagtggacaaaaaatgctttgaagatagcctggagcaaaaaggtcatgggaaggatagtgaaagcagaaatgagaatgcttctttccccaggaccccagaacttgtgaaggacggctccagagcgtacatcacctgtgattcctttagctcagcaaccgagagtactgcagcaaacattttccctgtgctagaagatcacacttcagaaaacaaaacagatgaaaaaaaaatagaagaaaggaaggcccaaattataacagagaagactagccccaaaacgtcaaatcctttccttgtagcaatacatgattctgaggcagattatgtcacaacagataatttatcaaaggtgactgaggcagtagtggcaaccatgcctgaaggtctaacgccagatttagttcaggaagcatgtgaaagtgaactgaacgaagccacaggtacaaagattgcttatgaaacaaaagtggacttggtccagacatcagaagctatacaagagtcaatttaccccacagcacagctttgcccatcatttgaggaagctgaagcaactccgtcaccagttttgcctgatattgttatggaagcgccattaaattctctccttccaagcactggtgcttctgtagcgcagcccagtgcatccccactagaagtaccgtctccagttagttatgacggtataaagcttgagcctgaaaatcccccaccatatgaagaagccatgagtgtagcactaaaaacatcggactcaaaggaagaaattaaagagcctgaaagttttaatgcagctgctcaggaagcagaagctccttatatatccattgcatgtgatttaattaaagaaacaaagctctccactgagccaagtccagagttctctaattattcagaaatagcaaaatttgagaagtcggtgcctgatcactgtgagctcgtggatgattcctcacccgaatctgaaccagttgacttatttagtgatgattcaattcctgaagtcccacaaacacaagaggaggctgtgatgctaatgaaggagagtctcactgaagtgtctgagacagtaacacaacacaaacataaggagagacttagtgcttcacctcaggaggtaggaaagccatatttagagtcttttcagcccaatttacatattacaaaagatgctgcatctaatgaaattccaacattgaccaaaaaggagacaatttctttgcaaatggaagagtttaatactgcaatttattccaatgatgacttactttcttctaaggaagacaaaatgaaagaaagtgaaacattttccgattcatctcccattgagataatagatgagtttcccacatttgtcagtgctaaagatgattctcctaaggagtacactgacctagaagtatccaacaaaagtgaaattgctaatgtccagagcggggccaattcgttgccttgctcagaattgccctgtgacctttctttcaagaatacatatcctaaagatgaagcacatgtctcagatgaattctccaaaagtaggtccagtgtatctaaggtgcccttattgcttccaaatgtttctgctttggaatctcaaatagaaatgggcaacatagttaaacccaaagtacttacgaaagaagcagaggaaaaacttccttctgatacagagaaagaggacagatccctgacagctgtattgtcagcagagctgaataaaacttcagttgttgacctcctgtactggagagacattaagaagactggagtggtgtttggtgccagcttattcctgctgctgtctctgacagtgttcagcattgtcagtgtaacggcctacattgccttggccctgctctctgtgactatcagctttaggatatataagggtgtgatccaagctatccagaaatcagatgaaggccacccattcagggcatatttggaatctgaagttgccatatcagaggaattggttcagaaatatagtaattctgctcttggtcatgtgaacagcacaataaaagaattgaggcgtctcttcttagttgatgatttagttgattccctgaagtttgcagtgttgatgtgggtatttacttacgttggtgccttgttcaatggtttgacactactgattttagctctgatctcactcttcagtattcctgttatatatgaacggcatcaggcgcagatagatcattatctaggacttgcaaacaagagcgttaaggatgccatggccaaaatccaagcaaaaatccctggattgaagcgcaaagcagaatgaaaaggccccaaacagtagacattcatctttaaaggggacactcccttggttacggggtgggcgggtcaggggtgagccctgggtggccgtgcagtttcagttatttttagcagtgcactgtttgaggaaaaattacctgtcttgacttcctgtgtttatcatcttaagtattgtaagctgctgtgtatggatctcattgtagtcatacttgttttccccagatgaggcacttggtgaataaaggatgctgggaaaactgtgtgttatattctgttgcaggtagtctggctgtatttggaaagttgcaaagaaggtagatttgggggcaggaaaaacaacccttttcacagtgtactgtgtttggttggtgtaaaactgatgcagatttttctgaaatgagatgtttagatgagcatactactaaagcagagtggaaaaatctgtctttatggtatgttctaggtgtattgtgatttactgttagattgccaatataagtaaatatagacataatctatatatagtgtttcacaaagcttagatctttaaccttgcagctgccccacagtgcttgacctctgagtcattggttatacagtgtagtcccaagcacataaactaggaagagaatgtatttgtaggagcgctaccacctgttttcaagagaacatagaactccaacgtaaccgtcatttcaaagatttactgtatgtatagttgattttgtggactgaatttaatgcttccaaatgtttgcagttaccaaacattgttatgcaagaaatcataaaatgaagacttataccattgtgtttaagctgtattgaattatctgtggaatgcattgtgaactgtaaagcaaagtatcaataaagcttatagactta

SEQ ID NO: 474 - protein, 1162 aa, Mus musculus
MEDIDQSSLVSSSADSPPRPPPAFKYQFVTEPEDEEDEEDEEEEEDDEDLEELEVLERKPAAGLSAAPVPPAAAPLLDFSSDSVPPAPRGPLPAAPPTAPERQPSWERSPAASAPSLPPAAAVLPSKLPEDDEPPARPPAPAGASPLAEPAAPPSTPAAPKRRGSGSVDETLFALPAASEPVIPSSAEKIMDLKEQPGNTVSSGQEDFPSVLFETAASLPSLSPLSTVSFKEHGYLGNLSAVASTEGTIEETLNEASRELPERATNPFVNRESAEFSVLEYSEMGSSFNGSPKGESAMLVENTKEEVIVRSKDKEDLVCSAALHNPQESPATLTKVVKEDGVMSPEKTMDIFNEMKMSVVAPVREEYADFKPFEQAWEVKDTYEGSRDVLAARANMESKVDKKCFEDSLEQKGHGKDSESRNENASFPRTPELVKDGSRAYITCDSFSSATESTAANIFPVLEDHTSENKTDEKKIEERKAQIITEKTSPKTSNPFLVAIHDSEADYVTTDNLSKVTEAVVATMPEGLTPDLVQEACESELNEATGTKIAYETKVDLVQTSEAIQESIYPTAQLCPSFEEAEATPSPVLPDIVMEAPLNSLLPSTGASVAQPSASPLEVPSPVSYDGIKLEPENPPPYEEAMSVALKTSDSKEEIKEPESFNAAAQEAEAPYISIACDLIKETKLSTEPSPEFSNYSEIAKFEKSVPDHCELVDDSSPESEPVDLFSDDSIPEVPQTQEEAVMLMKESLTEVSETVTQHKHKERLSASPQEVGKPYLESFQPNLHITKDAASNEIPTLTKKETISLQMEEFNTAIYSNDDLLSSKEDKMKESETFSDSSPIEIIDEFPTFVSAKDDSPKEYTDLEVSNKSEIANVQSGANSLPCSELPCDLSFKNTYPKDEAHVSDEFSKSRSSVSKVPLLLPNVSALESQIEMGNIVKPKVLTKEAEEKLPSDTEKEDRSLTAVLSAELNKTSVVDLLYWRDIKKTGVVFGASLFLLLSLTVFSIVSVTAYIALALLSVTISFRIYKGVIQAIQKSDEGHPFRAYLESEVAISEELVQKYSNSALGHVNSTIKELRRLFLVDDLVDSLKFAVLMWVFTYVGALFNGLTLLILALISLFSIPVIYERHQAQIDHYLGLANKSVKDAMAKIQAKIPGLKRKAE

SEQ ID NO: 475 - DNA, 2257 bp, Mus musculus
cctctctcagttgctcatctgggcggcggcggctgctgcaactgaggacagggcgggtggcgcatctcgagcgcggaggcaggaggagaagtcttattgttcctggagctgtcgcctttgcgggttcctcggcttggttcggccagcccggcctctgccagtcctgcccaacccccacaaccgcccgcggctctgaggagaagtggcccgcggcggcagtagctgcagcatcatcgccgaccatggaagacatagaccagtcgtcgctggtctcctcgtccgcggatagcccgccccggcccccgcccgctttcaagtaccagttcgtgacggagcccgaggacgaggaggacgaggaagacgaggaggaggaggaggacgacgaggacctggaggaattggaggtgctggagaggaagcccgcagccgggctgtccgcggctccggtgccccccgccgccgcaccgctgctggacttcagcagcgactcggtgccccccgcgccccgcgggccgctgccggccgcgccccccaccgcccctgagaggcagccgtcctgggaacgcagccccgcggcgtccgcgccatccctgccgcccgctgccgcagtcctgccctccaagctcccggaggacgacgagcctccagcgcggcctccggcgccagccggcgcgagccccctagcggagcccgccgcgcccccttccacgccggccgcgcccaagcgcaggggctcgggctcagtggatgagaccctttttgctcttcctgctgcatctgagcctgtgataccctcctctgcagttgttgacctcctgtactggagagacattaagaagactggagtggtgtttggtgccagcttattcctgctgctgtctctgacagtgttcagcattgtcagtgtaacggcctacattgccttggccctgctctctgtgactatcagctttaggatatataagggtgtgatccaagctatccagaaatcagatgaaggccacccattcagggcatatttggaatctgaagttgccatatcagaggaattggttcagaaatatagtaattctgctcttggtcatgtgaacagcacaataaaagaattgaggcgtctcttcttagttgatgatttagttgattccctgaagtttgcagtgttgatgtgggtatttacttacgttggtgccttgttcaatggtttgacactactgattttagctctgatctcactcttcagtattcctgttatatatgaacggcatcaggcgcagatagatcattatctaggacttgcaaacaagagcgttaaggatgccatggccaaaatccaagcaaaaatccctggattgaagcgcaaagcagaatgaaaaggccccaaacagtagacattcatctttaaaggggacactcccttggttacggggtgggcgggtcaggggtgagccctgggtggccgtgcagtttcagttatttttagcagtgcactgtttgaggaaaaattacctgtcttgacttcctgtgtttatcatcttaagtattgtaagctgctgtgtatggatctcattgtagtcatacttgttttccccagatgaggcacttggtgaataaaggatgctgggaaaactgtgtgttatattctgttgcaggtagtctggctgtatttggaaagttgcaaagaaggtagatttgggggcaggaaaaacaacccttttcacagtgtactgtgtttggttggtgtaaaactgatgcagatttttctgaaatgagatgtttagatgagcatactactaaagcagagtggaaaaatctgtctttatggtatgttctaggtgtattgtgatttactgttagattgccaatataagtaaatatagacataatctatatatagtgtttcacaaagcttagatctttaaccttgcagctgccccacagtgcttgacctctgagtcattggttatacagtgtagtcccaagcacataaactaggaagagaatgtatttgtaggagcgctaccacctgttttcaagagaacatagaactccaacgtaaccgtcatttcaaagatttactgtatgtatagttgattttgtggactgaatttaatgcttccaaatgtttgcagttaccaaacattgttatgcaagaaatcataaaatgaagacttataccattgtgtttaagctgtattgaattatctgtggaatgcattgtgaactgtaaagcaaagtatcaataaagcttatagactta

SEQ ID NO: 476 - protein, 375 aa, Mus musculus
MEDIDQSSLVSSSADSPPRPPPAFKYQFVTEPEDEEDEEDEEEEEDDEDLEELEVLERKPAAGLSAAPVPPAAAPLLDFSSDSVPPAPRGPLPAAPPTAPERQPSWERSPAASAPSLPPAAAVLPSKLPEDDEPPARPPAPAGASPLAEPAAPPSTPAAPKRRGSGSVDETLFALPAASEPVIPSSAVVDLLYWRDIKKTGVVFGASLFLLLSLTVFSIVSVTAYIALALLSVTISFRIYKGVIQAIQKSDEGHPFRAYLESEVAISEELVQKYSNSALGHVNSTIKELRRLFLVDDLVDSLKFAVLMWVFTYVGALFNGLTLLILALISLFSIPVIYERHQAQIDHYLGLANKSVKDAMAKIQAKIPGLKRKAE

SEQ ID NO: 477 - DNA, 4060 bp, Mus musculus
accctagggctttgtctacgagtggcagggtgatggcgcccccgctggcgggaggcgggcagaagggtggggcggcctcggaagcctgggtgccttcattgtttgtcggggtttcggggagcacgtgcaccgctgccaagtcgctggttcccattccagcacgaagttctcgcctatcagcagctaggaatgagaccctttttgctcttcctgctgcatctgagcctgtgataccctcctctgcagaaaaaattatggatttgaaggagcagccaggtaacactgtttcgtctggtcaagaggatttcccatctgtcctgtttgaaactgctgcctctcttccttctctatctcctctctcaactgtttcttttaaagaacacggataccttggtaacttatcagcagtggcatccacagaaggaactattgaagaaactttaaatgaagcttctagagaattgccagagagggcaacaaatccatttgtaaatagagagtcagcagagttttcagtattagaatactcagaaatgggatcatctttcaatggctccccaaaaggagagtcagccatgttagtagaaaacactaaggaagaagtaattgtgaggagtaaagacaaagaggatttagtttgtagtgcagcccttcataatccacaagagtcacctgcgacccttactaaagtggttaaagaagacggagttatgtctccagaaaagacaatggacatttttaatgaaatgaaaatgtcagtggtagcacctgtgagggaagagtatgcagattttaagccatttgaacaagcatgggaagtgaaagatacttatgagggaagtagggatgtgctggctgctagagctaatatggaaagtaaagtggacaaaaaatgctttgaagatagcctggagcaaaaaggtcatgggaaggatagtgaaagcagaaatgagaatgcttctttccccaggaccccagaacttgtgaaggacggctccagagcgtacatcacctgtgattcctttagctcagcaaccgagagtactgcagcaaacattttccctgtgctagaagatcacacttcagaaaacaaaacagatgaaaaaaaaatagaagaaaggaaggcccaaattataacagagaagactagccccaaaacgtcaaatcctttccttgtagcaatacatgattctgaggcagattatgtcacaacagataatttatcaaaggtgactgaggcagtagtggcaaccatgcctgaaggtctaacgccagatttagttcaggaagcatgtgaaagtgaactgaacgaagccacaggtacaaagattgcttatgaaacaaaagtggacttggtccagacatcagaagctatacaagagtcaatttaccccacagcacagctttgcccatcatttgaggaagctgaagcaactccgtcaccagttttgcctgatattgttatggaagcgccattaaattctctccttccaagcactggtgcttctgtagcgcagcccagtgcatccccactagaagtaccgtctccagttagttatgacggtataaagcttgagcctgaaaatcccccaccatatgaagaagccatgagtgtagcactaaaaacatcggactcaaaggaagaaattaaagagcctgaaagttttaatgcagctgctcaggaagcagaagctccttatatatccattgcatgtgatttaattaaagaaacaaagctctccactgagccaagtccagagttctctaattattcagaaatagcaaaatttgagaagtcggtgcctgatcactgtgagctcgtggatgattcctcacccgaatctgaaccagttgacttatttagtgatgattcaattcctgaagtcccacaaacacaagaggaggctgtgatgctaatgaaggagagtctcactgaagtgtctgagacagtaacacaacacaaacataaggagagacttagtgcttcacctcaggaggtaggaaagccatatttagagtcttttcagcccaatttacatattacaaaagatgctgcatctaatgaaattccaacattgaccaaaaaggagacaatttctttgcaaatggaagagtttaatactgcaatttattccaatgatgacttactttcttctaaggaagacaaaatgaaagaaagtgaaacattttccgattcatctcccattgagataatagatgagtttcccacatttgtcagtgctaaagatgattctcctaaggagtacactgacctagaagtatccaacaaaagtgaaattgctaatgtccagagcggggccaattcgttgccttgctcagaattgccctgtgacctttctttcaagaatacatatcctaaagatgaagcacatgtctcagatgaattctccaaaagtaggtccagtgtatctaaggtgcccttattgcttccaaatgtttctgctttggaatctcaaatagaaatgggcaacatagttaaacccaaagtacttacgaaagaagcagaggaaaaacttccttctgatacagagaaagaggacagatccctgacagctgtattgtcagcagagctgaataaaacttcagttgttgacctcctgtactggagagacattaagaagactggagtggtgtttggtgccagcttattcctgctgctgtctctgacagtgttcagcattgtcagtgtaacggcctacattgccttggccctgctctctgtgactatcagctttaggatatataagggtgtgatccaagctatccagaaatcagatgaaggccacccattcagggcatatttggaatctgaagttgccatatcagaggaattggttcagaaatatagtaattctgctcttggtcatgtgaacagcacaataaaagaattgaggcgtctcttcttagttgatgatttagttgattccctgaagtttgcagtgttgatgtgggtatttacttacgttggtgccttgttcaatggtttgacactactgattttagctctgatctcactcttcagtattcctgttatatatgaacggcatcaggcgcagatagatcattatctaggacttgcaaacaagagcgttaaggatgccatggccaaaatccaagcaaaaatccctggattgaagcgcaaagcagaatgaaaaggccccaaacagtagacattcatctttaaaggggacactcccttggttacggggtgggcgggtcaggggtgagccctgggtggccgtgcagtttcagttatttttagcagtgcactgtttgaggaaaaattacctgtcttgacttcctgtgtttatcatcttaagtattgtaagctgctgtgtatggatctcattgtagtcatacttgttttccccagatgaggcacttggtgaataaaggatgctgggaaaactgtgtgttatattctgttgcaggtagtctggctgtatttggaaagttgcaaagaaggtagatttgggggcaggaaaaacaacccttttcacagtgtactgtgtttggttggtgtaaaactgatgcagatttttctgaaatgagatgtttagatgagcatactactaaagcagagtggaaaaatctgtctttatggtatgttctaggtgtattgtgatttactgttagattgccaatataagtaaatatagacataatctatatatagtgtttcacaaagcttagatctttaaccttgcagctgccccacagtgcttgacctctgagtcattggttatacagtgtagtcccaagcacataaactaggaagagaatgtatttgtaggagcgctaccacctgttttcaagagaacatagaactccaacgtaaccgtcatttcaaagatttactgtatgtatagttgattttgtggactgaatttaatgcttccaaatgtttgcagttaccaaacattgttatgcaagaaatcataaaatgaagacttataccattgtgtttaagctgtattgaattatctgtggaatgcattgtgaactgtaaagcaaagtatcaataaagcttatagactta

SEQ ID NO: 478 - protein, 1046 aa, Mus musculus
MAPPLAGGGQKGGAASEAWVPSLFVGVSGSTCTAAKSLVPIPARSSRLSAARNETLFALPAASEPVIPSSAEKIMDLKEQPGNTVSSGQEDFPSVLFETAASLPSLSPLSTVSFKEHGYLGNLSAVASTEGTIEETLNEASRELPERATNPFVNRESAEFSVLEYSEMGSSFNGSPKGESAMLVENTKEEVIVRSKDKEDLVCSAALHNPQESPATLTKVVKEDGVMSPEKTMDIFNEMKMSVVAPVREEYADFKPFEQAWEVKDTYEGSRDVLAARANMESKVDKKCFEDSLEQKGHGKDSESRNENASFPRTPELVKDGSRAYITCDSFSSATESTAANIFPVLEDHTSENKTDEKKIEERKAQIITEKTSPKTSNPFLVAIHDSEADYVTTDNLSKVTEAVVATMPEGLTPDLVQEACESELNEATGTKIAYETKVDLVQTSEAIQESIYPTAQLCPSFEEAEATPSPVLPDIVMEAPLNSLLPSTGASVAQPSASPLEVPSPVSYDGIKLEPENPPPYEEAMSVALKTSDSKEEIKEPESFNAAAQEAEAPYISIACDLIKETKLSTEPSPEFSNYSEIAKFEKSVPDHCELVDDSSPESEPVDLFSDDSIPEVPQTQEEAVMLMKESLTEVSETVTQHKHKERLSASPQEVGKPYLESFQPNLHITKDAASNEIPTLTKKETISLQMEEFNTAIYSNDDLLSSKEDKMKESETFSDSSPIEIIDEFPTFVSAKDDSPKEYTDLEVSNKSEIANVQSGANSLPCSELPCDLSFKNTYPKDEAHVSDEFSKSRSSVSKVPLLLPNVSALESQIEMGNIVKPKVLTKEAEEKLPSDTEKEDRSLTAVLSAELNKTSVVDLLYWRDIKKTGVVFGASLFLLLSLTVFSIVSVTAYIALALLSVTISFRIYKGVIQAIQKSDEGHPFRAYLESEVAISEELVQKYSNSALGHVNSTIKELRRLFLVDDLVDSLKFAVLMWVFTYVGALFNGLTLLILALISLFSIPVIYERHQAQIDHYLGLANKSVKDAMAKIQAKIPGLKRKAE

SEQ ID NO: 479 - DNA, 3583 bp, Mus musculus
ggggcgcagctagctcctggagcagcacggccgcggcggcgcaaagttagcccggcgccccgggacgagcgccgcagtctgggccatgggcgagcaccccagccccggccccgcagtggccgcctgcgcggaggctgagcgcatcgaggagctggagcccgaggccgaggagcgactgcccgccgcgccagaagaccactggaaagtcctgtttgaaaagtttgaccctggaagcaccggctacatcagcacaggaaagttccggagcctcctggagagccacagctctaagctggacccacacaaaaaggaggtgctcctggctctcgcagacagccatgcagatgggcagatctgctaccaggactttgtcaacctgatgagcaacaaacgttccaacagcttccgccaggccatccttcagggaaaccgcaggctgagcagcaaggccctgctggaggagaaggggctgagcctctctcagcggctcatccgccacgtggcctacgagactctgccccgggagattgaccgcaagtggtactatgacagctacacctgctgccctccgccctggttcatgatcacaatcacgctgctggaggcaaggaccagggttgcccttttcctgtacaacggggtcctactagatcagtttgtgctgcaggtgacgcaccctcgatacctgaagaactctctggtttaccacccgcagctccgtgcgcaggcttggcgctatgtgacgtacatcttcatgcatgcaggggtggaacagctgggactcaatgtggcactgcagctgctggtaggggtacccctggagatggtgcatggagccacccgaattgggcttgtctacgtggccggtgttgtggcaggctccttggcggtgtctgtggctgacatgactgcacctgttgtgggctcttccggaggggtgtatgcgctcgtctctgcccacctagccaacattgtcatgaactggtcaggcatgaagtgccagttcaagctgctgcggatggctgtggccttgatctgtatgagtatggagttcggaagggctgtatggctccgtttccacccatcggcttatcccccgtgcccccacccaagctttgtggcacacttgggtggcgtggccgtgggcatcaccctgggcgtggtggttctcagaaattacgagcagaggctgcaggaccagtcgctgtggtggatctttgtgaccatgtacaccatcttcgtgctgtttgctgtcttctggaacatctttgcctacacactgctggacttgaagctgccacccgccccctaagggaccagaggtccaaggcagggcggggaaacagaagcatcccgagaaagtacctgcatctgcttctcatctccaattcagtgaaagcagggagaaccggagactgttggagctggggggtgcgtgttgctttgaaaggatggtggggagatggatgtggctgctgtcatctttctaggctggtctgatgatatggagtcatgggtaaggtctgaggcagggtaagagtggctgtccctgtggcttgggcttgtcccatgcattccctctcactgccacagagtgagcaaatagccctcttccctagtctccacctggagagacacagagaagttctgaggatagccacagccaggcttgccacggcccagaggtgactgtaggctaggccacattctctttgcagctcaaggtctggtgctctggcaatggatgtgatggctttgatccgggggagcccagagcaagccaggctccagtcctgtcagtggtgctatggcattgctcctagggctgggcagggagatgctataagctccaggcctttttcttgccctaggggagggccctgtgctgaggtaatgactttcttcatcccaggttcccccaagagagttccaggacggtttcttcttcctgcctgtagtcacgagtcagcattccagaccatcgctctgcatccatgccctatctggactgtggggtctcttctttcctttctactgccctgaccctactttgtgcctctctctttgggtgtggagacagggttttgtgtgtgtgtgtgtgtgtgtgtgtgtgtgtgtgtgtgtgtgtgcaatgtcaggcaagtcagaagctgcagagggaagaagtgggagacaatgtacacaagaggatatctacaggggatttctggaatgggtagcagcagtgtgctctccagtgctcgctcagtggccttgcctttagcatcatgcaccccctttcccatcttgccctcccaaacacctgctgagcaccactgactggtggaaaaactgtcgagctagagggaagaccaaagcactaccagacatttgagagaaaactctcagctgtattcttctggttctcttgggggtagcttttgtgtctgtactgccgcctgtagaaggaagtctttgggatgaaagaaagcccaggacagtgatactgtggccatctctccatgtgaattagtgggacaagaagctgtagtaaaatatattttggtggaaaacgtagcctctgagaagaattggggaagcttgggtgagggaatgtccccagtgagagcagctgagggttagatggctccatctacagggacttggaagtactcttacagggaagtgagattggggggcgtggccttgtgctgtccataccccagcagcctgggatgccacatcaggtgtttggcaaggtaactgtagactcagagcccagtgcctctgctcctctgagacagtctactcaggctggcacgagacgcttctggggaccctaagtggaggctgtgaggcaggtgacctttatagggactttcagcccctgggataaggaaccacaggtctgagattggagggaggcaggaggatgagaactgctcctggtcctctcaccatcccagcaatacctcccagctcatctccattctcctgagtccctcagcccttcctctctccaatgtggccacccatcagggctgggagtcactcctcatgctggaggctgtaggttggcctcaaaggctggggaatccccaaacagcagctatgtagactagcttgcatttaaaggggagaagactcatggaaaccagacaagggaaaacgggctttcaaaaaaagaggaatttctctttaatgataccattcatcacttgatttttttttttttaattaggagaagctccctaaccgggctctttaaattctgcatttccatgtgaaccattcttgcctagagcattagtggaggcatcgctcaccgaacccagatcttcctctagtgtccaattcagtttgcagataatgaggtttacccagtgctgtgtgcttcccagggctggctgcaaatcgttgactctcctctgccttaaaaacagtgcccgtcagtgagctgccctcccaggactaagtgaaaatcaaaacactagccgcgacgttggtttctagatatttttgtattgtgtacattctgtatatttttgttgtaacatattatttgagcacagattccattaaagatttttttaagctgttggtt

SEQ ID NO: 480 - protein, 408 aa, Mus musculus
MGEHPSPGPAVAACAEAERIEELEPEAEERLPAAPEDHWKVLFEKFDPGSTGYISTGKFRSLLESHSSKLDPHKKEVLLALADSHADGQICYQDFVNLMSNKRSNSFRQAILQGNRRLSSKALLEEKGLSLSQRLIRHVAYETLPREIDRKWYYDSYTCCPPPWFMITITLLEARTRVALFLYNGVLLDQFVLQVTHPRYLKNSLVYHPQLRAQAWRYVTYIFMHAGVEQLGLNVALQLLVGVPLEMVHGATRIGLVYVAGVVAGSLAVSVADMTAPVVGSSGGVYALVSAHLANIVMNWSGMKCQFKLLRMAVALICMSMEFGRAVWLRFHPSAYPPCPHPSFVAHLGGVAVGITLGVVVLRNYEQRLQDQSLWWIFVTMYTIFVLFAVFWNIFAYTLLDLKLPPAP

SEQ ID NO: 481 - DNA, 1932 bp, Mus musculus
atgatccttgaggagaggccagatggccagggcactggcgaggaaagctctcggccgcaggacgacggcagcatccgcaagggctatggctcctttgtgcaaaaccagcctggccagctgcagagtcacagggctcggctccaccagcagatcagcaaggagctccggatgcggaccggtgctgaaaacctctacagagccaccagcaacacctgggtccgagaaacagtcgcactggagctgagctacgtcaactccaacctgcagctgctgaaagaggagctggcagagctgagcaccagcgtagatgtggaccagccagagggcgaagggattactattcccatgatccccctggggctgaaggaaaccaaggagttggactgggccacaccgctgaaggagctgatctctgagcactttggagaggatggtacctcctttgagacagagatccaggaactagaagacctacggcaggccacgaggactcccagcagggacgaggcgggcctggatctgctcgcagcctactatagccagctctgtttcctggacgcacgtttcttcagtccctccaggagccccgggctgctcttccactggtacgactcgctcacgggggtcccggcacagcagcgggctctggccttcgagaagggcagtgtactgtttaacattggggcactccacacgcagattggagcacggcaggattgctcctgcaccgagggcaccaaccacgctgctgaggctttccagagggctgctggggccttcagactcctgagggagaacttctcccacgcgccaagcccagacatgagtgctgcctctctctccatgctggagcagctcatgattgcccaggcacaggaatgcatcttcaagggccttttactgccagcctctgccacacctgacatctgtccagatcaactgcagctggcccaggaagctgcccaggtggcaactgaatatgggcttgtgcaccgggccatggcccagccacctgtccgagactacctgcctgcctcctggactaacctggcgcacgtcaaggctgagcacttctgcgccctggcccactatcatgcagccatggccctctgcgaaagccacccagccaagggtgaactcgcaaggcaggagcacgtcttccagccctccactccccatgagcccctgggccccacactgccgcagcacccagaagaccgcaggaagcttgccaaggcccacctgaagcgtgccatcctgggccaggaggaggcgctgcggcttcacaccttgtgcagagtcctgcgcaaggtggacctgctgcaggttgtggtgactcaggcactgcggcgctccctggccaagtactcacagctcgagcgcgaggatgacttcttcgaggctacggaggccccagacatccaacccaagactcaccagaccccagagggacccttgtctgtgttttcaaccaagaaccgatggcagttggtagggccggtgcacatgactcgaggagagggaagcttcgggttcacgctgcgcggagactctccagtcctcatcgctgctgtcgtccctgggggtcaggctgagtccgctggcctgaaggagggcgactacatcgtgtccgtgaacgggcagccgtgcaagtggtggaagcacctggaggtggtgacacagctgaggagcatgggcgaggaaggcgtgagcctgcaggtcgtgtcattgctgcccagccctgagccacgtggcacaggaccccgacgggcagcactgctgtggaaccagagagagtgtggttttgagacaccgatgcccacacgtacccgcccctggcccatccttggctggagccgcaagaataaacaaggcaagactggaagccaccctgacccctgcaccaacaggaactgtgtcacctgcccctga

SEQ ID NO: 482 - protein, 643 aa, Mus musculus
MILEERPDGQGTGEESSRPQDDGSIRKGYGSFVQNQPGQLQSHRARLHQQISKELRMRTGAENLYRATSNTWVRETVALELSYVNSNLQLLKEELAELSTSVDVDQPEGEGITIPMIPLGLKETKELDWATPLKELISEHFGEDGTSFETEIQELEDLRQATRTPSRDEAGLDLLAAYYSQLCFLDARFFSPSRSPGLLFHWYDSLTGVPAQQRALAFEKGSVLFNIGALHTQIGARQDCSCTEGTNHAAEAFQRAAGAFRLLRENFSHAPSPDMSAASLSMLEQLMIAQAQECIFKGLLLPASATPDICPDQLQLAQEAAQVATEYGLVHRAMAQPPVRDYLPASWTNLAHVKAEHFCALAHYHAAMALCESHPAKGELARQEHVFQPSTPHEPLGPTLPQHPEDRRKLAKAHLKRAILGQEEALRLHTLCRVLRKVDLLQVVVTQALRRSLAKYSQLEREDDFFEATEAPDIQPKTHQTPEGPLSVFSTKNRWQLVGPVHMTRGEGSFGFTLRGDSPVLIAAVVPGGQAESAGLKEGDYIVSVNGQPCKWWKHLEVVTQLRSMGEEGVSLQVVSLLPSPEPRGTGPRRAALLWNQRECGFETPMPTRTRPWPILGWSRKNKQGKTGSHPDPCTNRNCVTCP

SEQ ID NO: 483 - DNA, 899 bp, Mus musculus
tctccatcatggtgcggaagcttaagttccacgagcagaagctgctgaaacaggtggacttcctaaactgggaagtcaccgaccacaacctccacgaactgcgtgtgctgcggcggtaccggctgcagcggcgcgaggagtacacgcgctacaaccagctgagccgagcggtgcgcgagctggcgcggcgcctgcgcgacctgccggaacgcgacccattccgcgtgcgcgcctcggcggcgctgttggacaagctgtacgctatgggcctggtgcccacgcgcggctcactggaactctgcgactccgtctcggcctcgtccttctgccgccgccgcttgcctactttgctcctcaagctacgcatggcgcagcatctccaagctgctgtggcttttgtggagcagggtcatgtccgcgtgggcccagacgtggtcactgatcccgcctttctcgtcactcgcagcatggaggactttgtcacctgggtggactcatccaagatcaagcggcacgtgttggagtacaatgaggagcgcgatgactttgatctagatgcctagcgagtcttcttgtcctggcttctcagctacaggtcactgaaccggggatggggaggattgccccggtgtactgggaatttttcctagaatttggactgacaattaagtgactgtgtcttgagagacagtgggaagcagttttgtaccgcactggggattgctagcttcttgtgccttaaactttgtggtgtagaagcaggaatgttacctcttcccctttgctttcatcttgaaataggaccgtctggatggagagtttgagttcagtatatttatatcgtttaaagaaaccctttcctaatgccaataaatgtcccaccgacgttgtttaagtgc

SEQ ID NO: 484 - protein, 184 aa, Mus musculus
MVRKLKFHEQKLLKQVDFLNWEVTDHNLHELRVLRRYRLQRREEYTRYNQLSRAVRELARRLRDLPERDPFRVRASAALLDKLYAMGLVPTRGSLELCDSVSASSFCRRRLPTLLLKLRMAQHLQAAVAFVEQGHVRVGPDVVTDPAFLVTRSMEDFVTWVDSSKIKRHVLEYNEERDDFDLDA

SEQ ID NO: 485 - DNA, 3506 bp, Mus musculus
aataaacagccctccccaagctgggagcccaggccgtccccttccccgcacggctggcgagtggtgagggagcgcgggactgaaggaccaagggaccgagggatcggcgcacgcgcgtgcgagtgagagagcgagcgagcggccggcgcgaagccggagcagaagccggagccggggccgaagccgaagccggagccataacctgagtcggagcggtagtgaagccgaagccgaagccgggctccggaccgacgcgcacgcacacacgcacgcggggggcggggccggcgcgcgcccgcctgtcgcgactgtcggcaccgaggcccagggggaggtggcctgtcgcgggtcgcccggctcccggtggcgaagggggcgcgggcggatggcggaaggcggccaggcgcagcagcagccgcctcagctcgggcccggcgctgccgcccggggcatgaagcgggagtcggaggtggagttgccggtgcccggagcgggggcagacggacccgagcccggcctgagcaagcggccacgcacagaggaggcggccgacggcgggatgcagaacgagccactgaccccgggttatcatggattcccagcaagggatggccagggtaaccaggagccaacaacaactcctgacgcaatggttcagccttttactaccatcccgttcccaccacctccacaaaatggaattcccacagaatatggagtgccacacactcaggactatgccggccagaccagtgaacataacctgaccctctacgggagtacgcagcctcatggagaacagagtagcaattcacccagcaaccagaatggatctctcacgcagacagaaggtggagcacagacagacggacaacagtcacagacacaaagtagtgaaaattcagagagtaaatctacgcccaagcgactacatgtctctaatattcccttccgcttccgagaccctgacctccggcagatgtttgggcagtttggcaaaatcctagatgtggaaataatctttaatgagcgcggctccaagggattcgggttcgtaactttcgagaatagtgctgatgcagacagggccagggagaaattgcacggcaccgtggtagagggccgtaaaatcgaggtgaataatgcaacagcacgggtcatgaccaacaagaagatggtcacgccatatgcaaatggctggaagttaagcccagtagttggagctgtgtatggtcctgagttatatgcagcatccagctttcaagctgatgtgtccctaggcaatgaggcggctgtgcccttgtcaggaagaggaggcatcaacacttacatccctctaatcattcctggcttcccttacccaactgcagccaccacggcagctgctttccgaggagcccatctgaggggcagagggcggacagtgtatggtgcagtccgagcggtacctccaacagccatccccgcctatccaggggtggatatgcagcctacagatatgcacagcctgctactgcaaccgcagccacagctgctgcagccgctgcagccgcttacagcgacggttacggcagggtgtacacagctgacccctaccatgccctcgcccctgccgccagctatggagttggcgctgtggcgagtttgtaccgaggtggctacagccgatttgccccctactgaagtgacgtgagacccctgcaaatgggacagcccccagttcatgaggcctggctattgcaatatttactagtagaggactctatagcaagatgaagaggaaaacaaacaaaaaagagagaatacttttttatacctcactatgttctttgaatatgtattttttcctttaaatttctgcctttaattcttttgttccaaagattgtgctttttttgttttgttttgttttttttgaatttttgtttttgtttggaggggggttggttttttgggggttttttgttttgttttttgtttgggaatttttttgttgtttttatttttgctttttttaaaactgtggttaaaaaaaaaaaaagatagtgcatttccacgtctgtatgtccacacttagcttattctgttggtcacagaggagacagtcgaggaggaaggagctgatacatgtatttgatcagaagccagcagacagaattaccaaagtggatctggtgctgatggctggggggataagcagagtggaggccagctctgcagcagtgtgccctcctggcctggctgtggctggaggctctgactggctgtggctggaatccacatgcctttaggtaggagtttgtgcttgcaaaacaggagaatttaaaagattcttttctctcctcttccctcctgccttcatattctttttacaatcatttacaggcacagcctgagagtgtttggcatggtttttggagttacagtgctggtatttccaagcacgctctcagactgtggatgagaaacacctcagtacaacagtgatcttggagtgagctccagaataggaaaacacttgtttcttttcttttcagaaacctcagcattcctgctgggctgctgcccctttaattgagccactgtgcaactcctctgttcttttattaacatgctgctcccatgtcctcaagattcagggatttgggatccaggaaccgaagaatgaatagtcagtggccagatttccccccaggtatctgggcacagtatgaggattaaaagtacaaattgttcagagccattaaagagtgtgtagaagagaaaaggggggtgttcaatcgatatcccttcgttttcttgcagcacgaagtcagtacagagtaagaaaggcatcagaaagcctctgctggggcagggtaaggaaccaagcccctaggctggctgtcctaccagtgtactgatgaggaccagtaagggcaggcagaggcagtttgtcctcactccaaagccataggaatttccatcttccagagcctctgtgagtctccagcccttgtggtcactgcatccagcttcacagtgtcctctagagtcacagccaagcacctggacccctcggggaacgttaagaagacaggccgtggactttaagccttttaaccttggaaggaggatgtaaaatggcaagggtccttctgcaggggccatggcagtgaaacctggcttcagatttgtttccaaaggacttctttctcccccaaatctgagatgtatccgaaaggcaagggtcccacagaggctccaaaatgaaggcattaggaaatgggaatgtcagctggctccctggtcagttcacctgagggattgctgctaaagggagtagttcagagacatgagctttggttttgtcagggtctgttttagggttattttattggggtttggttcttctgttgttgttgtcgttgttgttgttgttgttgttgttgttgcctctgcctctacacatttttgactgataaatgattcatgtccctgaattaaagtggctgacctttgactgc

SEQ ID NO: 486 - protein, 435 aa, Mus musculus
MAEGGQAQQQPPQLGPGAAARGMKRESEVELPVPGAGADGPEPGLSKRPRTEEAADGGMQNEPLTPGYHGFPARDGQGNQEPTTTPDAMVQPFTTIPFPPPPQNGIPTEYGVPHTQDYAGQTSEHNLTLYGSTQPHGEQSSNSPSNQNGSLTQTEGGAQTDGQQSQTQSSENSESKSTPKRLHVSNIPFRFRDPDLRQMFGQFGKILDVEIIFNERGSKGFGFVTFENSADADRAREKLHGTVVEGRKIEVNNATARVMTNKKMVTPYANGWKLSPVVGAVYGPELYAASSFQADVSLGNEAAVPLSGRGGINTYIPLIIPGFPYPTAATTAAAFRGAHLRGRGRTVYGAVRAVPPTAIPAYPGVDMQPTDMHSLLLQPQPQLLQPLQPLTATVTAGCTQLTPTMPSPLPPAMELALWRVCTEVATADLPPTEVT

SEQ ID NO: 487 - DNA, 1745 bp, Mus musculus
cccagggggaggtggcctgtcgcgggtcgcccggctcccggtggcgaagggggcgcgggcggatggcggaaggcggccaggcgcagcagcagccgcctcagctcgggcccggcgctgccgcccggggcatgaagcgggagtcggaggtggagttgccggtgcccggagcgggggcagacggacccgagcccggcctgagcaagcggccacgcacagaggaggcggccgacggcgggatgcagaacgagccactgaccccgggttatcatggattcccagcaagggatggccagggtaaccaggagccaacaacaactcctgacgcaatggttcagccttttactaccatcccgttcccaccacctccacaaaatggaattcccacagaatatggagtgccacacactcaggactatgccggccagaccagtgaacataacctgaccctctacgggagtacgcagcctcatggagaacagagtagcaattcacccagcaaccagaatggatctctcacgcagacagaaggtggagcacagacagacggacaacagtcacagacacaaagtagtgaaaattcagagagtaaatctacgcccaagcgactacatgtctctaatattcccttccgcttccgagaccctgacctccggcagatgtttgggcagtttggcaaaatcctagatgtggaaataatctttaatgagcgcggctccaagggattcgggttcgtaactttcgagaatagtgctgatgcagacagggccagggagaaattgcacggcaccgtggtagagggccgtaaaatcgaggtgaataatgcaacagcacgggtcatgaccaacaagaagatggtcacgccatatgcaaatggctggaagttaagcccagtagttggagctgtgtatggtcctgagttatatgcagcatccagctttcaagctgatgtgtccctaggcaatgaggcggctgtgcccttgtcaggaagaggaggcatcaacacttacatccctctaatcattcctggcttcccttacccaactgcagccaccacggcagctgctttccgaggagcccatctgaggggcagagggcggacagtgtatggtgcagtccgagcggtacctccaacagccatccccgcctatccaggtgtggtttaccaggacggattttacggtgctgacctctatggtggatatgcagcctacagatatgcacagcctgctactgcaaccgcagccacagctgctgcagccgctgcagccgcttacagcgacggttacggcagggtgtacacagctgacccctaccatgccctcgcccctgccgccagctatggagttggcgctgtggcgagtttgtaccgaggtggctacagccgatttgccccctactgaagtgacgtgagacccctgcaaatgggacagcccccagttcatgaggcctggctattgcaatatttactagtagaggactctatagcaagatgaagaggaaaacaaacaaaaaagagagaatacttttttatacctcactatgttctttgaatatgtattttttcctttaaatttctgcctttaattcttttgttccaaagattgtgctttttttgttttgttttgttttttttgaatttttgtttttgtttggaggggggttggttttttgggggttttttgttttgttttttgtttgggaatttttttgttgtttttatttttgctttttttaaaactgtggtt

SEQ ID NO: 488 - protein, 445 aa, Mus musculus
MAEGGQAQQQPPQLGPGAAARGMKRESEVELPVPGAGADGPEPGLSKRPRTEEAADGGMQNEPLTPGYHGFPARDGQGNQEPTTTPDAMVQPFTTIPFPPPPQNGIPTEYGVPHTQDYAGQTSEHNLTLYGSTQPHGEQSSNSPSNQNGSLTQTEGGAQTDGQQSQTQSSENSESKSTPKRLHVSNIPFRFRDPDLRQMFGQFGKILDVEIIFNERGSKGFGFVTFENSADADRAREKLHGTVVEGRKIEVNNATARVMTNKKMVTPYANGWKLSPVVGAVYGPELYAASSFQADVSLGNEAAVPLSGRGGINTYIPLIIPGFPYPTAATTAAAFRGAHLRGRGRTVYGAVRAVPPTAIPAYPGVVYQDGFYGADLYGGYAAYRYAQPATATAATAAAAAAAAYSDGYGRVYTADPYHALAPAASYGVGAVASLYRGGYSRFAPY

SEQ ID NO: 489 - DNA, 7921 bp, Mus musculus
atgaatcctctgatgtttacactattattgctctttggatttctctgcattcagattgatggatctcgtcttcgtcaagaagactttccccccaggatcgtagaacacccttctgatgtcatcgtctccaagggagagcccaccactctgaactgtaaagcagagggccgacccacccccaccattgaatggtacaaggatggtgagagggtggagacagacaaggatgatcccaggtcccacagaatgcttctgcccagcggatctttattctttttgcgaattgttcatgggcgcagaagtaaaccggacgaagggagttacgtttgtgttgcaaggaactatcttggtgaagcagtgagtcgaaatgcatctctggaagtggcattattgcgagatgacttccggcaaaaccccacagatgtggtagtcgcagctggagagcctgcaatcttggagtgccagccaccacggggacacccagaaccaaccatctactggaaaaaggacaaagtccgaattgatgacaaggaagagagaataagtatccgtggtgggaagctgatgatctctaatactaggaaaagcgatgctggcatgtacacctgtgtgggaaccaatatggtgggagaaagggacagcgaccctgcagagctcactgtctttgaacgacccacatttctcaggaggccaattaaccaggtggtgctagaggaagaagctgtagaattccgttgtcaggtccaaggagatccccagccaacggtgaggtggaaaaaagatgatgcagacttgccgagaggaaggtatgatatcaaagatgactacacgctgagaattaaaaaggccatgagtactgatgaaggtacctatgtgtgtattgctgagaatcgggtgggaaaagtggaagcctctgctaccctcactgtccgagctcctccacagtttgtggttaggccaagagatcagatcgttgctcaaggccgaacagtgacattcccctgtgaaactaaaggaaacccacagccagctgttttttggcagaaagaaggcagccagaacctacttttcccgaatcaacctcagcagcccaacagccgatgttcagtgtcgcccacgggggacctcaccatcaccaacatccagcgttcagatgcgggttactacatctgccaggccctaaccgtggcaggaagcattttagctaaagcacagttggaagttactgacgttttgacagatagacctccacccataatcttgcaaggaccaataaaccaaacacttgcagtagacggtacagcattgttgaagtgtaaagccactggtgagcctctgcctgtaattagctggctaaaggagggctttacttttctggggagagatccaagagccacgatccaagaccaaggaacactgcagattaagaatttacggatatctgatactggcacttatacttgtgtggctacaagttccagtggagagacttcctggagtgcagtgctggatgtaacagaatctggagcaacaatcagtaaaaattatgatatgaatgacctcccgggaccaccatccaaacctcaggtcactgatgtttctaagaacagtgtcaccttatcctggcagccaggtacacctggcgttcttcctgcaagcgcgtatatcattgaggctttcagccaatcggtgagcaatagctggcagacagtggcaaaccatgttaagacaactctgtatacagtaagggggctgaggcccaacacaatctacttgtttatggtcagagcgatcaacccacaaggtctcagtgatccaagtcctatgtcggatcctgtacgcacacaagatatcagccccccagcacaaggagtggaccacagacaggtgcagaaggaattaggtgatgtcgttgttcgtctccataatccagttgtcctgacacctacaactgttcaagtcacatggacggtggaccgacaaccccagtttattcagggctacagagtgatgtaccgtcagacttcgggactacaagcctcaactgtgtggcagaatctagacgccaaagtcccgactgagaggagtgctgtccttgtgaatttgaaaaagggggtgacttatgaaattaaagtccggccgtattttaacgagttccaaggaatggacagtgaatcgaaaacagtccgaaccactgaggaagccccaagtgcccctccccagtctgtcactgtgctgacagttggaagtcacaacagcacaagcatcagtgtttcctgggatcctccaccagccgaccaccagaatggaattattcaggaatataagatctggtgtctgggaaacgaaacgcgattccatatcaataaaacggtggatgcagccattcgctctgtagtaataggtggcttgttccctggaattcagtaccgggtagaagtggcagctagcacaagtgcaggggttggagtaaaaagtgaaccacagccgataataattgggggacgtaacgaagttgtcattactgaaaacaataacagcatcactgagcaaatcacggatgtcgtgaagcaaccggcatttatagctggcattggtggtgcctgctgggtaattctgatgggttttagcatctggttgtactggagaagaaagaagagaaagggactcagcaattatgctgtaacatttcaaagaggagatggaggactaatgagcaatgggagccgtccaggtcttctaaatgctggcgatcccaattacccatggcttgctgattcttggccagccacgagtttgccagtgaacaatagcaatagtggcccaaatgaaattggaaattttgggcgtggagatgtgctgcctccggtgccaggccaaggggataaaacagcgaccatgctctcggatggagccatttatagcagcattgacttcactaccaaaaccacttacaacagttccagccaaataacacaggccaccccatatgccactacacaaatcctgcattcaaacagcatccacgaactggcagttgatcttcctgatccacagtggaaaagctcagttcaacagaagacagacctcatgggatttggttattcgctacctgatcagaacaaggggaacaacggtgggaaaggtggaaaaaagaagaaaactaaaaattcttcgaaagcgcagaaaaacaacggatccacttgggctaatgtccctctacctcctcctcccgtccagccccttcctggtacagagctgggccactatgctgcggaacaagaaaatggctatgacagtgacagctggtgcccaccattaccggtgcaaacatacttgcatcagggtatggaagatgagctggaagaagacgaagatcgggtcccaacacctcctgttcgcggcgtggcctcttcaccagctatctcttttggacagcagtccactgccactcttactccatccccacgggaagagatgcaacccatgctgcaagctcacttggatgagttgacaagggcctatcagtttgatatagcaaaacaaacatggcacattcaaagcaataccccacctccacaacccccagctccgccattaggttacgtgtccggagccttgatttctgatttggagacagatgttccagatgaggatgctgatgatgaagaggaaccattagaaattcccaggcccctcagagcactagaccagacacctggatccagtatggacaatctagacagctctgtcacaggaaaagcctttagctcctctcaaaggcagcggcccaccagcccattttctacggacagtaacaccagtgctgcccagaatcaaagccagaggcctcggcccacgaaaaaacataagggaggacggatggacccacagccagtgttacctcatcggagggaagggatgccagatgatcttcccccaccaccagatcccccaccaggtcagggtttaaggcagcagataggcctgagccaacactctggtaacgtggaaaactcaacagagagaaaaggaagctctctagagagacaacaagcagccaacttagaagacacaaagagctcattggattgtccagctaaaactgttctagagtggcagcgtcaaacccaggactggataaactctacagaacgccaagaagaaactcggaaagccccacacaaacaaggggttggatcagaggagtccctggtgccctacagcaagcccagcttcccgtctcctggcgggcacagctcatcaggaacatcttcctctaaagggtccactggccctcggaaggctgacgtgctgagaggcagccaccagaggaatgccaatgaccttctcgacattggatatgtgggctcaaatagtcaaggacagtttacagagtaactgagaggggacatacaaagatgctctgaggaccatcaggtccaaactcatggaagtgataacatttaacagtgcaatgaacaatttctttatttatgtactattaaaaaaaaactgtaaatgcaatgtaaagacacacagccacacatattccacagttattttcttgtgttcttctcttacttacaccacccaccttaactctttcttgtcaggagtatataagaaaaagaaagaaagcaaaactcaccctccaggaagaaaaggatttttcctctgtatataatttcttttgtgcattgctatgcaagctcactctttttaactctgttcatattattgtctgttctgattggtctgttgtactatatgtgaattaatgggctgtggtgccatatattaacttttaattgtgtaactttttatgtttaaattttgcactgcgattttatttggtgataagcacaaatctctactcctcatgacatgaagaaaagattgaatgtgaagggagttttctgtactgtaagttaggttggataatgctggtgtaaccaatccagttagatggttttcagttgggggtgtagaaataggaagatcgaaggaatgatggtgttggcaaagtcttcttgaaacaacagatattgagacaattttaagaagcagaaagatggatactattgactaaagcaggggtcaaaagaagggggtttaagtctagacagagtatgtaataaagtatggtggtagcaaagatgtactaacttgctttaaaaatattattaaagttttatttagaatgaactttacctgccattgtaattaacccatcttagaattacaatgagcaaaataaaaatcaaggtgtttcaagagatctgtatttatattacagctttttaaaaacagcagttttgaataatcataattaatctctccaactcattaagtcagactataacatggagttccccaaggaaacaaacaaaaaaaatgaactccagaaactctagcaaatagttaaagaagcaacttattcttcgagcatactcggctactcttgaatatgagctcaattgcaatatcttgttcatctttctaatacatgtacagtacatattagaggatgtaggcacatcacttaagttcatttctttttaaaaaaaaaaagcaaactaatgcattctgcatacaattttgtgtttcttttggttaaaatgtgaaatcgatgccaccagatgtatagccacattataagtgcttaaaggcagtgctcacagtatgttcagtttccagttagtagatttattggactcaatattttctggtacattctcagaaattggctaccaactcaaatctgtttgacccattttgaatgagtaaatcggaaagaacagtcaaaagggagaaaaaaatgcatgtttatacactttttaaataaaaccaaatcttgtaagtggacattaataacagtgtcctgcctcatttgttttcacgactctgagaacaaggagttgctcaacatccattatgtatgctcaagataaatgtgactttgaaatgtatgttagctactgtacatgtatgtaagtcaagtagatgatagccttcctgaaactaccactaataatattttcccatgtgctacttacacaagcttaaattctagttcagcaaatgtttttcattattttttcttacggtttattcaatagagggtacctagaaaaatattcagtgtgatggtcaacatattgagtgttcaagtaggggatatttactttggcaatacatactgtgcattattggttcagatgccaattcatgagacattatcataggaaatggataatataagaacatggctctaagggtccttctccacaggcaagcatagaatttgaggttcttcatgggtcccaaaacttgcttagtgttatatacttaacttccttcactgaagtatcaagcaattctaacacaccgtttaacaactttctaccatcagtgcctgcattttattgaagtttgatgtctctggtacaaggaaatagagaaagctgaacagtttctgttgggagaaaaagtttctgtaattattgtcaattctaagttgtgatgaatataacttttcatctatacagttccttactcatggtctctatttaaaagcataggatcttttaagatatacttttagctgagtcttcactgtatgttcatgaataatataatttagtgaaaaactttagtacatcatatgtatggtaactgacatttgcagattattatcaaaccaaatcataagaaataatatcttcagatcacatgatggcttaccgaacaatttcaggttatagcatgatgtctttctgattgtcttcagtatatgatcataagcaattatattgtgtccatacagtttacatactgtgattcccgcaaaatcttgcatctgatatctaccatgaagatgaaataatatgctatgaatttcaggcatagacatactatcagcaatagaaagccttcatcatctagatatctggataaatccattcatcgtcaaccatcagattgttaactggggaacacgtacctccctcacaaatgctttcttttcgtcttgtagttgattgaatgtgataggaaatctgctgagttgactcttctgtgggcctgagcagaaacatgcataagccatcagaaggaagtctggatgggaaggaaaccttgtctttcactcgtaggcaatactgctgtgtagtcacggcagacccaagcacagcttctttcagaacatgcaaagtctccttatgaaatatacacatcagtgcccaaactcaggtgtaccagtgtaaagcgtagggtttgcctacccttttttcatatcattttacataagcaagttaggagactacagggctatgaaaataaatgtttccttaacaggatttggagcaagttcacgggagtacataggacagtcgagcccagtgtaaacactaccaaaggaaaggacagccttgcagaagcgtgagctccgactaacagagcggcttaagtatgctctgtgatacagcttaatgcactccctattcaaatcccactgtcaatgggatttaagttgccagtttatatgtgatttcatggaacacaaccaagttctacttaatacctttatgcaatttttttttcactgatgaaaaatcaatatccacatcaatgggtgcccagctgcggatcacctctcctaaaaagcgatcttgtcagtattgaagaaatgtagaaccataattttcactactaatatcattttgctcaactacttctgtatattgtggaaaaaggggtggggccgggggaatgtgtgtttccacattttctgagaggtgaaaatatttttgtgttgctttgtcctaatgggtacttcaaatgaaacaccatacaattttaaatgacatgcaattaacgaatattttttactctcataacattaaaagcatttgttgtg

SEQ ID NO: 490 - protein, 1465 aa, Mus musculus
MNPLMFTLLLLFGFLCIQIDGSRLRQEDFPPRIVEHPSDVIVSKGEPTTLNCKAEGRPTPTIEWYKDGERVETDKDDPRSHRMLLPSGSLFFLRIVHGRRSKPDEGSYVCVARNYLGEAVSRNASLEVALLRDDFRQNPTDVVVAAGEPAILECQPPRGHPEPTIYWKKDKVRIDDKEERISIRGGKLMISNTRKSDAGMYTCVGTNMVGERDSDPAELTVFERPTFLRRPINQVVLEEEAVEFRCQVQGDPQPTVRWKKDDADLPRGRYDIKDDYTLRIKKAMSTDEGTYVCIAENRVGKVEASATLTVRAPPQFVVRPRDQIVAQGRTVTFPCETKGNPQPAVFWQKEGSQNLLFPNQPQQPNSRCSVSPTGDLTITNIQRSDAGYYICQALTVAGSILAKAQLEVTDVLTDRPPPIILQGPINQTLAVDGTALLKCKATGEPLPVISWLKEGFTFLGRDPRATIQDQGTLQIKNLRISDTGTYTCVATSSSGETSWSAVLDVTESGATISKNYDMNDLPGPPSKPQVTDVSKNSVTLSWQPGTPGVLPASAYIIEAFSQSVSNSWQTVANHVKTTLYTVRGLRPNTIYLFMVRAINPQGLSDPSPMSDPVRTQDISPPAQGVDHRQVQKELGDVVVRLHNPVVLTPTTVQVTWTVDRQPQFIQGYRVMYRQTSGLQASTVWQNLDAKVPTERSAVLVNLKKGVTYEIKVRPYFNEFQGMDSESKTVRTTEEAPSAPPQSVTVLTVGSHNSTSISVSWDPPPADHQNGIIQEYKIWCLGNETRFHINKTVDAAIRSVVIGGLFPGIQYRVEVAASTSAGVGVKSEPQPIIIGGRNEVVITENNNSITEQITDVVKQPAFIAGIGGACWVILMGFSIWLYWRRKKRKGLSNYAVTFQRGDGGLMSNGSRPGLLNAGDPNYPWLADSWPATSLPVNNSNSGPNEIGNFGRGDVLPPVPGQGDKTATMLSDGAIYSSIDFTTKTTYNSSSQITQATPYATTQILHSNSIHELAVDLPDPQWKSSVQQKTDLMGFGYSLPDQNKGNNGGKGGKKKKTKNSSKAQKNNGSTWANVPLPPPPVQPLPGTELGHYAAEQENGYDSDSWCPPLPVQTYLHQGMEDELEEDEDRVPTPPVRGVASSPAISFGQQSTATLTPSPREEMQPMLQAHLDELTRAYQFDIAKQTWHIQSNTPPPQPPAPPLGYVSGALISDLETDVPDEDADDEEEPLEIPRPLRALDQTPGSSMDNLDSSVTGKAFSSSQRQRPTSPFSTDSNTSAAQNQSQRPRPTKKHKGGRMDPQPVLPHRREGMPDDLPPPPDPPPGQGLRQQIGLSQHSGNVENSTERKGSSLERQQAANLEDTKSSLDCPAKTVLEWQRQTQDWINSTERQEETRKAPHKQGVGSEESLVPYSKPSFPSPGGHSSSGTSSSKGSTGPRKADVLRGSHQRNANDLLDIGYVGSNSQGQFT

SEQ ID NO: 491 - DNA, 3865 bp, Mus musculus
aagtgtatgggacaaggagaggagccgagagcagccatgggctctggaggaacgggcctcctggggacggagtggcctctgcctctgctgctgcttttcatcatgggaggtgaggctctggattctccaccccagatcctagttcacccccaggaccagctacttcagggctctggcccagccaagatgaggtgcagatcatccggccaaccacctcccactatccgctggctgctgaatgggcagcccctcagcatggccaccccagacctacattaccttttgccggatgggaccctcctgttacatcggccctctgtccagggacggccacaagatgaccagaacatcctctcagcaatcctgggtgtctacacatgtgaggccagcaaccggctgggcacagcagtgagccggggtgctaggctgtctgtggctgtcctccaggaggacttccagatccaacctcgggacacagtggccgtggtgggagagagcttggttcttgagtgtggtcctccctggggctacccaaaaccctcggtctcatggtggaaagacgggaaacccctggtcctccagccagggaggcgcacagtatctggggattccctgatggtgtcaagagcagagaagaatgactcggggacctatatgtgtatggccaccaacaatgctgggcaacgggagagccgagcagccagggtgtctatccaggaatcccaggaccacaaggaacatctagagcttctggctgttcgcattcagctggaaaatgtgaccctgctaaaccccgaacctgtaaaaggtcccaagcctgggccatccgtgtggctcagctggaaggtgagcggccctgctgcacctgctgagtcatacacagctctgttcaggactcagaggtcccccagggaccaaggatctccatggacagaggtgctgctgcgtggcttgcagagtgcaaagcttgggggtctccactggggccaagactatgaattcaaagtgagaccgtcctccggccgggctcgaggccctgacagcaatgtgttgctcctgaggctgcctgaacaggtgcccagtgccccacctcaaggagtgaccttaagatctggcaacggtagtgtctttgtgagttgggctccaccacctgctgaaagccataatggtgtcatccgtggttaccaggtctggagcctgggcaatgcctcattgcctgctgccaactggaccgtagtgggtgaacagacccagctggagatcgccacacgactgccaggctcctattgtgtgcaagtggctgcagtcactggagctggtgctggagaactcagtacccctgtctgcctccttttaggtgagggaaaggctctctccatatcctccactccacccccatgccgtccttctgtttcccagttcctgtcttacattttcagctcctctctctcctgtctgttggtccccctcactgtcccacttgccctccctctgagctccacatcccaaacagagcaggccatggagcaatcagcacgagaccccaggaaacatgttccctggaccctggaacagctgagggccaccttgagacgaccagaagtcattgccagtagtgctgtcctactctggttgctgctactaggcattactgtgtgtatctacagacgacgcaaagctggggtgcacctgggcccaggtctgtacagatacaccagcgaggacgccattctaaaacacaggatggaccacagtgactccccatggctggcagacacctggcgttccacctctggctctcgagacctgagcagcagcagcagccttagtagtcggctgggattggaccctcgggacccactagagggcaggcgctccttgatctcctgggaccctcggagccccggtgtacccctgcttccagacacgagcacgttttacggctccctcattgcagagcagccttccagccctccagtccggccaagccccaagacaccagctgctaggcgctttccatccaagttggctggaacctccagcccctgggctagctcagatagtctctgcagccgcaggggactctgttccccacgcatgtctctgacccctacagaggcttggaaggccaaaaagaagcaggaattgcaccaagctaacagctccccactgctccggggcagccaccccatggaaatctgggcctgggagttgggaagcagagcctccaagaacctttctcaaagcccaggtccaaactctggttccccaggagaagcgccccgagccgtggtatcctggcgtgctgtgggaccacaacttcaccgcaactccagtgagctggcatctcgtccactccctccaacacccctttctcttcgtggagcttccagtcatgacccacagagccagtgtgtggagaagctccaagctccctcctctgacccactgccagcagcccctctctccgtcctcaactcttccagaccttccagcccccaggcctctttcctctcctgtcctagcccatcctccagcaacctgtccagctcctcgctgtcatccttagaggaggaggaggatcaggacagcgtgctcacccccgaggaggtagccctgtgtctggagctcagtgatggggaggagacacccacgaacagtgtatctcctatgccaagagctccttccccgccaacaacctatggctatatcagcataccaacctgctcaggactggcagacatgggcagagctggcgggggcgtggggtctgaggttgggaacttactgtatccacctcggccctgccccacccctacacccagcgagggctccctggccaatggttggggctcagcttctgaggacaatgtccccagcgccagggccagcctggttagctcttctgatggctccttcctcgctgatactcactttgctcgtccctggcagtggctgtggatagctttggcctcagtctggatcccagggaagctgactgtgtcttcactgatgcctcatcacctccctcccctcggggtgatctctccctgacccgaagcttctctctgcctttgtgggagtggaggccagactggttggaagatgctgagatcagccacacccagaggctggggagggggctgcctccctggcctcctgattctagggcctcttcccagcgaagttggctaactggtgctgtgcccaaggctggtgattcctcctgaattgtccctgagaaggccagaagagcacccagaccactctcctgtctgtcccctggctttctcacatgtggaggtcttggcctatgcttctctgtaatagaagtccaccgtcactaggcttctggagagctctgtcattgggattgttaaaataaatgaaagcaaaccaaaatatgatcacgggagtcttggattcccactgagaacaagacagcatcttcaggacagcagactctccacaaccagaacctttggcctaagtaagcctggctccggagctcccacctaagtggatcatggaaagaagggaagccaaccaggtcttcaggaaggacagaaatgttttttggtgagggctatggtggaggacctgtggaagagccctctcatatctacttggactcctcccttagaggccagctcaaccctttccccagtcacaccatgcaaggaaactaaaggagaaaggtcgtggatgcagtgggccctatacagcgtcacagtcaatgcttcaaagtgagatcaatggaggagactgaaggaaaggacgcagggaaacagggaaccaatgcgctattctcattctaccgccactctgagcttaaggaacttaattctataaaactgtaaagacg

SEQ ID NO: 492 - protein, 1005 aa, Mus musculus
MGSGGTGLLGTEWPLPLLLLFIMGGEALDSPPQILVHPQDQLLQGSGPAKMRCRSSGQPPPTIRWLLNGQPLSMATPDLHYLLPDGTLLLHRPSVQGRPQDDQNILSAILGVYTCEASNRLGTAVSRGARLSVAVLQEDFQIQPRDTVAVVGESLVLECGPPWGYPKPSVSWWKDGKPLVLQPGRRTVSGDSLMVSRAEKNDSGTYMCMATNNAGQRESRAARVSIQESQDHKEHLELLAVRIQLENVTLLNPEPVKGPKPGPSVWLSWKVSGPAAPAESYTALFRTQRSPRDQGSPWTEVLLRGLQSAKLGGLHWGQDYEFKVRPSSGRARGPDSNVLLLRLPEQVPSAPPQGVTLRSGNGSVFVSWAPPPAESHNGVIRGYQVWSLGNASLPAANWTVVGEQTQLEIATRLPGSYCVQVAAVTGAGAGELSTPVCLLLGEGKALSISSTPPPCRPSVSQFLSYIFSSSLSCLLVPLTVPLALPLSSTSQTEQAMEQSARDPRKHVPWTLEQLRATLRRPEVIASSAVLLWLLLLGITVCIYRRRKAGVHLGPGLYRYTSEDAILKHRMDHSDSPWLADTWRSTSGSRDLSSSSSLSSRLGLDPRDPLEGRRSLISWDPRSPGVPLLPDTSTFYGSLIAEQPSSPPVRPSPKTPAARRFPSKLAGTSSPWASSDSLCSRRGLCSPRMSLTPTEAWKAKKKQELHQANSSPLLRGSHPMEIWAWELGSRASKNLSQSPGPNSGSPGEAPRAVVSWRAVGPQLHRNSSELASRPLPPTPLSLRGASSHDPQSQCVEKLQAPSSDPLPAAPLSVLNSSRPSSPQASFLSCPSPSSSNLSSSSLSSLEEEEDQDSVLTPEEVALCLELSDGEETPTNSVSPMPRAPSPPTTYGYISIPTCSGLADMGRAGGGVGSEVGNLLYPPRPCPTPTPSEGSLANGWGSASEDNVPSARASLVSSSDGSFLADTHFARPWQWLWIALASVWIPGKLTVSSLMPHHLPPLGVISP

SEQ ID NO: 493 - DNA, 3705 bp, Mus musculus
gtatgggacaaggagaggagccgagagcagccatgggctctggaggaacgggcctcctggggacggagtggcctctgcctctgctgctgcttttcatcatgggaggtgaggctctggattctccaccccagatcctagttcacccccaggaccagctacttcagggctctggcccagccaagatgaggtgcagatcatccggccaaccacctcccactatccgctggctgctgaatgggcagcccctcagcatggccaccccagacctacattaccttttgccggatgggaccctcctgttacatcggccctctgtccagggacggccacaagatgaccagaacatcctctcagcaatcctgggtgtctacacatgtgaggccagcaaccggctgggcacagcagtgagccggggtgctaggctgtctgtggctgtcctccaggaggacttccagatccaacctcgggacacagtggccgtggtgggagagagcttggttcttgagtgtggtcctccctggggctacccaaaaccctcggtctcatggtggaaagacgggaaacccctggtcctccagccagggaggcgcacagtatctggggattccctgatggtgtcaagagcagagaagaatgactcggggacctatatgtgtatggccaccaacaatgctgggcaacgggagagccgagcagccagggtgtctatccaggaatcccaggaccacaaggaacatctagagcttctggctgttcgcattcagctggaaaatgtgaccctgctaaaccccgaacctgtaaaaggtcccaagcctgggccatccgtgtggctcagctggaaggtgagcggccctgctgcacctgctgagtcatacacagctctgttcaggactcagaggtcccccagggaccaaggatctccatggacagaggtgctgctgcgtggcttgcagagtgcaaagcttgggggtctccactggggccaagactatgaattcaaagtgagaccgtcctccggccgggctcgaggccctgacagcaatgtgttgctcctgaggctgcctgaacaggtgcccagtgccccacctcaaggagtgaccttaagatctggcaacggtagtgtctttgtgagttgggctccaccacctgctgaaagccataatggtgtcatccgtggttaccaggtctggagcctgggcaatgcctcattgcctgctgccaactggaccgtagtgggtgaacagacccagctggagatcgccacacgactgccaggctcctattgtgtgcaagtggctgcagtcactggagctggtgctggagaactcagtacccctgtctgcctccttttagagcaggccatggagcaatcagcacgagaccccaggaaacatgttccctggaccctggaacagctgagggccaccttgagacgaccagaagtcattgccagtagtgctgtcctactctggttgctgctactaggcattactgtgtgtatctacagacgacgcaaagctggggtgcacctgggcccaggtctgtacagatacaccagcgaggacgccattctaaaacacaggatggaccacagtgactccccatggctggcagacacctggcgttccacctctggctctcgagacctgagcagcagcagcagccttagtagtcggctgggattggaccctcgggacccactagagggcaggcgctccttgatctcctgggaccctcggagccccggtgtacccctgcttccagacacgagcacgttttacggctccctcattgcagagcagccttccagccctccagtccggccaagccccaagacaccagctgctaggcgctttccatccaagttggctggaacctccagcccctgggctagctcagatagtctctgcagccgcaggggactctgttccccacgcatgtctctgacccctacagaggcttggaaggccaaaaagaagcaggaattgcaccaagctaacagctccccactgctccggggcagccaccccatggaaatctgggcctgggagttgggaagcagagcctccaagaacctttctcaaagcccaggtccaaactctggttccccaggagaagcgccccgagccgtggtatcctggcgtgctgtgggaccacaacttcaccgcaactccagtgagctggcatctcgtccactccctccaacacccctttctcttcgtggagcttccagtcatgacccacagagccagtgtgtggagaagctccaagctccctcctctgacccactgccagcagcccctctctccgtcctcaactcttccagaccttccagcccccaggcctctttcctctcctgtcctagcccatcctccagcaacctgtccagctcctcgctgtcatccttagaggaggaggaggatcaggacagcgtgctcacccccgaggaggtagccctgtgtctggagctcagtgatggggaggagacacccacgaacagtgtatctcctatgccaagagctccttccccgccaacaacctatggctatatcagcataccaacctgctcaggactggcagacatgggcagagctggcgggggcgtggggtctgaggttgggaacttactgtatccacctcggccctgccccacccctacacccagcgagggctccctggccaatggttggggctcagcttctgaggacaatgtccccagcgccagggccagcctggttagctcttctgatggctccttcctcgctgatactcactttgctcgtgccctggcagtggctgtggatagctttggcctcagtctggatcccagggaagctgactgtgtcttcactgatgcctcatcacctccctcccctcggggtgatctctccctgacccgaagcttctctctgcctttgtgggagtggaggccagactggttggaagatgctgagatcagccacacccagaggctggggagggggctgcctccctggcctcctgattctagggcctcttcccagcgaagttggctaactggtgctgtgcccaaggctggtgattcctcctgaattgtccctgagaaggccagaagagcacccagaccactctcctgtctgtcccctggctttctcacatgtggaggtcttggcctatgcttctctgtaatagaagtccaccgtcactaggcttctggagagctctgtcattgggattgttaaaataaatgaaagcaaaccaaaatatgatcacgggagtcttggattcccactgagaacaagacagcatcttcaggacagcagactctccacaaccagaacctttggcctaagtaagcctggctccggagctcccacctaagtggatcatggaaagaagggaagccaaccaggtcttcaggaaggacagaaatgttttttggtgagggctatggtggaggacctgtggaagagccctctcatatctacttggactcctcccttagaggccagctcaaccctttccccagtcacaccatgcaaggaaactaaaggagaaaggtcgtggatgcagtgggccctatacagcgtcacagtcaatgcttcaaagtgagatcaatggaggagactgaaggaaaggacgcagggaaacagggaaccaatgcgctattctcattctaccgccactctgagcttaaggaacttaattctataaaactgtaaagac

SEQ ID NO: 494 - protein, 1009 aa, Mus musculus
MGSGGTGLLGTEWPLPLLLLFIMGGEALDSPPQILVHPQDQLLQGSGPAKMRCRSSGQPPPTIRWLLNGQPLSMATPDLHYLLPDGTLLLHRPSVQGRPQDDQNILSAILGVYTCEASNRLGTAVSRGARLSVAVLQEDFQIQPRDTVAVVGESLVLECGPPWGYPKPSVSWWKDGKPLVLQPGRRTVSGDSLMVSRAEKNDSGTYMCMATNNAGQRESRAARVSIQESQDHKEHLELLAVRIQLENVTLLNPEPVKGPKPGPSVWLSWKVSGPAAPAESYTALFRTQRSPRDQGSPWTEVLLRGLQSAKLGGLHWGQDYEFKVRPSSGRARGPDSNVLLLRLPEQVPSAPPQGVTLRSGNGSVFVSWAPPPAESHNGVIRGYQVWSLGNASLPAANWTVVGEQTQLEIATRLPGSYCVQVAAVTGAGAGELSTPVCLLLEQAMEQSARDPRKHVPWTLEQLRATLRRPEVIASSAVLLWLLLLGITVCIYRRRKAGVHLGPGLYRYTSEDAILKHRMDHSDSPWLADTWRSTSGSRDLSSSSSLSSRLGLDPRDPLEGRRSLISWDPRSPGVPLLPDTSTFYGSLIAEQPSSPPVRPSPKTPAARRFPSKLAGTSSPWASSDSLCSRRGLCSPRMSLTPTEAWKAKKKQELHQANSSPLLRGSHPMEIWAWELGSRASKNLSQSPGPNSGSPGEAPRAVVSWRAVGPQLHRNSSELASRPLPPTPLSLRGASSHDPQSQCVEKLQAPSSDPLPAAPLSVLNSSRPSSPQASFLSCPSPSSSNLSSSSLSSLEEEEDQDSVLTPEEVALCLELSDGEETPTNSVSPMPRAPSPPTTYGYISIPTCSGLADMGRAGGGVGSEVGNLLYPPRPCPTPTPSEGSLANGWGSASEDNVPSARASLVSSSDGSFLADTHFARALAVAVDSFGLSLDPREADCVFTDASSPPSPRGDLSLTRSFSLPLWEWRPDWLEDAEISHTQRLGRGLPPWPPDSRASSQRSWLTGAVPKAG

SEQ ID NO: 495 - DNA, 3302 bp, Mus musculus
gcgcccctcctgccgccccccgcccggcctcgcactccgcttccggccgcccttgccgcggccgcacccgcgcccacccgcgcctgccccgcgcctcatggagggcgcagggtcccggggggccgggccggcgcggcgccagggagcccgagggctgggactgctgctgctgctctggctgctgcccggtctcgcggcgccccaggacttgaacccgcgaggccgcaacgtgtgccgcacgcccggttcccaggtgctcacgtgttgcgctggctggaggcagctgggggatgagtgtgggatagcggtgtgcgaaggcaattccacgtgctcagaaaacgaggtgtgcgtgcggccaggcgaatgccgctgccgacatggctactttggtgccaactgcgacacaaagtgcccgcgccagttctggggccctgactgcaaggagaggtgcagttgccacccgcacggacagtgcgaggacgtgaccggacagtgtacgtgtcacgcgcgccgctggggtgcgcgctgcgagcatgcttgccaatgccagcatggcacgtgccacccgcggagcggcgcgtgccggtgcgagccgggctggtggggtgcgcaatgcgctagcgcttgctattgcagcgctacttcccggtgcgatccacagacaggcgcctgcctgtgccacgtaggctggtggggccgcagctgtaacaaccagtgcgcctgcaactcgtcgccctgcgagcagcagagtggccgctgccagtgtcgcgagcgcatgtttggcgcccgctgtgatcgctattgccagtgctctcacggtcgctgccacccggtggacggcacgtgtgcctgcgatcctggctaccggggcaagtattgtcgcgagccatgccccgctggattctatggcccgggctgtcgccgtcggtgtggccaatgcaaaggccagcagccgtgcacggtagtcgaaggccgctgtctgacatgcgagcccggctggaacggaaccaaatgtgaccaaccctgcgccaccggtttctacggcgaaggttgtggccaccgctgcccaccctgccgcgacgggcatgcctgcaaccatgtcaccggcaagtgtacgcactgcaatgcgggctggatcggcgaccggtgcgagactaagtgcagtaatggcacttacggtgaggactgtgccttcgtgtgctctgattgcggcagcggccactgtgacttccagtccgggcgctgcctttgcagccctggtgttcacggacctcactgtaatgtaacttgcccggccgggctccacggcgtggactgcgcccaggcctgcagctgtcacgaggaatcatgcgacccggtcaccggtgcctgccacctggagaccaatcagcgcaaaggtgtgatgggcgcgggcgctctgctcacgctgctcctcggcctgctgctctcgctgctcggttgttgctgcgcctgccggggcaaggactcggcgcgccgggagctcacccttggaaggaagaaggcgcctcaacgtttttgtggaagcttcagccgcatcagcatgaagctgccccgaatcccgcttcgcaggcagaagctgcccaaagtcgtagtggcccatcatgacctagacaacacactcaactgcagttttctggacccaccctcagggctggagcagccctctccatcatggtcctccagggcctccttctcatcattcgacaccacagatgaaggccctgtgtactgtgtgccccacgaggaagcgactgccgacagccgagacctggaagcgactgccgctctcactgaggtggccgctgtgtccttagagcccacgggcacctcgacgcccggggaggaggcagcggtcctccctgcatcctcagacagcgagcgctccgcatcaagcgtggaggggccgagcggggcgctgtacgcgcgtgtggcccggcgcgaggcccggccggcccggacccgaaatgaggctgggggcttgtcactgtccccatcgcccgagcgcaggaagccgccaccaccagaccctgccaccaagcctaaggtgtcctggatccacggcaagcacagcgccgctgccgctgcaccgtcgcctccgcctgcaggccgcaaggctgcgccgagccctagcgggaggaaacggacccccagcaactcgtcggtgcagccccccggactgaccgaggaggcccccggcccggcttcacccacgccaccccgcgcccgagcgcgcggccgcggcctggggctctcggagccaacggacgcgggaggtcccccgcgcagcgcgcccgaggccgcctctatgctggcagctgagctgcgcgacaagactcgcagcttaggccgcgccgagaagccgccgccgccgcagaaggccaagcgctccgtgctccccgccgcgacggtccgcacagcctcggcgtccgaggcctcggggtcagagaaggcggcggccagcgcacctgcgcccgagacccctcggaagaaaacccccatccagaaaccgcctcggaagaagagcagggaggcagcgggggagccgagtagggcgggcacggcccccggagcttcctaagctcgcagccccaggaggctttctcaccaccatttccccgcgcggccgcagcgaaggcatttcattggcccccaaagcccagcgcccgcccaagcctgcgtctggttggcctaggctcaagcagccgcggcctggttggatctgctctcgggcctcgcagacacttagctggctacccgctcccactagcaaagttgtggagcttttctagtaatctctgtctcgttggccatggcttggagagcctacagacttcttactggccaagaagagtgttcttggcagggctaccttgtcactggccgatgccagcagcgcttctgcctcttggctgcctctcatttgccaaggcctggtgcctatggctgaagggtctttttctctgaagacaaaaagaggttgcgtccataaactgggctccagagtatctggttggcccgaacctggggagaagagctggtctcttcttcgcagggggctcagcccatgttggcttgtccccttcccacgcacgccagccctggtctctcagccatcaagctggttttgatggcctcctatcaccccacgagggaaccccagggcctactctggtggctttagatgtatttataggccctgggcagggcttctctcatcccatctgggaccttctggatgggctcctcatagcaggccaaagctttctttaataaaatgcttc

SEQ ID NO: 496 - protein, 833 aa, Mus musculus
MEGAGSRGAGPARRQGARGLGLLLLLWLLPGLAAPQDLNPRGRNVCRTPGSQVLTCCAGWRQLGDECGIAVCEGNSTCSENEVCVRPGECRCRHGYFGANCDTKCPRQFWGPDCKERCSCHPHGQCEDVTGQCTCHARRWGARCEHACQCQHGTCHPRSGACRCEPGWWGAQCASACYCSATSRCDPQTGACLCHVGWWGRSCNNQCACNSSPCEQQSGRCQCRERMFGARCDRYCQCSHGRCHPVDGTCACDPGYRGKYCREPCPAGFYGPGCRRRCGQCKGQQPCTVVEGRCLTCEPGWNGTKCDQPCATGFYGEGCGHRCPPCRDGHACNHVTGKCTHCNAGWIGDRCETKCSNGTYGEDCAFVCSDCGSGHCDFQSGRCLCSPGVHGPHCNVTCPAGLHGVDCAQACSCHEESCDPVTGACHLETNQRKGVMGAGALLTLLLGLLLSLLGCCCACRGKDSARRELTLGRKKAPQRFCGSFSRISMKLPRIPLRRQKLPKVVVAHHDLDNTLNCSFLDPPSGLEQPSPSWSSRASFSSFDTTDEGPVYCVPHEEATADSRDLEATAALTEVAAVSLEPTGTSTPGEEAAVLPASSDSERSASSVEGPSGALYARVARREARPARTRNEAGGLSLSPSPERRKPPPPDPATKPKVSWIHGKHSAAAAAPSPPPAGRKAAPSPSGRKRTPSNSSVQPPGLTEEAPGPASPTPPRARARGRGLGLSEPTDAGGPPRSAPEAASMLAAELRDKTRSLGRAEKPPPPQKAKRSVLPAATVRTASASEASGSEKAAASAPAPETPRKKTPIQKPPRKKSREAAGEPSRAGTAPGAS

SEQ ID NO: 497 - DNA, 2043 bp, Mus musculus
agtcctgtgtctgatccttgccgctctgcaggattaccgagaggatgggatggatctaggcagtgacgccggcagcagcagcagcagccgcgccagctcacaatccaactccaccaaagtgaccccttgctccgagtgcaaatcctcatcgtcgccggggggtagcttggacttggtgtctgctctggaagactatgaagagcccttcccggtctaccagaagaaggtgattgatgagtgggctccggaggaggacggggaggaggaggaagaggaggacgatcgagggtatcgggatgacggctgtccggcccgggagccgggggacgtgagcgccaggatcggcagcagcggcagcgggagcaggagcgccgccaccaccatgccgtccccgatgcctaacggcaacctccatccgcacgaccctcaagacctcaggcacaatggcaacgtggtggtagctggccggccgaacgcctctcgggttccccggcgacccatccagaagacccagcctccagggagccggcgcggaggccgaaaccgggcatctgggggcctctgccttcagccaccggacggcgggacgcgggtcccggaagaaccccctgcgcccccaatggactgggaggcattggaaaagcatctggccgggctgcagttccgggagcaggaggtgcgaaaccagggtcaggcgaggaccaactccacctctgcacagaagaatgagagagagtctatcagacagaagttggcactcggaagcttctttgacgatggcccaggaatctataccagctgcagcaaaagtgggaagccaagcctttctgcaagactacagagcgggatgaacctccagatatgctttgtcaatgacagcggcagtgacaaggacagcgatgcagatgacagtaagacggaaaccagcttggacacgcccttgtcccccatgagcaagcagagttcttcctattcggatagagacacaactgaggaggagtctgaatccctggatgacatggacttcctcacaaggcaaaagaagctacaagctgaagccaaaatggctctggccatggccaaaccaatggccaaaatgcaagtagaagtggaaaaacagaacaggaaaaagtctcccgtcgctgatcttctcccacacatgcctcacataagcgaatgtttgatgaaaagaagcttaaagcccaccgacctgagagacatgactatcgggcagctacaagtgatcgtcaatgacctccactcccagattgaaagtttgaatgaagagttggtccagctgctccttattcgagatgagctgcacacagaacaagatgccatgctggtggacattgaagacttgactagacacgctgagagtcagcagaagcacatggctgagaaaatgcccgcgaagtgaaagagagccatccaccagagaacaagctagaatttattttgcttctgtggtcgtaaaaattgctgttgctaaaggtggttccgaaacagacatcagtgttagtcattggtaacgtccgagcttactgtcccgtgactggccttcgcttcttaatttattttaatttctttctttccttttttttttttttttttttactcttgccacttactatcaggccttttaataaaacattgttacaagaactgtacagtacttaaaccaccaacaaccgtggataagcagagggtagttttgactttgtttttgtttagagactttaagttggagcagtattttaccattgactgtttcattcttcactgtagctttgaagaggaactgtaaatgacggtgctatacaagtcaaaatacatgcctgcctcgtagtgaagtcgtagctctccatactacgtatattttaatcagttttcaacattttgtgaatgttgactacctgaggtttattcttagatgtgctattaacattctgtcggatccacatggttccttgggagttttatgtataaatatgtaaaataaaaattaaaactttgtttcatatgatacgtccttttgctcac

SEQ ID NO: 498 - protein, 368 aa, Mus musculus
REPGDVSARIGSSGSGSRSAATTMPSPMPNGNLHPHDPQDLRHNGNVVVAGRPNASRVPRRPIQKTQPPGSRRGGRNRASGGLCLQPPDGGTRVPEEPPAPPMDWEALEKHLAGLQFREQEVRNQGQARTNSTSAQKNERESIRQKLALGSFFDDGPGIYTSCSKSGKPSLSARLQSGMNLQICFVNDSGSDKDSDADDSKTETSLDTPLSPMSKQSSSYSDRDTTEEESESLDDMDFLTRQKKLQAEAKMALAMAKPMAKMQVEVEKQNRKKSPVADLLPHMPHISECLMKRSLKPTDLRDMTIGQLQVIVNDLHSQIESLNEELVQLLLIRDELHTEQDAMLVDIEDLTRHAESQQKHMAEKMPAK

SEQ ID NO: 499 - DNA, 1536 bp, Mus musculus
agcgagctcggtggctgcgcgcttcccagcacaggcagtgccactgcgcaggttgctcagcggaacagcatccattttaatctgcggggagtccctgcctaaccagggcgttctctcgcgcctgtggatgctcagcgctttccctgcgcaggcccagcagtccagctttggggtctgcgtcctaggatgtactgagatggtacatcaggagaactgctcgtaccaggcacagaagaatgagagagagtctatcagacagaagttggcactcggaagcttctttgacgatggcccaggaatctataccagctgcagcaaaagtgggaagccaagcctttctgcaagactacagagcgggatgaacctccagatatgctttgtcaatgacagcggcagtgacaaggacagcgatgcagatgacagtaagacggaaaccagcttggacacgcccttgtcccccatgagcaagcagagttcttcctattcggatagagacacaactgaggaggagtctgaatccctggatgacatggacttcctcacaaggcaaaagaagctacaagctgaagccaaaatggctctggccatggccaaaccaatggccaaaatgcaagtagaagtggaaaaacagaacaggaaaaagtctcccgtcgctgatcttctcccacacatgcctcacataagcgaatgtttgatgaaaagaagcttaaagcccaccgacctgagagacatgactatcgggcagctacaagtgatcgtcaatgacctccactcccagattgaaagtttgaatgaagagttggtccagctgctccttattcgagatgagctgcacacagaacaagatgccatgctggtggacattgaagacttgactagacacgctgagagtcagcagaagcacatggctgagaaaatgcccgcgaagtgaaagagagccatccaccagagaacaagctagaatttattttgcttctgtggtcgtaaaaattgctgttgctaaaggtggttccgaaacagacatcagtgttagtcattggtaacgtccgagcttactgtcccgtgactggccttcgcttcttaatttattttaatttctttctttccttttttttttttttttttttactcttgccacttactatcaggccttttaataaaacattgttacaagaactgtacagtacttaaaccaccaacaaccgtggataagcagagggtagttttgactttgtttttgtttagagactttaagttggagcagtattttaccattgactgtttcattcttcactgtagctttgaagaggaactgtaaatgacggtgctatacaagtcaaaatacatgcctgcctcgtagtgaagtcgtagctctccatactacgtatattttaatcagttttcaacattttgtgaatgttgactacctgaggtttattcttagatgtgctattaacattctgtcggatccacatggttccttgggagttttatgtataaatatgtaaaataaaaattaaaactttgtttcatatg

SEQ ID NO: 500 - protein, 267 aa, Mus musculus
MLSAFPAQAQQSSFGVCVLGCTEMVHQENCSYQAQKNERESIRQKLALGSFFDDGPGIYTSCSKSGKPSLSARLQSGMNLQICFVNDSGSDKDSDADDSKTETSLDTPLSPMSKQSSSYSDRDTTEEESESLDDMDFLTRQKKLQAEAKMALAMAKPMAKMQVEVEKQNRKKSPVADLLPHMPHISECLMKRSLKPTDLRDMTIGQLQVIVNDLHSQIESLNEELVQLLLIRDELHTEQDAMLVDIEDLTRHAESQQKHMAEKMPAK

SEQ ID NO: 501 - DNA, 3593 bp, Mus musculus
gcacaactggagactccggcagactagctggtccccagcctggcgcgctgcgagaggaggatagctctggagaagtggcggggtgcagtggtggcggctgcctcgacttccctcgtagtacactgaagaggacccttggagcagctccgggccccggggcgctggatgactagcaggaggaacgcgcccggcatctgggctggtgtgtgacaactgggcctgggtacccatgaggctgtgcagttcagtgtgattcatgaccgaggctacacgtctttgccctctctctcctcggtacttttcacacatgaggagaaggtgagcttcgcagaagacacgttcccagagtcagagaccccttgcccaccatgaagggagcctgcatccttgcatggctgttctcaagcctgggagtgtggagacttgctaggcccgagacccaggaccctgccaagtgccagagagctgagcaccctgtcgtctcttacaaagaaattggcccctggttacgggagttcagagccgagaatgctgtggatttctcgaggttaacatttgacccaggacagaaagaacttgtcgtaggagcgagaaactatctcttcagattagagcttgaggatctgtctctcatccaggctgtggagtgggagtgtgacgaagccaccaagaaggcctgttacagcaagggcaaatcgaaggaggaatgtcagaactacatacgagtgctcttagttggtggggaccggctattcacctgtgggaccaatgccttcacacctgtctgtaccatccgctcgttaagtaacctgactgagatccatgatcagatcagtggcatggcccgctgtccctacagtccccagcacaattctaccgccctactcactgccagtggtgagctctatgctgcaacagccatggatttcccagggcgagatccagccatttaccgaagtctgggcactttgcctcctcttcgaactgcacagtacaactccaaatggctcaatgaaccaaactttgtgtcttcctacgacatcggaaatttcacctacttcttcttccgagaaaacgccgtggaacatgactgtgggaagacggtgttctccagggctgcccgggtctgtaaaaatgacattggagggcgatttcttctggaggacacctggactaccttcatgaaggctcgcctcaactgctcccggcctggtgaggtgcccttctactacaatgagctgcagggtactttcttcctgccggagctggatctgatctatggtatcttcaccaccaatgtaaacagcatcgctgcctctgctgtctgtgtcttcaacctgagcgccatctcacaggccttcaatggacccttcaagtaccaagaaaactctcgctcagcctggctgccttatcccaaccccaaccccaattttcagtgcggcaccatggaccagggcctgtacgtaaacctgacggaaagaaacctacaggatgctcagaagttcattctgatgcatgaagtggtgcagccagtgaccacagtgccctctttcatggaggacaacagccgcttctcccacttagctgttgatgttgtgcaaggcagggagactctggtccacatcatttatctggccacagattatggcaccattaagaaagtacgagctcccctgagtcagagctcaggcagctgtttgctggaagagattgagcttttcccagagaggaggagtgagcccatcaggagcctgcagatcctccacagccagagtgtcctatttgtgggactacaggagcatgtggccaagatccccctgaagaggtgccacttccatcaaacacgcagtgcctgcattggcgctcaggacccttactgtggctgggatgcggtgatgaagaaatgcaccagcctggaggagagtctgagcatgacccagtgggatcagagcatccccacctgtccgaccagaaatctcactgtagatgggagctttggcccatggtcaccgtggacaccctgtacacacactgatggcactgctgtgggctcctgcctctgccggtcccgctcctgtgacagcccagctcctcagtgtggtggttggcagtgtgagggccctagaatggagatcaccaactgttccaggaatggaggctggactccctggacctcctggtctccgtgcagcacgacctgtggcattggcttccaagtgcggcagcgatcctgcagcaaccccacgcccaggcatggcgggcgcgtgtgcgtgggccagaacagggaggaaagatactgcaatgaacatttgctctgcccaccacacgtgttctggacaggctggggaccttgggaacggtgcacagcccagtgcgggggtggcattcaagcccgccggaggacctgtgaaaatgggcctgactgtgcaggatgcaatgtggaataccagccttgtaacaccaatgcatgcccggagctgaagaagaccacaccctggacaccctggacccctgtcaacatctctgacaatggaggtcactatgagcagcgtttccgctatacctgtaaagctcgcctgccagatccaaatttgctggaagtaggaagacagaggatagaaatgcggtactgttccagcgatggaaccagtggctgctccacagacggactttctggagactttctaagagctgggagatactctgctcatacagtcaatggggcatggtcagcctggacttcctggtcacagtgcagcagagactgcagcaggggcattcggaaccggaagcgtgtttgcaacaacccagaacccaagtttgggggcatgccatgccttggcccatcgctggagttccaggaatgcaacattttaccttgtccagtggatggtgtgtggtcttgctggtcatcctggtctaaatgttcagcaacctgtggaggtggccactacatgagaacccgttcttgttcgaatccagccccagcatatggaggggacatctgcctgggactgcacacagaagaggcactctgcaacacacagacctgcccagaaagctggtcagagtggtcagactggtctgtgtgcgatgcatctggtacccaggtccgtgctcggcagtgcatccttctgtttccagtgggcagccaatgttctggaaatactacagagagccggccttgtgtatttgactctaatttcatcccagaagtatctgtggcaagatccagcagcgtagaagaaaaaaggtgtggagagttcaacatgttccacatgatggccgtggggcttagcagttccattcttggctgcctcctcacactgcttgtctacacctactgccagaggtaccagcagcagtcccatgatgcaactgtcatccaccctgtctctcctgccgccctcaacagcagcataactaaccacatcaacaaactggacaaatatgattctgtggaggccatcaaggcatttaacaaaaacaacttgatcctagaggagagaaacaaatacttcaacccacatctcactgggaagacctattccaacgcctactttacagatctcaacaattatgatgaatactag

SEQ ID NO: 502 - protein, 1074 aa, Mus musculus
MKGACILAWLFSSLGVWRLARPETQDPAKCQRAEHPVVSYKEIGPWLREFRAENAVDFSRLTFDPGQKELVVGARNYLFRLELEDLSLIQAVEWECDEATKKACYSKGKSKEECQNYIRVLLVGGDRLFTCGTNAFTPVCTIRSLSNLTEIHDQISGMARCPYSPQHNSTALLTASGELYAATAMDFPGRDPAIYRSLGTLPPLRTAQYNSKWLNEPNFVSSYDIGNFTYFFFRENAVEHDCGKTVFSRAARVCKNDIGGRFLLEDTWTTFMKARLNCSRPGEVPFYYNELQGTFFLPELDLIYGIFTTNVNSIAASAVCVFNLSAISQAFNGPFKYQENSRSAWLPYPNPNPNFQCGTMDQGLYVNLTERNLQDAQKFILMHEVVQPVTTVPSFMEDNSRFSHLAVDVVQGRETLVHIIYLATDYGTIKKVRAPLSQSSGSCLLEEIELFPERRSEPIRSLQILHSQSVLFVGLQEHVAKIPLKRCHFHQTRSACIGAQDPYCGWDAVMKKCTSLEESLSMTQWDQSIPTCPTRNLTVDGSFGPWSPWTPCTHTDGTAVGSCLCRSRSCDSPAPQCGGWQCEGPRMEITNCSRNGGWTPWTSWSPCSTTCGIGFQVRQRSCSNPTPRHGGRVCVGQNREERYCNEHLLCPPHVFWTGWGPWERCTAQCGGGIQARRRTCENGPDCAGCNVEYQPCNTNACPELKKTTPWTPWTPVNISDNGGHYEQRFRYTCKARLPDPNLLEVGRQRIEMRYCSSDGTSGCSTDGLSGDFLRAGRYSAHTVNGAWSAWTSWSQCSRDCSRGIRNRKRVCNNPEPKFGGMPCLGPSLEFQECNILPCPVDGVWSCWSSWSKCSATCGGGHYMRTRSCSNPAPAYGGDICLGLHTEEALCNTQTCPESWSEWSDWSVCDASGTQVRARQCILLFPVGSQCSGNTTESRPCVFDSNFIPEVSVARSSSVEEKRCGEFNMFHMMAVGLSSSILGCLLTLLVYTYCQRYQQQSHDATVIHPVSPAALNSSITNHINKLDKYDSVEAIKAFNKNNLILEERNKYFNPHLTGKTYSNAYFTDLNNYDEY

SEQ ID NO: 503 - DNA, 3935 bp, Mus musculus
cccagagtcagagaccccttgcccaccatgaagggagcctgcatccttgcatggctgttctcaagcctgggagtgtggagacttgctaggcccgagacccaggaccctgccaagtgccagagagctgagcaccctgtcgtctcttacaaagaaattggcccctggttacgggagttcagagccgagaatgctgtggatttctcgaggttaacatttgacccaggacagaaagaacttgtcgtaggagcgagaaactatctcttcagattagagcttgaggatctgtctctcatccaggctgtggagtgggagtgtgacgaagccaccaagaaggcctgttacagcaagggcaaatcgaaggaggaatgtcagaactacatacgagtgctcttagttggtggggaccggctattcacctgtgggaccaatgccttcacacctgtctgtaccatccgctcgttaagtaacctgactgagatccatgatcagatcagtggcatggcccgctgtccctacagtccccagcacaattctaccgccctactcactgccagtggtgagctctatgctgcaacagccatggatttcccagggcgagatccagccatttaccgaagtctgggcactttgcctcctcttcgaactgcacagtacaactccaaatggctcaatgaaccaaactttgtgtcttcctacgacatcggaaatttcacctacttcttcttccgagaaaacgccgtggaacatgactgtgggaagacggtgttctccagggctgcccgggtctgtaaaaatgacattggagggcgatttcttctggaggacacctggactaccttcatgaaggctcgcctcaactgctcccggcctggtgaggtgcccttctactacaatgagctgcagggtactttcttcctgccggagctggatctgatctatggtatcttcaccaccaatgtaaacagcatcgctgcctctgctgtctgtgtcttcaacctgagcgccatctcacaggccttcaatggacccttcaagtaccaagaaaactctcgctcagcctggctgccttatcccaaccccaaccccaattttcagtgcggcaccatggaccagggcctgtacgtaaacctgacggaaagaaacctacaggatgctcagaagttcattctgatgcatgaagtggtgcagccagtgaccacagtgccctctttcatggaggacaacagccgcttctcccacttagctgttgatgttgtgcaaggcagggagactctggtccacatcatttatctggccacagattatggcaccattaagaaagtacgagctcccctgagtcagagctcaggcagctgtttgctggaagagattgagcttttcccagagaggaggagtgagcccatcaggagcctgcagatcctccacagccagagtgtcctatttgtgggactacaggagcatgtggccaagatccccctgaagaggtgccacttccatcaaacacgcagtgcctgcattggcgctcaggacccttactgtggctgggatgcggtgatgaagaaatgcaccagcctggaggagagtctgagcatgacccagtgggatcagagcatccccacctgtccgaccagaaatctcactgtagatgggagctttggcccatggtcaccgtggacaccctgtacacacactgatggcactgctgtgggctcctgcctctgccggtcccgctcctgtgacagcccagctcctcagtgtggtggttggcagtgtgagggccctagaatggagatcaccaactgttccaggaatggaggctggactccctggacctcctggtctccgtgcagcacgacctgtggcattggcttccaagtgcggcagcgatcctgcagcaaccccacgcccaggcatggcgggcgcgtgtgcgtgggccagaacagggaggaaagatactgcaatgaacatttgctctgcccaccacacgtgttctggacaggctggggaccttgggaacggtgcacagcccagtgcgggggtggcattcaagcccgccggaggacctgtgaaaatgggcctgactgtgcaggatgcaatgtggaataccagccttgtaacaccaatgcatgcccggagctgaagaagaccacaccctggacaccctggacccctgtcaacatctctgacaatggaggtcactatgagcagcgtttccgctatacctgtaaagctcgcctgccagatccaaatttgctggaagtaggaagacagaggatagaaatgcggtactgttccagcgatggaaccagtggctgctccacagacggactttctggagactttctaagagctgggagatactctgctcatacagtcaatggggcatggtcagcctggacttcctggtcacagtgcagcagagactgcagcaggggcattcggaaccggaagcgtgtttgcaacaacccagaacccaagtttgggggcatgccatgccttggcccatcgctggagttccaggaatgcaacattttaccttgtccagtggatggtgtgtggtcttgctggtcatcctggtctaaatgttcagcaacctgtggaggtggccactacatgagaacccgttcttgttcgaatccagccccagcatatggaggggacatctgcctgggactgcacacagaagaggcactctgcaacacacagacctgcccagaaagctggtcagagtggtcagactggtctgtgtgcgatgcatctggtacccaggtccgtgctcggcagtgcatccttctgtttccagtgggcagccaatgttctggaaatactacagagagccggccttgtgtatttgactctaatttcatcccagaagtatctgtggcaagatccagcagcgtagaagaaaaaaggtgtggagagttcaacatgttccacatgatggccgtggggcttagcagttccattcttggctgcctcctcacactgcttgtctacacctactgccagaggtaccagcagcagtcccatgatgcaactgtcatccaccctgtctctcctgccgccctcaacagcagcataactaaccacatcaacaaactggacaaatatgattctgtggaggccatcaaggcatttaacaaaaacaacttgatcctagaggagagaaacaaatacttcaacccacatctcactgggaagacctattccaacgcctactttacagatctcaacaattatgatgaatactagcagctcttatactttgggctcgttgtaaactcgctgctcctcaaaaccgtgctccatggctgcccatatttctgaggcttcagagatgacgtgtggaaccatttcaagtgcatttcaaaccaggactttcccatcgctaccaaaaaagtgcacacccttaaatgcctaaatgtggtgttgtgaaaatctggtctatagaaaacatttggttgttgcgaagtgagccatggtatgacattttgtattgtgctcatcctaaactctaactggtctactgtttttcaggagttttatttcataaatgtgccaaccatattgaaaagtgtctttggaaacatagcatcgtcatgcttttgagtgtagaggatcaggatgttttaacttggaaatgtctctttgtatctgccctagacacattccaggatcaatgtctccaccttcctcattacttttaacaatgaagtcataaaatggtcctgcattttgccaagagcacagcattgctccccacctagacctccttctccatcccgctcatcgtctctctgccaacgttttgtgaaaactaaaagaatcctaattatgtacagataaaaattgtattatattttttgtacttaatgttttgtgtaaatagtttgccttgttcagttgtatgtgagtattgaaataaaccctgccat

SEQ ID NO: 504 - protein, 1074 aa, Mus musculus; identical to SEQ ID NO: 502

SEQ ID NO: 505 - DNA, 1413 bp, Mus musculus
gggagccgggcgcgagcagggcgcagccgcgagggaggcgcgggggaggccagcgggagccggagcaccagcagcagccagtgtcggtaaagagcagccagagccacagtcgcgatggccgtggcggtggggagaccgagtaatgaagagctgcgaaacttatcactttctggccatgttggatttgacagtctgcccgaccagctggtcaacaaatccacttctcaaggattctgtttcaacatcctgtgcgtgggtgagacaggtattggcaaatccacattgatggacactttattcaacaccaaatttgaaagtgacccagctactcacaacgagccaggcgtccggttaaaagccagaagctatgaactccaggaaagcaacgtacggctgaagctaacaatcgttgacacagtgggatttggagaccagattaataaagatgacagctataagcctatagtggaatacattgacgcccagtttgaggcctacttgcaagaagaattgaaaattaaacgttctctcttcaactatcatgacacaaggattcacgcctgcctttactttatcgcccccacgggacattcactgaagtccctggacctggtcaccatgaagaagctggacagcaaggtgaacatcatcccgatcatcgcgaaagccgacaccatcgccaaaaacgaattgcacaaattcaagagtaagatcatgagtgaactagttagcaacggagtccagatatatcagttccccacagatgaggaaacagtggcagagattaacgcaacgatgagtgtccatctcccattcgcagtggtcggcagtactgaagaggtcaagattggcaacaagatggcgaaggccaggcagtacccttggggtgtggtgcaggttgagaacgaaaaccactgtgattttgtgaagctgcgggagatgctgatccgagtgaacatggaggacctgcgagagcagacgcacactcgccactacgagttgtatcggcgctgcaagcttgaggagatgggcttcaaggacacggaccccgacagcaagcccttcagtcttcaggagacctacgaagcaaagaggaacgagttcctgggggagctacagaagaaagaggaggagatgagacagatgttcgtcatgagggtgaaggagaaagaggcggagctcaaggaggcagaaaaagagcttcatgagaagttcgacctcctgaagcggactcaccaagaggagaagaagaaggtggaagataagaagaaggagcttgaggaggaggtgagcaacttccagaaaaagaaggcggcggctcagctcttgcaatcccaggcccagcagtctggggcccagcaaaccaagaaggacaaggataagaaaaatagtccctggctctgcacggaataa

SEQ ID NO: 506 - protein, 423 aa, Mus musculus
NEELRNLSLSGHVGFDSLPDQLVNKSTSQGFCFNILCVGETGIGKSTLMDTLFNTKFESDPATHNEPGVRLKARSYELQESNVRLKLTIVDTVGFGDQINKDDSYKPIVEYIDAQFEAYLQEELKIKRSLFNYHDTRIHACLYFIAPTGHSLKSLDLVTMKKLDSKVNIIPIIAKADTIAKNELHKFKSKIMSELVSNGVQIYQFPTDEETVAEINATMSVHLPFAVVGSTEEVKIGNKMAKARQYPWGVVQVENENHCDFVKLREMLIRVNMEDLREQTHTRHYELYRRCKLEEMGFKDTDPDSKPFSLQETYEAKRNEFLGELQKKEEEMRQMFVMRVKEKEAELKEAEKELHEKFDLLKRTHQEEKKKVEDKKKELEEEVSNFQKKKAAAQLLQSQAQQSGAQQTKKDKDKKNSPWLCTE

SEQ ID NO: 507 - DNA, 5023 bp, Mus musculus
gcagctccctgtggccgctggcgcactcggcgggtgctgcgctgcgaggagggcggctctccgaagccgcgggtcctgtcgtcgcgctcctcatccagcatggctttcgccaatttccgccgcatcttgcggttatccaccttcgagaagagaaagtcccgtgaatatgagcacgtccgccgggacctggaccccaacgatgtatgggagatcgtgggcgagctgggagacggcgccttcggcaaagtctacaaggccaaaaacaaggagaccggtgccctggcagcagccaaagtcatagagaccaagagcgaggaggagctggaggactacatcgtggagatagagatcctggccacctgtgaccacccgtatatcgtgaagctcctgggggcctattactatgatgggaagctctggatcatgattgagttctgccctgggggagctgtggatgccatcatgctggagctggatcgaggcctcactgagccccagattcaggtcgtatgccgccagatgttggaggctctcaacttcctgcacggcaagaggatcatccaccgagacctgaaagctggcaacgtgcttatgacccttgagggggacatcaggctggctgattttggtgtgtctgccaagaatctgaaaactctgcaaaagcgagactccttcatagggacaccttactggatggcccctgaggtggtgctgtgtgaaaccatgaaggacgccccctatgactacaaggctgacatctggtccttgggcatcacgctgatcgagatggcgcagatcgagcccccacaccacgagctcaaccccatgcgggtcctgctcaagattgccaagtcggaccctcctaccctgcttacaccctccaagtggtctgtggagttccgagactttctgaagatagccttggataagaacccagaaacccggcccagtgctgcacagctgctgcagcatcccttcgtcagcagagtcaccagcaataaggctcttcgggagctggtggccgaggcaaaggcggaggtaatggaggagattgaggatggcagggaggacggagaagaggaggatgctgtggatgctgttccgcccctggtcaaccacactcaggactctgccaatgtaactcagccaagcctcgactccaacaagcttctccaggattcttccacccccctgcctcccagccagcctcaggagcctgtgagcgggtcctgtagccaaccctctggggatggacccctccaaaccaccagccctgcagatgggctctccaagaatgacaatgacttaaaggtgcctgttcccctccggaagtcccggccactgtccatggatgccagaattcagatggatgaagagaaacaaatccctgaccaggatgagaacccgagtcctgcagccagcaagtcccaaaaggccaaccagagccgacctaacagcagtgccctggagaccttgggtggcgaggctctgaccaacggtggcctggaactccccagctctgtcactccaagccattctaagagggcctcggactgtagcaacctgtctacctcagagagcatggactatggcacctccctgtctgctgacctgtcactgaacaaagaaacgggctcattgtctctcaagggctcaaaactgcacaataagaccctgaaacggacccgccggtttgtggtggatggtgtggaggtgagcatcaccacctccaagatcatcagcgaggatgagaagaaagacgaggagatgagatttctcaggcaagagctccgagagcttcggcttctgcagaaagaagaacatcggaaccagacgcagctgagcagcaagcacgagctgcagctggagcagatgcacaaacgttttgaacaagaaatcaacgccaagaagaaattctatgacgtggagctagaaaacctggagcggcagcagaagcagcaggtagagaagatggagcaggaccacagcgtgcgccgcaaagaggaggccaagcggatccgcctggagcaggatcgagactacgccaagttccaagagcaactcaagcaaatgaagaaggaggtgaagagtgaggttgagaaactgccccggcagcagcggaaggagagcatgaagcagaagatggaggaacactctcagaagaaacagcggctggaccgggactttgtagccaagcagaaggaggacctggagctggccatgaggaagctcaccacggaaaacaggcgtgagatctgcgacaaggaacgagattgccttagcaagaagcaggagctcctccgagaccgtgaggcggccctgtgggagatggaggagcaccagttgcaggagcgacatcagctggtgaagcagcaactgaaggaccagtacttcctgcagcggcatgacctgctgcgtaagcatgagaaggagcgggaacagatgcagcgctacaaccagcgcatgatggagcagctgaaggtcagacagcaacaggagaaggcgcggctacccaagatccagaggagcgacggcaagacgcgcatggccatgtacaagaagagcctgcacatcaacggtgcgggcagtgcctctgagcagcgcgagaagatcaagcagttctcccagcaggaggagaagaggcagaaggcggagaggctgcagcagcagcagaaacacgagaaccagatgcgagacatggtggcgcagtgtgaaagcaacatgagcgagctacagcagctgcagaatgaaaagtgtcatctgttggtagagcatgaaacccagaagctgaaggccctggatgagagccacaaccagagcctgaaggaatggcgagacaagcttcggccacgcaaaaaggccctggaagaggatttgaaccagaagaagcgggaacaggaaatgttcttcaaattaagcgaggaggcagagcccagacccaccacacccagcaaagccagcaacttcttcccctacagctctggggatgcttcctaacacccacaagcctgggctgcggtgggcagcgtggctactggggcccccaagcctctatgaacaagtgactcaggacctcttcctcttgcttctgtgccagctcaattacccatccccctgcagcgccccagttgtccacagtgccaccttggtgcacggtgacctcctcaagactcagattcccatcacctaggagtgatttagactgttgaggtcaggggccaggcaggatgggtgaacccctcctgtttgcccaaacaccagctctactgtctgtgggcacaagcgctactaatgacatcaccgcgaacgcatccttattgtgatccttgtgggttttttgtttgtttgtctgtttgtttgtttgccttcagtaattcctcacagtgtcgggaaacatccctaagagccacttgggttctcagcagccagctcccgggtgtccccattcccttgtttcacatagctgactttgctttgtgtatgtcggggtagggagcgtggagaaggatgccagagatgcctgttctgctgattctgacattgtatcccatcttattttcctctccctgtgagacatgcaatacacacacacacacacacacacacacacacacacacacacacacacacacacactgcaaatacataacttggcccccctgacaccacccaggctgcctctgctgtgacctcctaggaccaatgcattggaacctgcttgcttgcctcctgagcctgatccagggccactgagcatgtcaggtggagcagctggtggggccatgctgagtgctggcgccagaacccagagaaggcacaggctgtactgccagcctgcaactcatttggctgcacacaggatcccgtgttcaggggtacacccccctccacacttgacttctgctgcctagcacgtgccaatctcacccttgcccgcttgtctgcaggtacccaggaaggcttttgacttctgccctagtcctgtactggagtcccactgtacatttccactaagctttggacttctctgttcaggaagaactgttccccaccctcaggaacatgctgcgctcagggaaatgtggagcctccatgactgggccttcgggctgctcaggtagcctcccaagaggctgagccccatagaagaaaagcagcctaagtgctcagttacagtacaggcaaatggctggctgcctcagacaccctctttttaaaaagccccttcccagggacaatggggtggggtgggggaggggggacccaggcggttgagtctggcgagtggctgagaccttagcagtatttctctgtcactgcccgatgctgaagcaactttctaaaaagtttcctcaaatgaaaactgggtgcttgggagggagtgggctagaaaaaaaataggaaaacaggtcttgggactcccagatctagtgtgcagtaaagaagctcacagaaccccaggaaggccatagttctcaggggagcgagtgagccttcgcttgctttcaggcctcacatcaaggagttgactcagagggcagatgggccaggccacgccacaggaggccgggcagggatacttgctttcaggggacttgacagtggctattaggcaaaatgctagttttgtggttcatataacagtctttgaccgctccctgacatcattcgtaatgttccagtcctttgttgaatctgcacttagtaccacctgagccctggtagctctgctgtgccttttggagtggggtctagcctagtcttccagcctcataattatagcgtaagtgcaatgcctgccaccaccaagggcccacgcagtattcctcatgccctgtgctaatcttttctgtataggaacaggcagaagtgtttttagcgcagtaaatataactaacttatatttcccttcatgaaggatggaaataacgtgtatgcatttccaagcaccgtggatatttgtaaactgttctctgcaaacaaaaaaagaatgtaaatatgcttctaataaagtaataaggtg

SEQ ID NO: 508 - protein, 965 aa, Mus musculus
MAFANFRRILRLSTFEKRKSREYEHVRRDLDPNDVWEIVGELGDGAFGKVYKAKNKETGALAAAKVIETKSEEELEDYIVEIEILATCDHPYIVKLLGAYYYDGKLWIMIEFCPGGAVDAIMLELDRGLTEPQIQVVCRQMLEALNFLHGKRIIHRDLKAGNVLMTLEGDIRLADFGVSAKNLKTLQKRDSFIGTPYWMAPEVVLCETMKDAPYDYKADIWSLGITLIEMAQIEPPHHELNPMRVLLKIAKSDPPTLLTPSKWSVEFRDFLKIALDKNPETRPSAAQLLQHPFVSRVTSNKALRELVAEAKAEVMEEIEDGREDGEEEDAVDAVPPLVNHTQDSANVTQPSLDSNKLLQDSSTPLPPSQPQEPVSGSCSQPSGDGPLQTTSPADGLSKNDNDLKVPVPLRKSRPLSMDARIQMDEEKQIPDQDENPSPAASKSQKANQSRPNSSALETLGGEALTNGGLELPSSVTPSHSKRASDCSNLSTSESMDYGTSLSADLSLNKETGSLSLKGSKLHNKTLKRTRRFVVDGVEVSITTSKIISEDEKKDEEMRFLRQELRELRLLQKEEHRNQTQLSSKHELQLEQMHKRFEQEINAKKKFYDVELENLERQQKQQVEKMEQDHSVRRKEEAKRIRLEQDRDYAKFQEQLKQMKKEVKSEVEKLPRQQRKESMKQKMEEHSQKKQRLDRDFVAKQKEDLELAMRKLTTENRREICDKERDCLSKKQELLRDREAALWEMEEHQLQERHQLVKQQLKDQYFLQRHDLLRKHEKEREQMQRYNQRMMEQLKVRQQQEKARLPKIQRSDGKTRMAMYKKSLHINGAGSASEQREKIKQFSQQEEKRQKAERLQQQQKHENQMRDMVAQCESNMSELQQLQNEKCHLLVEHETQKLKALDESHNQSLKEWRDKLRPRKKALEEDLNQKKREQEMFFKLSEEAEPRPTTPSKASNFFPYSSGDAS

SEQ ID NO: 509 - DNA, 1848 bp, Mus musculus
cagccccttcccagtccccggaggccgccgcgccagccgcgcagatcgagacctttcccggccccacaggccggctctggacgtgagaccccggccgcctccggcaaggagaggcgggggtcgagtcgccctgtccaaagatctcaccacatctcttctcctatctccaaggaccatgaccttggggagcttcagaaggggccttttgatgctgtcggtggcctttggcctaaccaggggagacttggcgaagccttccaagctggtgaactgcacttgtgagagcccacactgcaagagaccattctgccaggggtcatggtgcacagtggtgctggttcgggagcagggcaggcacccccaggtctatcggggctgcgggagcctgaaccaggagctctgcttgggacgtcccacagagtttctgaaccatcactgctgctatagatccttctgcaaccacaacgtgtctctgatgctggaggccacccaaactccttcggaggagccagaagttgatgcccatctgcctctgatcctgggtcctgtgctggccttgccggtcctggtggccctgggtgctctaggcttgtggcgtgtccggcggaggcaggagaagcagcgggatttgcacagtgacctgggcgagtccagtctcatcctgaaggcatctgaacaggcagacagcatgttgggggacttcctggacagcgactgtactacgggcagcggctcggggctccccttcttggtgcagaggacggtagctcggcaggttgcgctggtagagtgtgtgggaaagggccgatatggtgaggtgtggcgcggttcgtggcatggcgagagtgtggcggtcaagattttctcctcacgagatgagcagtcctggttccgggagacggagatctacaacacagttctgcttagacacgacaacatcctaggcagcttcatcgcctccgacatgacttcgcggaactcgagcacgcagctgtggctcatcacccactaccatgaacacggctccctctatgactttctgcagaggcagacgctggagccccagttggccctgaggctagctgtgtccgcggcctgcggcctggcgcacctacatgtggagatctttggcactcaaggcaaaccagccattgcccatcgtgacctcaagagtcgcaatgtgctggtcaagagtaacttgcagtgttgcattgcagacctgggactggctgtgatgcactcacaaagcagcgattacctggatatcggcaacaacccccgagtgggtaccaaaagatacatggcacccgaggtgctggatgagcacatccgcacagactgctttgagtcgtacaagtggacagacatctgggcctttggcctagtgctatgggagatcgcccggcggaccatcatcaatggcattgtggaggattacaggccacctttctatgacatggtacccaatgaccccagttttgaggacatgaaaaaggtggtgtgcgttgaccagcagacacccaccatccctaaccggctggctgcagatccggtcctctccgggctggcccagatgatgagagagtgctggtaccccaacccctctgctcgcctcaccgcactgcgcataaagaagacattgcagaagctcagtcacaatccagagaagcccaaagtgattcactagcccagggccaccaggcttcctctgcctaaagtgtgtgctggggcagaagacatagcctgtctgggtagagggagtgaagagagtgtgcacgctgccctgtgtgtgcctgctcagcttggctcccagcccatccagccaaaaatacagctgagctgaaattc

SEQ ID NO: 510 - protein, 503 aa, Mus musculus
MTLGSFRRGLLMLSVAFGLTRGDLAKPSKLVNCTCESPHCKRPFCQGSWCTVVLVREQGRHPQVYRGCGSLNQELCLGRPTEFLNHHCCYRSFCNHNVSLMLEATQTPSEEPEVDAHLPLILGPVLALPVLVALGALGLWRVRRRQEKQRDLHSDLGESSLILKASEQADSMLGDFLDSDCTTGSGSGLPFLVQRTVARQVALVECVGKGRYGEVWRGSWHGESVAVKIFSSRDEQSWFRETEIYNTVLLRHDNILGSFIASDMTSRNSSTQLWLITHYHEHGSLYDFLQRQTLEPQLALRLAVSAACGLAHLHVEIFGTQGKPAIAHRDLKSRNVLVKSNLQCCIADLGLAVMHSQSSDYLDIGNNPRVGTKRYMAPEVLDEHIRTDCFESYKWTDIWAFGLVLWEIARRTIINGIVEDYRPPFYDMVPNDPSFEDMKKVVCVDQQTPTIPNRLAADPVLSGLAQMMRECWYPNPSARLTALRIKKTLQKLSHNPEKPKVIH

SEQ ID NO: 511 - DNA, 2434 bp, Mus musculus
actgttgtcttagccggtttcactgctcccctcagtctcttttgggctctttccgggcatcgggacgatgaccgtcaaagccgaggctgctcgaagcacccttacctactccagaatgaggggaatggtagcgattctcatcgcttttatgaaacagagaaggatgggcctgaacgattttattcagaagattgccagcaacacctatgcatgcaaacacgctgaagttcagtccattttgaaaatgtcccatcctcaggagccggagcttatgaacgctaacccctctcctccgccaagtccctctcaacaaatcaacctgggtccgtcctccaaccctcacgccaaaccctccgactttcacttcttgaaagtgatcggaaagggcagttttggaaaggttcttctggctaggcacaaggcagaagaagtattctatgcagtcaaagttttacagaagaaagccatcctgaagaagaaagaggagaagcatattatgtcagagcggaatgttctgttgaagaatgtgaagcaccctttcctggtgggccttcacttctcattccagaccgctgacaagctctactttgtcctggactacattaatggtggagagctgttctaccatctccagagggagcgctgcttcctggaaccacgggctcgattctacgcagctgaaatagccagtgccctgggctatctgcactccctaaacatcgtttatagagacttaaaacctgagaatattctcctagactcccaggggcacatcgtcctcactgactttgggctctgcaaagagaatattgagcataacgggacaacatctaccttctgtggcacgcctgagtatctggctcctgaggtcctccataagcagccgtatgaccggacggtggactggtggtgtcttggggctgtcctgtatgagatgctctacggcctgcccccgttttatagccggaacacggctgagatgtacgacaatattctgaacaagcctctccagttgaaaccaaatattacaaactcggcaaggcacctcctggaaggcctcctgcagaaggaccggaccaagaggctgggtgccaaggatgactttatggagattaagagtcatattttcttctctttaattaactgggatgatctcatcaataagaagattacacccccatttaacccaaatgtgagtgggcccagtgaccttcggcacttcgatcccgagtttaccgaggagccggtccccagctccatcggcaggtcccctgacagcatccttgtcacggccagtgtgaaggaagcagcagaagccttcctcggcttctcctatgcacctcctgtggattccttcctctgagtgctcccgggatggttctgaaggacttcctcagcgtttcctaaagtgttttcgttagcctttggtggagttgccagctgacagaacattttaaaagaatttgcacacctggaagcttggcagtctcgcctgcccggcgtggcgcgacgcagcgcgcgctgcttgatgggagctttccgaagagcacaccctcctctcaatgagcttgtgaggtcttcttttcttctcttccttccaacgtggtgctagctccaggcgagcgagcgtgagagtgccgcctgagacagacaccttggtctcagttagaaggaagatgcaggtctaagaggaatccccgcaggtctgtctgagctgtgatcaagaatattctgcaatgtgccttttctgagatcgtgttagctccaaagctttttcctatcgcagagtgttcagtttgtgtttgtttgtttttgttttgttttgtttttcccttggcggatttcccgtgtgtgcagtggcgtgagtgtgctatgcctgatcacagacggttttgttgtgagcatcaatgtgacacttgcaggacactacaatgtgggacattgtttgtttcttccacatttggaagataaatttatgtgtagactgttttgtaagatatagttaataactaaaacctattgaaacggtcttgcaatgacgagcattcagatgcttaaggaaagcattgctgctacaaatatttctatttttagaaagggtttttatggaccaatgccccagttgtcagtcaaagccgttggtgttttcattgtttaaaatgtcacctataaaacgggcattatttatgttttttttccctttgttcatattcttttgcattcctgattattgtatgtatcgtgtaaaggaagtctgtacattgggttataacactagatatttaaacttacaggcttatttgtaaaccatcattttaatgtactgtaattaacatgggttataatatgtacaattcctcctccttaccacacaactttttttgtgtgcgataaaccaattttggtttgcaataaaatcttgaaaactatttgc

SEQ ID NO: 512 - protein, 431 aa, Mus musculus
MTVKAEAARSTLTYSRMRGMVAILIAFMKQRRMGLNDFIQKIASNTYACKHAEVQSILKMSHPQEPELMNANPSPPPSPSQQINLGPSSNPHAKPSDFHFLKVIGKGSFGKVLLARHKAEEVFYAVKVLQKKAILKKKEEKHIMSERNVLLKNVKHPFLVGLHFSFQTADKLYFVLDYINGGELFYHLQRERCFLEPRARFYAAEIASALGYLHSLNIVYRDLKPENILLDSQGHIVLTDFGLCKENIEHNGTTSTFCGTPEYLAPEVLHKQPYDRTVDWWCLGAVLYEMLYGLPPFYSRNTAEMYDNILNKPLQLKPNITNSARHLLEGLLQKDRTKRLGAKDDFMEIKSHIFFSLINWDDLINKKITPPFNPNVSGPSDLRHFDPEFTEEPVPSSIGRSPDSILVTASVKEAAEAFLGFSYAPPVDSFL

SEQ ID NO: 513 - DNA, 1224 bp, Mus musculus
ggaactagggatagtcgagtgtctggagtcgtgcgccggagtcagaactgcgcctaccgtcccaggtgtcggttgctggagcagaacaagctagcgatgctacggcagccgcttcctgattggctgcgtgtggctccctcttcgttctgattggccgcgagtgatctgtaggatgctgagcaaaggtctgaagcgcaagcgggaggaggaggagacgatggaagccctctccgtggactcgtgctggttggatccgagccacccggcagtggcgcagaccccgccgacggtggcttctagctccctctttgacctctcagtggtcaagctccaccacagcctgcggcagagcgagccggacctccggcacctggtgcttgtggtgaacacactgaggcgcatccaggcgtccatggaacccgcacctgtcctgccgcctgagcccatccagcccccagccccttctgtggcagacagccttctggctagctcagatgctggcctctcagcctccatggccagcctcctggaagatctcaaccacattgaggacctgaaccaggccccccaaccccaagcagatgaggggcctccaggccgctccatcggggggatctcacccaacctgggtgccttggacttgctaggcccagccactggctgtctgctggacgatggactggagggcctgtttgaggacatcgatacctccatgtacgacagtgaactttggttaccagcctctgagggtctcaagcccggccctgagaatggcccagccaaggaggagcctccagagttggatgaggcggagttggactacctcatggatgtactagtaggcacacaggcactggaaaggccaccagggcctgggcgctgacccttaggacccagggagaattgacttggatctgagttgagcctggtggtgacaccaacccactttgacacgacacaggtggcgtcccctcacagaggagagccagggtcactttggagagactgtactgagtcctgggaacttcacatccatccacctgtcttgaccagtgaaggagttggaaatgagccccgagtggtgaaatgacagggcccagtgacagtaatggtgtttgggccaggctggggttgaactgggataatagtttgggctatcccatcccattatccccagtgtgggaagagacctcataattttttgaaattataaccagctttggg

SEQ ID NO: 514 - protein, 236 aa, Mus musculus
MLSKGLKRKREEEETMEALSVDSCWLDPSHPAVAQTPPTVASSSLFDLSVVKLHHSLRQSEPDLRHLVLVVNTLRRIQASMEPAPVLPPEPIQPPAPSVADSLLASSDAGLSASMASLLEDLNHIEDLNQAPQPQADEGPPGRSIGGISPNLGALDLLGPATGCLLDDGLEGLFEDIDTSMYDSELWLPASEGLKPGPENGPAKEEPPELDEAELDYLMDVLVGTQALERPPGPGR

SEQ ID NO: 515 - DNA, 1182 bp, Mus musculus
agaactgcgcctaccgtcccaggtgtcggttgctggagcagaacaagctagcgatgctacggcagccgcttcctgattggctgcgtgtggctccctcttcgttctgattggccgcgagtgatctgtaggatgctgagcaaaggtctgaagcgcaagcgggaggaggaggagacgatggaagccctctccgtggactcgtgctggttggatccgagccacccggcagtggcgcagaccccgccgacggtggcttctagctccctctttgacctctcagtggtcaagctccaccacagcctgcggcagagcgagccggacctccggcacctggtgcttgtggtgaacacactgaggcgcatccaggcgtccatggaacccgcacctgtcctgccgcctgagcccatccagcccccagccccttctgtggcagacagccttctggctagctcagatgctggcctctcagcctccatggccagcctcctggaagatctcaaccacattgaggacctgaaccaggccccccaaccccaagcagatgaggggcctccaggccgctccatcggggggatctcacccaacctgggtgccttggacttgctaggcccactggctgtctgctggacgatggactggagggcctgtttgaggacatcgatacctccatgtacgacagtgaactttggttaccagcctctgagggtctcaagcggccctgagaatggcccagccaaggaggagcctccagagttggatgaggcggagttggactacctcatggatgtactagtaggcacacaggcactggaaaggccaccagggcctgggcgctgacccttaggacccagggagaattgacttggatctgagttgagcctggtggtgacaccaacccactttgacacgacacaggtggcgtcccctcacagaggagagccagggtcactttggagagactgtactgagtcctgggaacttcacatccatccacctgtcttgaccagtgaaggagttggaaatgagccccgagtggtgaaatgacagggcccagtgacagtaatggtgtttgggccaggctggggttgaactgggataatagtttgggctatcccatcccattatccccagtgtgggaagagacctcataattttttgaaattataaccagctttgggaaatacc

SEQ ID NO: 516 - protein, 234 aa, Mus musculus
MLSKGLKRKREEEETMEALSVDSCWLDPSHPAVAQTPPTVASSSLFDLSVVKLHHSLRQSEPDLRHLVLVVNTLRRIQASMEPAPVLPPEPIQPPAPSVADSLLASSDAGLSASMASLLEDLNHIEDLNQAPQPQADEGPPGRSIGGISPNLGALDLLGPLAVCWTMDWRACLRTSIPPCTTVNFGYQPLRVSSGPENGPAKEEPPELDEAELDYLMDVLVGTQALERPPGPGR

SEQ ID NO: 517 - DNA, 3075 bp, Mus musculus
gagcgggggaggcccatcagcccctggtgtcttgagcctggagcagccacatgctagcaaaccagagactctgcacagcttgcaaagatgacagagatgcccaagaaaacaggcagaaagttcaagttcttcaagttcaagggccttgggagcctttccaatctcccgcggtccttttctctgagacggtcttcagcctctgctagtatccggtcttgtccggagcctgacacctttgaagccacacaggatgacatggtgacactcccaaagagtcctcctgcctatgcacgttctagtgacatgtacagccacatgggtaccatgccccgccctaacatcaagaaggctcagaaacaacaggctgtccagaaggcccaggaggtcagccgagagtcgcacctggtttctcgaaggctgccagagccaccagacttagaggcagccaaggaggcaggggagggaactgaagccctactggaggacacggcaccttcagcagtagaagtggaccctatgagggaactggaggatctcacagtagacacagagaaggagcaagtccctggggatgtgagcccagaaaggactgctgcagagctggaggccgctggggactatgtgaagttctccaaggagaagtacattcttgactcctcgccagagaaactgcacaaggagctggaagaggaactgaagctcagcagcacggacctccgtagccatgcctggtaccacggacgcatccctcgtgaggtctctgagactctggtgcagcggaacggcgacttcctcatccgagactcactcaccagcctaggggactatgtgctcacgtgccgctggcacaatcaggccttgcacttcaagatcaacaaggtggtggtgaaggccggagagagctacacccacatccggtacctcttcgagcaggagagcttcgaccacgtgcctgccctcgtgcgctaccacgtgggcagccgtaaggccgtgtccgaacagagcggggctatcatctactgccctgtcaaccgcaccttcccactgcgctacctcgaggccagctatggcctgagccagggcagcagcaagactgccagcccagccagcccctcaggctccaagggcagccacatgaagaggcgaagcattaccatgactgatggactcaccactgacaaggtcacccgcagcgatggctgccccaacagcacctcattaccccatcctcgagactccatccgaaactgtgccctcagcatggaccagatcccagatctccactcacccctgtctcctatctccgagagccccagctctcctgcctatagcactgtaacccgagtccatgctccttctgccaccccctctacttcagcacagcctgcctccccagttgcccgccgctccagcgaacctcagctatgtcctggaaatactccaaagcctcctggggagtcagacagggcccctcacgcaagcccatcccacaccctctgcaaggcctcgccatcaccatcactcagcagctacagtgacccggactctggtcactactgtcagctccagcctccggtccgtggcagccgagagcaggccgcaggagagactccccggaaggctaggggctccggagagaggcaaaaggaactgttagaaaatggagtctctgacggggagtggggcaagaccttcacagtccctgtagtagaagccacctcctctttcaacctggctaccttccagtcccagctgatccccaaggagaaccggcctctggaggtggcccttctgcgcaaggtcaaggagctgctgtctgaggtggatgcccggacactggcccggcatgtcaccaaggttgactgcctggttgctaggatactgggcgttaccaaggagatgcagaccctaatgggagtccgctggggcatggagctgctcaccctcccccatggccggcagctacgactagacctgctggaaaggttccacaccatgtccatcatgctggcagtggatatcctgggctgcacaggctcggcggaggagcgggcagctctgctgcacaagaccatacagctggcggccgagctgcgggggacgatgggcaacatgttcagcttcgccgctgtcatgggcgccctggagatggcccagatttcaaggctggagcagacatggatgaccctgcgacagcgacacacggagggtgccattctgtacgagaagaagctcaagcctttcctcaagagcctgaacgagggcaaagaaggcccaccgctgagcaacaccacgtttccacacgtacttcctttcattactctgctggaatgtgactctgcccccgccgagggtcctgaaccttggggcagcacagaacacggtgtggaggttgtgctagcccacctggaggccgcccgcactgtggcccaccacgggggcctctaccacaccaacgctgaggtcaagctgcaagggttccaagcccgaccggagctcctggaagtattcagcacagagttccagatgcggctcctctggggcagccagggtgccaacagcagccaggcctggcgctatgagaagtttgacaaagtcctcactgccttgtcccacaagctggaacctgccatccgctctagcgagctgtgaccccggagatctcgcctctctgcagctgcgggcagcatcggcggcagaggggctcaggacattccctccagagcaccacagggacactgtgatcagcccaagaatgttctgggttcaaatccaggatctcccttgcacttccagggtcctgaatggactctgagctccattcttccatcacacacgcgccaagtctcccttccaaatggacaggaacctctgctcctcccaccggcttgcgctggccccccttttgctgaggttccctgtttttgagccatgggaggctccccacccctcttccttcctgcaggcatctatgcctagaggtgccacagcctccatcttactgtaaataagtctggtgtaaatgtatgtacagaagccatgctctctttcatataataaactttaatgactctt

SEQ ID NO: 518 - protein, 854 aa, Mus musculus
MTEMPKKTGRKFKFFKFKGLGSLSNLPRSFSLRRSSASASIRSCPEPDTFEATQDDMVTLPKSPPAYARSSDMYSHMGTMPRPNIKKAQKQQAVQKAQEVSRESHLVSRRLPEPPDLEAAKEAGEGTEALLEDTAPSAVEVDPMRELEDLTVDTEKEQVPGDVSPERTAAELEAAGDYVKFSKEKYILDSSPEKLHKELEEELKLSSTDLRSHAWYHGRIPREVSETLVQRNGDFLIRDSLTSLGDYVLTCRWHNQALHFKINKVVVKAGESYTHIRYLFEQESFDHVPALVRYHVGSRKAVSEQSGAIIYCPVNRTFPLRYLEASYGLSQGSSKTASPASPSGSKGSHMKRRSITMTDGLTTDKVTRSDGCPNSTSLPHPRDSIRNCALSMDQIPDLHSPLSPISESPSSPAYSTVTRVHAPSATPSTSAQPASPVARRSSEPQLCPGNTPKPPGESDRAPHASPSHTLCKASPSPSLSSYSDPDSGHYCQLQPPVRGSREQAAGETPRKARGSGERQKELLENGVSDGEWGKTFTVPVVEATSSFNLATFQSQLIPKENRPLEVALLRKVKELLSEVDARTLARHVTKVDCLVARILGVTKEMQTLMGVRWGMELLTLPHGRQLRLDLLERFHTMSIMLAVDILGCTGSAEERAALLHKTIQLAAELRGTMGNMFSFAAVMGALEMAQISRLEQTWMTLRQRHTEGAILYEKKLKPFLKSLNEGKEGPPLSNTTFPHVLPFITLLECDSAPAEGPEPWGSTEHGVEVVLAHLEAARTVAHHGGLYHTNAEVKLQGFQARPELLEVFSTEFQMRLLWGSQGANSSQAWRYEKFDKVLTALSHKLEPAIRSSEL

SEQ ID NO: 519 - DNA, 2277 bp, Mus musculus
atggcttgctcgaggccccccagccagtgtgaccccacaaccctgccccccgggccacctgccggacgctggcctctacccttcagcagacgccggagagagatgagtagcaacaaagagcagcggtcagcagtgtttgtgatcctctttgccctcatcaccatcctcatcctctacagctccaacagtgccaacgaggtcttccactacggctccctgcggggccgcacgcgtcggccagtcaacctcaagaagtggagtttctccagcgcctacttccctatcctcggcaacaagacgctgccgtccaggtgcaaccagtgtgtgatcatcaccagctccagccacctgctgggcaccaaactgggccctgagattgagcgggctgagtgcaccatccgcatgaacgatgctcccacctctggctactcggctgacgtcggaaacaaaaccaccttccgcgtagtggcccattccagtgtattccgtgtgctgcggaagccccaggaatttgtcaaccggacccctgagacggtgttcatcttctggggacccccaaacaagatgcagaagccccagggcagcctcctgcgcgtcatccagcgggcgggcctcatgttcccgaacatggaggcctatgccgtctctcccgcccgcatgcagcagtttgacgacctcttccggggtgagacgggcaaggacagggaaaagtcccattcctggttgagcacgggctggtttaccatggtgattgcggtggaattgtgtgaccatgtgcacgtgtatggcatggtccctcctgactactgcagccagcggccccgcctgcagcgcatgccataccactactatgaacccaaggggccggacgagtgtgtcacctacatccagaacgagcacagccgtaagggcaatcaccaccgcttcatcaccgagaagagggtcttctcgtcctgggcccaactctacggtatcaccttctcccacccctcctggacctagttatcctgtccaccgatctcggacagatacaaacgaagtggctctggcccagccatttaaccatggccatcttccagccagttcaggctggctggagtatttcccagccaatcaaatcagggccttgatgagggttttttttttcctccagccaatcggggctggggttatctcttggccaatcagggatttggaattctgtatggtttaatcgggtgtcagggggtctttctcgtctagtcagggtctgagcatagtctatcagggtataggggtctttctgagtcaatctgaagcttaggacatgtcttttcccataaggctttgcttcagagccccaggaatgggcccccaaatcactccctccttagctgggacaatgaggtcctgtcctaaggatctgaggacttggtgttgccccacagttgccagaatcagagctactgtaggggggaggggctgccaggaggccaggccaaaggatttgtggagttctaggagtggtagggaagcctaggaggtaagaggcggtgtccagttcccggtttcttcctgagtgaccttaaacagaccctcttgtctttctggtatgctgtgatgacatcatagctccgtatgtggagaccctcactctccgttatacttaagtgtaaattcctcagctaccattcctcgctgggggactcagctccctggggatggggagcctggggtacccttccctgcctccttctagaaactttagggtatttttgtgcaagtgccccccatggttgggggatcctgacagaaatggggcaaacatgaagctgtttctctagcccctcaatccagctgccgttagcctggctctagaaaggccaggcacctcttcctaccctccagcaggagagcattccctgctgcccgaaggagcctttgggactgaggaaggggtatcccagccacaccagggcttcgtgaagtttttgtctggagatgctgagggctttggggagaagtatcctcccccaagtttgggatgagactagagatggggactgggttctgtcccttgcttaagcactttattaagggcaggactgggtgggggtgtgggtaacccccattcttccacagcctgcaagggaagggcttccagaaaggctgtggactgggggttgggggagactagccagcagtgagccctgcacagcaaggtaatgggggttgggcagtgacagccctagatctggttttgtaatgatttatacagaaataaacacgcctaagccc

SEQ ID NO: 520 - protein, 333 aa, Mus musculus
MACSRPPSQCDPTTLPPGPPAGRWPLPFSRRRREMSSNKEQRSAVFVILFALITILILYSSNSANEVFHYGSLRGRTRRPVNLKKWSFSSAYFPILGNKTLPSRCNQCVIITSSSHLLGTKLGPEIERAECTIRMNDAPTSGYSADVGNKTTFRVVAHSSVFRVLRKPQEFVNRTPETVFIFWGPPNKMQKPQGSLLRVIQRAGLMFPNMEAYAVSPARMQQFDDLFRGETGKDREKSHSWLSTGWFTMVIAVELCDHVHVYGMVPPDYCSQRPRLQRMPYHYYEPKGPDECVTYIQNEHSRKGNHHRFITEKRVFSSWAQLYGITFSHPSWT

SEQ ID NO: 521 - DNA, 2269 bp, Mus musculus
atggcttgctcgaggccccccagccagtgtgaccccacaaccctgccccccgggccacctgccggacgctggcctctacccttcagcagacgccggagagagatgagtagcaacaaagagcagcggtcagcagtgtttgtgatcctctttgccctcatcaccatcctcatcctctacagctccaacagtgccaacgaggtcttccactacggctccctgcggggccgcacgcgtcggccagtcaacctcaagaagtggagtttctccagcgcctacttccctatcctcggcaacaagacgctgccgtccaggtgcaaccagtgtgtgatcatcaccagctccagccacctgctgggcaccaaactgggccctgagattgagcgggctgagtgcaccatccgcatgaacgatgctcccacctctggctactcggctgacgtcggaaacaaaaccaccttccgcgtagtggcccattccagtgtattccgtgtgctgcggaagccccaggaatttgtcaaccggacccctgagacggtgttcatcttctggggacccccaaacaagatgcagaagccccagggcagcctcctgcgcgtcatccagcgggcgggcctcatgttcccgaacatggaggcctatgccgtctctcccgcccgcatgcagcagtttgacgacctcttccggggtgagacgggcaaggacagggaaaagtcccattcctggttgagcacgggctggtttaccatggtgattgcggtggaattgtgtgaccatgtgcacgtgtatggcatggtccctcctgactactgcagcggccccgcctgcagcgcatgccataccactactatgaacccaaggggccggacgagtgtgtcacctacatccagaacgagcacagccgtaagggcaatcaccaccgcttcatcaccgagaagagggtcttctcgtcctgggcccaactctacggtatcaccttctcccacccctcctggacctagttatcctgtccaccgatctcggacagatacaaacgaagtggctctggcccagccatttaaccatggccatcttccagccagttcaggctggctggagtatttcccagccaatcaaatcagggccttgatgagggtttttttttccagccaatcggggctggggttatctcttggccaatcagggatttggaattctgtatggtttaatcgggtgtcagggggtctttctcgtctagtcagggtctgagcatagtctatcagggtataggggtctttctgagtcaatctgaagcttaggacatgtcttttcccataaggctttgcttcagagccccaggaatgggcccccaaatcactccctccttagctgggacaatgaggtcctgtcctaaggatctgaggacttggtgttgccccacagttgccagaatcagagctactgtaggggggaggggctgccaggaggccaggccaaaggatttgtggagttctaggagtggtagggaagcctaggaggtaagaggcggtgtccagttcccggtttcttcctgagtgaccttaaacagaccctcttgtctttctggtatgctgtgatgacatcatagctccgtatgtggagaccctcactctccgttatacttaagtgtaaattcctcagctaccattcctcgctgggggactcagctccctggggatggggagcctggggtacccttccctgcctccttctagaaactttagggtatttttgtgcaagtgccccccatggttgggggatcctgacagaaatggggcaaacatgaagctgtttctctagcccctcaatccagctgccgttagcctggctctagaaaggccaggcacctcttcctaccctccagcaggagagcattccctgctgcccgaaggagcctttgggactgaggaaggggtatcccagccacaccagggcttcgtgaagtttttgtctggagatgctgagggctttggggagaagtatcctcccccaagtttgggatgagactagagatggggactgggttctgtcccttgcttaagcactttattaagggcaggactgggtgggggtgtgggtaacccccattcttccacagcctgcaagggaagggcttccagaaaggctgtggactgggggttgggggagactagccagcagtgagccctgcacagcaaggtaatgggggttgggcagtgacagccctagatctggttttgtaatgatttatacagaaataaacacgcctaagccc

SEQ ID NO: 522 - protein, 414 aa, Mus musculus
MACSRPPSQCDPTTLPPGPPAGRWPLPFSRRRREMSSNKEQRSAVFVILFALITILILYSSNSANEVFHYGSLRGRTRRPVNLKKWSFSSAYFPILGNKTLPSRCNQCVIITSSSHLLGTKLGPEIERAECTIRMNDAPTSGYSADVGNKTTFRVVAHSSVFRVLRKPQEFVNRTPETVFIFWGPPNKMQKPQGSLLRVIQRAGLMFPNMEAYAVSPARMQQFDDLFRGETGKDREKSHSWLSTGWFTMVIAVELCDHVHVYGMVPPDYCSGPACSACHTTTMNPRGRTSVSPTSRTSTAVRAITTASSPRRGSSRPGPNSTVSPSPTPPGPSYPVHRSRTDTNEVALAQPFNHGHLPASSGWLEYFPANQIRALMRVFFSSQSGLGLSLGQSGIWNSVWFNRVSGGLSRLVRV

SEQ ID NO: 523 - DNA, 1463 bp, Mus musculus
cgagtactactgcggccgcccaggccacagccctgcttgggacacaaggatcgccaccagaccgctgccctaggacgcgtcgagagcctgtggccagcgcactcggaccgtggggcggagacccaggagaccggagcagagctgtgcagacagcatcaggattgctgaaagacaggtgtcagcatgactgaacgctttgactgccaccactgcaatgaatctctgtacggcaagaagtacattctaaaggaggagaacccacactgtgtggcctgctttgaggaactctatgccaatacctgtgaggagtgtggaacacccatcggctgcgactgcaaggacttgtcctacaaggatcggcactggcatgaaggctgcttccattgctcccggtgtggaagctcgctggtggacaagccctttgctgccaaggaggaacagctgctgtgcaccgactgctattccaatgaatactcgtccaagtgccaggaatgcaagaaaaccatcatgccaggtacccgcaagatggaatacaagggcagcagctggcacgagacctgcttcacctgtcagcgctgccagcagcccattggaaccaagagcttcatacctaaggagaatcagaacttctgcgtgccctgctatgagaagcagtatgccctgcagtgcgtgcagtgcaaaaagcctatcaccacaggaggtgttacttaccgggagcagccctggcacaaggaatgctttgtgtgcacagcctgcaagaagcagctatctgggcaacgcttcacagcacgggatgagtttccatactgcctgacctgcttctgtgacttgtacgctaagaaatgtgctgggtgcaccaaccccattagtggtctgggtggcacaaagtacatctctttcgaggaacgccaatggcacaacgactgctttaactgtaagaagtgctccctgtctctggtgggacgaggcttcctcacagagagagatgacatcctctgtcctgactgtggaaaggatatttgaaggcggcacagaagccacagcgcgtggcgcagagattcggatgttttctttcataaccaggcaatgctgtgttctgattcccaccagccaccacgaggcttcctcttgctgccctggcttcacatttgttgaaaccctttagttcttttcttctcagtggggacaagatccatccgtaagccccggatgggaagatggtttggaattttatagaaatgcaaggcagattaaatgaaaaagtcttgagtgtctttataatgcatccttccttcacatcctatttaattttttaagtgcaattaacatgtgttatgaacttgaatgtattttcaagggagagctgggatttgcagctttgtgacttcctttttatgtaaaacctagaggaagacttatgtgacttacaataaaattattcagaataaaacattttgtcaagc

SEQ ID NO: 524 - protein, 279 aa, Mus musculus
MTERFDCHHCNESLYGKKYILKEENPHCVACFEELYANTCEECGTPIGCDCKDLSYKDRHWHEGCFHCSRCGSSLVDKPFAAKEEQLLCTDCYSNEYSSKCQECKKTIMPGTRKMEYKGSSWHETCFTCQRCQQPIGTKSFIPKENQNFCVPCYEKQYALQCVQCKKPITTGGVTYREQPWHKECFVCTACKKQLSGQRFTARDEFPYCLTCFCDLYAKKCAGCTNPISGLGGTKYISFEERQWHNDCFNCKKCSLSLVGRGFLTERDDILCPDCGKDI

SEQ ID NO: 525 - DNA, 1198 bp, Mus musculus
aacattaaagcaacccaatgaagcccagggcctgcctgcacagtgctggccctcatccccactggtctggttgctgggcagaaggaagggctctgacctctaacatcacagattgctgaaagacaggtgtcagcatgactgaacgctttgactgccaccactgcaatgaatctctgtacggcaagaagtacattctaaaggaggagaacccacactgtgtggcctgctttgaggaactctatgccaatacctgtgaggagtgtggaacacccatcggctgcgactgcaaggacttgtcctacaaggatcggcactggcatgaaggctgcttccattgctcccggtgtggaagctcgctggtggacaagccctttgctgccaaggaggaacagctgctgtgcaccgactgctattccaatgaatactcgtccaagtgccaggaatgcaagaaaaccatcatgccaggtacccgcaagatggaatacaagggcagcagctggcacgagacctgcttcacctgtcagcgctgccagcagcccattggaaccaagagcttcatacctaaggagaatcagaacttctgcgtgccctgctatgagaagcagtatgccctgcagtgcgtgcagtgcaaaaagcctatcaccacaggaggtgttacttaccgggagcagccctggcacaaggaatgctttgtgtgcacagcctgcaagaagcagctatctgggcaacgcttcacagcacgggatgagtttccatactgcctgacctgcttctgtgacttgtacgctaagaaatgtgctgggtgcaccaaccccattagtggtctgggtggcacaaagtacatctctttcgaggaacgccaatggcacaacgactgctttaactgtaagaagtgctccctgtctctggtgggacgaggcttcctcacagagagagatgacatcctctgtcctgactgtggaaaggatatttgaaggcggcacagaagccacagcgcgtggcgcagagattcggatgttttctttcataaccaggcaatgctgtgttctgattcccaccagccaccacgaggcttcctcttgctgccctggcttcacatttgttgaaaccctttagttcttttcttctcagtggggacaagatccatccgtaagccccggatgggaagatggtttggaattttatagaaatgcaaggc

SEQ ID NO: 526 - protein, 279 aa, Mus musculus; identical to SEQ ID NO: 524

SEQ ID NO: 527 - DNA, 2804 bp, Mus musculus
acgagtcaacttcgagtctggagccggagccagagaccggggctgggaaaccccagcccgggacgggacgcagcagcctctggatcccgggaccccggacctctcaggaccggccagaggtgaaggactgaggccccactgaggccttggaccgcaccgcctggctccttcagccgcagtcgtctcctgggacagaagatgcactccaggagctgcctgccacctctcctgttgttgcttctggtgctcctggggtctggagtacagggttgcccatcaggctgccagtgcaaccagccacagacagtcttctgcactgcccgtcagggaaccacagtgccccgagacgtgccacctgacacagtgggcctgtacatctttgagaacggcatcacgacacttgatgtgggctgttttgctggccttccgggcctgcagcttctggacttgtcacagaaccagatcactagcctgcccgggggcatctttcagccacttgttaacctcagtaacctggacctgactgccaacaaactgcacgagatctccaacgagaccttccgtggcctgcggcgcctggagcgcctctacctgggcaagaaccgaattcgccacatccaaccgggtgccttcgacgcgcttgatcgcctcctggagctcaagctgccagacaatgagcttcgggtgttgcccccattgcacttgccccgcctgctgctgcttgacctcagccacaacagcatcccagccctggaagccggaatactggataccgccaatgtagaggcattgaggttggctggcctagggctgcggcagctggatgaggggctttttggccgccttctcaacctccatgacttggatgtttctgacaaccagttggagcatatgccatctgtgattcaaggcctgcgtggcctgacacgcctgcggctggctggcaacacccgtattgcccagatacggcccgaggacctcgctggtctgactgccctacaggaattggatgtgagcaacctaagcctgcaggccctgcccagtgacctctcgagtctctttccccgcctgcgcctcttagcagctgccaggaaccccttcaactgcttgtgccccttgagctggtttggtccttgggtgcgtgagaaccatgttgtgttggccagccctgaggagacgcgttgtcactttccacccaagaatgctggccgactgctcctggatctggattatgcagattttggctgcccagtcaccactaccacggccacagtacctactataaggtctactatcagggaacccacactttcaacttctagccaagctcccacctggcccagcctcacagagccaactacccaggcctccaccgtactatcgactgccccaccaaccatgaggccagctcctcagccccaggactgtccagcatccatctgcctgaatggtggtagctgccgtttgggagcaagacaccactgggagtgcctatgccctgagggcttcattggcctgtactgtgagagtccagtggagcaagggatgaagcccagctccataccagacactccaaggccccctccactgctgcctctcagcattgagccggtgagccccacctccttgcgtgtgaagctgcagcgctacttgcagggtaacactgtgcagctacggagcctccggctcacctatcgcaacctgtctggccctgacaaacgactggtgacattacggctgcctgcttcacttgcagagtatacagtcacccagctgcgacccaatgccacctattctatctgtgtcacacccttgggagctggacggacacctgaaggtgaggaggcctgtggggaggccaacacttcccaggcagtccgctctaaccatgccccagttacccaggcccgtgagggcaacctgccactcctcattgcgcctgccctggctgctgtacttctggctgtgttagccgctgcaggggcagcctactgtgtgcggcgggcacgggcaacttctacagctcaggacaaagggcaggtggggccagggactggacccctggaactagagggggtgaaagcccctttggagccaggctccaaggcaacagagggaggtggggaggctttgtcaggtggtcctgaatgtgaggtgcctcttatgggctacccagggcccagccttcagggggtcctccctgctaagcactacatttagactggtgagaaagagcagccagggggtcaggctttcagtcaccaccctcctgctgccacagaaggaagttctcagtatacaccacagtgcacgtgcatgatggagctgtgggaccctctctgggctgggtctcatctgtaagctgctacagcccagatgaactctgccagccgccagtgcatccagtacagcgcctgccatcttgtgcaatgtgcaaccctgggatgtgagccctgccatgtgctggtaacatggctaggcatgttgggcttcccaaaccatggagtctggtaaccagtgaaggaagcccccagaaataatgagtggggaaggtactagggcactggccttggcctcaaaagtgcaggcacacttgaaactggaaaggaaggtgctctgggcacatgtggatttgcttctattgttttgttttgttttttctaatgtatttataaaagatcttttcccatttatgctgggaaagtgtttttcaaactcagtgacaaggactttggtttttgtaagactgttgatgatatgaaggccttttgtaagaaaataaaaaataaagtaaattgcctgtc

SEQ ID NO: 528 - protein, 673 aa, Mus musculus
MHSRSCLPPLLLLLLVLLGSGVQGCPSGCQCNQPQTVFCTARQGTTVPRDVPPDTVGLYIFENGITTLDVGCFAGLPGLQLLDLSQNQITSLPGGIFQPLVNLSNLDLTANKLHEISNETFRGLRRLERLYLGKNRIRHIQPGAFDALDRLLELKLPDNELRVLPPLHLPRLLLLDLSHNSIPALEAGILDTANVEALRLAGLGLRQLDEGLFGRLLNLHDLDVSDNQLEHMPSVIQGLRGLTRLRLAGNTRIAQIRPEDLAGLTALQELDVSNLSLQALPSDLSSLFPRLRLLAAARNPFNCLCPLSWFGPWVRENHVVLASPEETRCHFPPKNAGRLLLDLDYADFGCPVTTTTATVPTIRSTIREPTLSTSSQAPTWPSLTEPTTQASTVLSTAPPTMRPAPQPQDCPASICLNGGSCRLGARHHWECLCPEGFIGLYCESPVEQGMKPSSIPDTPRPPPLLPLSIEPVSPTSLRVKLQRYLQGNTVQLRSLRLTYRNLSGPDKRLVTLRLPASLAEYTVTQLRPNATYSICVTPLGAGRTPEGEEACGEANTSQAVRSNHAPVTQAREGNLPLLIAPALAAVLLAVLAAAGAAYCVRRARATSTAQDKGQVGPGTGPLELEGVKAPLEPGSKATEGGGEALSGGPECEVPLMGYPGPSLQGVLPAKHYI

SEQ ID NO: 529 - DNA, 2370 bp, Mus musculus
ccaggcggagctcatgctcaggaaccaacagctgcagtcccgactggccacactcaagatcgagagcgaggaggtcaagaaaacgacagaagccaccctccagacgatccaagatatggtcaccattgaggactatgatgtgtctgagtgtttccagcacagccgatccacagagtctgtgaagtccactgtgtcagaaacctacctgagtaaacccagcatcgccaagagacgagccaaccagcaagaaacggagcagttctacttcatgaaacttcgagagttcctggaaggcagtaacctcatcacaaagctgcaggctaagcatgacttgctgcagaggactcttggagaaggccatagagctgaatatatgactacaagccggggacgaaggaactctcacgcaagacatcaggactcaggccaggttatccctctcattgtggaaagctgcatccgattcattaatctctatggccttcagcaccaggggattttcagagtgtctggctcccaggtggaagtgaacgatatcaagaattctttcgagagaggtgagaaccctctgtccgatgagcagagcaaccacgatatcaactcggtggccggcgtgctgaagctgtacttccgagggctggaaaaccccctctttcctaaggaaaggtttactgacctgatttcctgtatcagaatagataacctctatgagagggcgctccacatccgcaaactcctcctgaccttgcccaggtcggtccttatagtgatgaggtacctgtttgccttcctcaatcacctctcccagtacagtgacgagaacatgatggacccttacaatctggccatttgcttcggcccaacactgatgccggttccagagatacaggaccaagtgtcttgccaggcacacgtgaacgagattgtgaagaccatcatcatccatcacgagactattttcccagatgctaaagaactggacggccccgtgtatgagaaatgcatggccggaggcgactactgcgacagcccctacagtgagcatggtacattggaggaggtggaccaagacgccggcacagagccccacaccagtgaagacgagtgtgagcccatcgaagccatagccaagtttgactacgtcgggcggtcagctagagagctgtccttcaagaagggtgcatccctgctgctgtatcaccgagcctccgaggattggtgggaaggcagacacaacgggatcgatggccttgtgcctcatcagtacatagttgtgcaagatatggacgatacattttcagacacgctgagccaaaaggccgacagcgaagccagcagcgggccagtcactgaagacaagtcctcatccaaggacatgaactccccgactgaccgccattctgatagctatttagccagacaaagaaagagaggagagccaccccctccgggaagacgtcccggcaggaccagcgatggccattgtcccctgcatcccccgcatgctctgtctaactcctcaattgatctgggatccccaaacctagccagtcaccccaggggcctgttgcagaaccgtggcctcaataatgacagtcctgagaggcggcgccggccgggccacggcagcctgaccaatatcagccggcatgactccctcaagaagatcgacagccctcctatccggaggtccacatcatcagggcagtacacaggcttcaatgaccacaagccactggaccccgagacgattgctcaggatattgaggagaccatgaacactgctttgaacgaactccgtgaactcgagaggcagagcacagtgaagcacgcccccgatgtcgtgctagacactttggagcaagtgaagaactcgcccacccctgcgacttccacagaatcactcagcccactgcacaatgtcgccctcaggggctcagagccacagattcgccggagcaccagctcctccagcgagacaatgagtactttcaagcctatggtggcgccccggatgggcgtccagctgaagcccccagcccttaggccaaagcctgctgttcttccaaaaacaaaccctacgatgggacctgccgcaccttcccagggtcccacagacaagtcttgcacgatgtaaaaacaaaggtcacgaggggaggggggatgtctgaagatgaaaatgaattagtggcaagagtgggtgatccacaaccttccttggtcttgcgcttataactggagagtttggcttttctatgttgtgtcgaatgtaatgatgtctgggactagctaaattaacatgggcatttgtattttgtaattttttttaataactggacattatcgtcgttttaaagacaatagaaacac

SEQ ID NO: 530 - protein, 711 aa, Mus musculus
QAELMLRNQQLQSRLATLKIESEEVKKTTEATLQTIQDMVTIEDYDVSECFQHSRSTESVKSTVSETYLSKPSIAKRRANQQETEQFYFMKLREFLEGSNLITKLQAKHDLLQRTLGEGHRAEYMTTSRGRRNSHARHQDSGQVIPLIVESCIRFINLYGLQHQGIFRVSGSQVEVNDIKNSFERGENPLSDEQSNHDINSVAGVLKLYFRGLENPLFPKERFTDLISCIRIDNLYERALHIRKLLLTLPRSVLIVMRYLFAFLNHLSQYSDENMMDPYNLAICFGPTLMPVPEIQDQVSCQAHVNEIVKTIIIHHETIFPDAKELDGPVYEKCMAGGDYCDSPYSEHGTLEEVDQDAGTEPHTSEDECEPIEAIAKFDYVGRSARELSFKKGASLLLYHRASEDWWEGRHNGIDGLVPHQYIVVQDMDDTFSDTLSQKADSEASSGPVTEDKSSSKDMNSPTDRHSDSYLARQRKRGEPPPPGRRPGRTSDGHCPLHPPHALSNSSIDLGSPNLASHPRGLLQNRGLNNDSPERRRRPGHGSLTNISRHDSLKKIDSPPIRRSTSSGQYTGFNDHKPLDPETIAQDIEETMNTALNELRELERQSTVKHAPDVVLDTLEQVKNSPTPATSTESLSPLHNVALRGSEPQIRRSTSSSSETMSTFKPMVAPRMGVQLKPPALRPKPAVLPKTNPTMGPAAPSQGPTDKSCTM

SEQ ID NO: 531 - DNA, 6145 bp, Mus musculus
gggtgatgcggagagctgcctgttcagacaacagacacgcgaggtcagggagaagccgcttataaattaccgcttcctccgcgccgccgccagcgtcgtgctccgggacctggttgctgccgagctcccgtgcccagccgccaacgccgcgatcgccgccagtcccgccagcctcgccagccccgggccatccgctgtgggcttagccacccaggtgcagaaccagtgccacagcctcttcagaggagcatctcaagcaaaacgaagagatggccacgaaggagaagctgcaatgtctgaaagacttccacaaagacatcctgaagccttctccagggaagagcccaggcacacggcctgaagatgaggcggacgggaagccccctcagagggagaagtggtccagcaagatcgactttgtgctgtctgtggccggaggcttcgtgggtttgggcaacgtctggcgtttcccgtacctctgctacaaaaatggtggaggtgcgttcctcataccgtattttattttcctgtttgggagcggcctgcctgtgtttttcttggaggtcatcataggccagtacacatcagaagggggcatcacctgctgggagaagatctgtcctttgttctctggcattggctacgcatccatcgtcattgtgtccctcctgaacgtgtactacatcgtcatcctggcctgggccacatactacctattccactctttccagaaggatcttccctgggcccactgcaaccatagctggaacacaccacagtgcatggaggacaccctgcgtaggaacgagagtcactgggtctcccttagcactgccaacttcacctcacccgtcatcgagttctgggagcgcaatgtgctcagcctgtcctccggaatcgacaacccaggcagtctgaaatgggacctcgcgctctgcctcctcttagtctggctcgtctgttttttctgcatctggaagggtgttcgatccacaggcaaggttgtctacttcaccgctactttcccgtttgccatgcttctggtgctgctggtccgtggactgaccctgccaggtgctggtgaaggcatcaaattctacctgtaccctgacatcagccgccttggggacccacaggtgtggatcgacgctggaactcagatattcttttcctacgcaatctgcctgggggccatgacctcactgggaagctataacaagtacaagtataactcgtacaggcaagtggactgtatgctgctgggatgcctgaacagtggtaccagttttgtgtctggcttcgcaattttttccatcctgggcttcatggcacaagagcaaggggtggacattgctgatgtggctgagtcaggtcctggcttggccttcattgcctacccaaaagctgtaaccatgatgccgctgcccaccttttggtctattctgtttttcattatgctcctcttgcttggactggacagccagtttgttgaagtcgaaggacagatcacatccttggttgatctttacccgtccttcctaaggaagggttatcgtcgggaaatcttcatagccatcttgtgtagcatcagctacctgctggggctgacgatggtgacggagggtggcatgtatgtgtttcaactctttgactactatgcagctagtggtgtatgccttttgtgggttgcattctttgaatgttttgttattgcctggatatatggcggtgataacttatatgacggtattgaggacatgattggctatcggcctgggccctggatgaagtacagctgggctgtcatcactccagctctttgtgttggatgtttcgtcttctcgcttgtcaagtatgtacccctgacctacaacaaagtgtaccggtacccggattgggcaattgggctgggctggggcctggccctttcctccatgctgtgtatccccttggtcattgtcatcctcctctgccggacggagggaccgctccgcgtgagaatcaaatacctgataacccccagggagcccaaccgctgggctgtggagcgtgaaggggccacaccctttcactcccgagtaaccctcatgaacggcgcactcatgaaacccagtcacgtcattgtggagaccatgatgtgaggtccgggccatgtgacaggcgccgctttcctgctgtttactaacgttagattctcataggaccaggtttacagagctttatatttgtactaggatttttttttttaattgtcacagaaaatgttactctatgtgtgtgtgtatgtgtatcgtgtatgtctgtatatgtgtgttttgttttgtttgggggatattttgtacaaaaagaaaacccataggcctacgtcctggggaagaggatggactttcatattgatttccatgtattttgtgggaacttggtaaatttttctttgtattttttttaacatataactatatatacttagagtctgtcatacactttgccacttgaattggtcttgccagcaatggatctcgtttttcaaaagcaattcttcggtgcttatatagctggcagaaagttctgcccaaaaacaaatgaaaaaagagaaaaaaaaaaaaaacctgaatgctgggtggaattttcctatgatagtggatacatcttcaagaacggtgtagtcccttctgagctggttcaggaggaagaacacagctgaggagagggagccccccccccccactagctgaacagacctgaggggcaggagagagcagggctatggaccctcagccaacaagaaagatgccaaaatactggcccaccctcagcatgaatgatagatctcagagcagctgaagcggttgtaccagggccaaacgcctgccctcttacttggaagaagacatgggtggtagtcagtgggactggctgaaccaccatgggtattacaggcagggatgggacgtctgaatgtctggtgaggatgtggctcaggtctgggagcctgcctctgcaggcgtaggccgaatccctgtcctttcttgaacactcagtatggctgcccgaagccaggccacaggagctgctggggcttcagagtgggggtcacactcaggaagtgtctgcggtatttgagtggagtcatggtgggtggtgaccagagtattccccaagcagaatgtattttggtgagggcccggggtgagggaggccagtggaccaaatgatattagcagctcaggagggtgagtgtaccccaggctggcaagtgtaccccaggagggcactattcttccttgcctcttgacaaactcttgtgaaagttaccaccccagaaccatccagcagctcccagcaaggagtgctccaagtggctgtagaccctggatcttaaaggatctgagttccagtacagagccagcttggtagtgacctcagatgatttccaagccactgcattggctgttggacaggcgtttgcccccaggggacggcagagggaaggcgaagggaagtttcggtcagttgaagctatctccacagaagtgaggtcagtactccagagctgcccaatgtcagcttctgaaccaggagagggcactacaccttcaccccagcctccactgggcccaactgtgccatcctgaacttctttgacaaatgtacacattttttcctgtctccaaagcaatgtactctgccaagtgaccctctaatcctcttccagtggctgttgactcagccacccatgattgtactgtgttcctgttgtcctgtgtatttctggttgctctcgtgttattttgagtgtttggagttctccttccccgattttaccgacttgtaatgtaccctggttttctttcgttcaacggaaccttaaaagtaaccactgtgggtgactgaaagacaggtgaagtgtaagggagaggggggctcgtccagctgtggcagtgtctgtggtcatgcccgtctaccctacccctaacccccaccgggcacgcccctctggcgagccttcagtattttgggttggcagacaaatggcaccattctggaaatggcctgagaaaggctttttttaatcattcccagatcgaattctagaccaaagacacagcgggccaagtccccaggccctgcctggatttggaaggccagccgcctcccgagcccactccccagcagtgtcccctcacctgtcttcagtggcccccactctcaccccgcccctgcccctgatgacccttattgtgatgcttgtcttttcacgtctgcatgtaagtaacattttgaagtagagctcgtgactctggtccgcctgcctcctggagagagggctaagctgttcaccaaccagcccttgcctggaacaggccagatcctgtcctgcctgtcagatggagacaggaagcaagggacattgcctggtttagatgaggacattaggtgggcccaggagaccctgggagatgttatttggtcctaagagtgatgtgacctcccaaatggagggtccctgctgggcactgtgggcagccccagagggccctgatccaaggcacttatgtaatcaggagaataggcctagtgtggggacttacactgtgagctaagtggaactggacatttgagtcatttgtagcttcaggttctccaagacttagtagagggaaggcaggtccagggcattgtctaagtaaactgtcaagccttccctgtcaaccaaaggccagagctgatgagggcccttgctccatattcatggaacacagagcaatacccacgtgtgccagtccttaccgccctgctcaccccggccccgtgccacccttccttccttcctttctcctccaaagcctttgggaactaggaattgatacaccctcccctcaagttgtaccacaggaaactgagggccaaagacatcactagtgtgaagagccttagctagggtgtatgggcaggcctttgacctccatgtagcccaaggctatgcaggaagtagcctgagagggtttcttttccctctctgcctctggcctccagtcctcacctcagctccataccctaccatggaaagccacgcagaccatggcagcgcatgaggagaaagcagcactcgccccctctgcacaggaaggggctttctctatcacagtgtgtcaccaccatggccgacagcattccagtcctgcctctcgggacggggcaatgctctagcaaccagtctaacaggtgccagcccagttcctctctccaagatgcagacacaagccaggaaggcaccttagagaaggcccctcacagtcccactcaaacctgagacccctgtccctatggacactgtaaatacctctgtgtgcacaccccttccttcatcaagccccaaaccacacacacaacaaaacccagatactccaagatggagaggggcatcccggaagccagagcagtgctccctcctcccctcctccatctgatcgcctaggagtcagaccttcacaggaaactggctgtccatgctctctgggagggaggagtggtgtcattgtcattacaggcatgttctggcatgttccctgaaggacagagcatcttattatatatttggcttcaaaatgagatggtagttccattttctttttttaaaaacaattaatctttccaatccctaacaactgtgactgtatttagcacaagagaaaagctgagaacgtgggttttgcctccttcagaaatatgtctggctcatcaggacattttttaaaaacttcaaaatatttttaagatattttaaacttttgtaaaaaacaaaaaacaaaaaaacaaatgcacgcacacacacacacatacaacacacacacacacacacacacacacacatacacacaaagaaaaaaaacctgaaaccaatcaagaaggggaggagcgtttgtgtttgaaggatccttggtgtgtgacctgtcttgcagtatacaagctctgtgtatgtttaattacaacgaccccgcattttgcagggtttcggtttttttttcctcttttgctttttagatgaatatgtatattgatattttaaatccatctttgctttttttagaggagtttataatcaccttgtaacacaacaataaacatttcctttttaaaatcc

SEQ ID NO: 532 - protein, 623 aa, Mus musculus
MATKEKLQCLKDFHKDILKPSPGKSPGTRPEDEADGKPPQREKWSSKIDFVLSVAGGFVGLGNVWRFPYLCYKNGGGAFLIPYFIFLFGSGLPVFFLEVIIGQYTSEGGITCWEKICPLFSGIGYASIVIVSLLNVYYIVILAWATYYLFHSFQKDLPWAHCNHSWNTPQCMEDTLRRNESHWVSLSTANFTSPVIEFWERNVLSLSSGIDNPGSLKWDLALCLLLVWLVCFFCIWKGVRSTGKVVYFTATFPFAMLLVLLVRGLTLPGAGEGIKFYLYPDISRLGDPQVWIDAGTQIFFSYAICLGAMTSLGSYNKYKYNSYRQVDCMLLGCLNSGTSFVSGFAIFSILGFMAQEQGVDIADVAESGPGLAFIAYPKAVTMMPLPTFWSILFFIMLLLLGLDSQFVEVEGQITSLVDLYPSFLRKGYRREIFIAILCSISYLLGLTMVTEGGMYVFQLFDYYAASGVCLLWVAFFECFVIAWIYGGDNLYDGIEDMIGYRPGPWMKYSWAVITPALCVGCFVFSLVKYVPLTYNKVYRYPDWAIGLGWGLALSSMLCIPLVIVILLCRTEGPLRVRIKYLITPREPNRWAVEREGATPFHSRVTLMNGALMKPSHVIVETMM

SEQ ID NO: 533 - DNA, 4035 bp, Mus musculus
gctcagtctccacgtctcgctccccatagcccggctaccgccgctgaagcctgaagcacccaagtcccgcagaacctgaccccggcctgtcgccaccaccttggcccggtcaggggacgtcgcctcagtcacgatggggctcctgcccaagcccggagcacgccagggcagcggcacctcctcggtcccagccagacgttgctcccgctcggtcttcaacaacattaaggtcttcgtgctttgtcatggcctcctacagctctgccagttgctctacagtgcctacttcaagagcagcctcaccactatcgagaagcgctttgggctctccagttcttcctccggtctcatctccagtttgaatgagatcagcaacgctatcctcatcatcttcgtcagctacttcggcagccgggtgaaccgcccacggatgatcggcatagggggtctcctcctggctgcaggggcctttgtcctcaccctcccacacttcctgtcagaaccctatcagtacgcgtcgacaactgctggaaacagcagccactttcagaccgacctctgtcagaagcatttgccaggcctgctccccagtaagtgccacagcaccgtgcccgatacccagaaggagaccagcagcatgtggagcctgatggtggtcgctcagctgctggccggcgttgggacggtgcccattcagccatttgggatctcctatgtggacgactttgcagagcctaccaactcgcctctgtatatctccatcttatttgctatcgccgtgtttgggccggctttcgggtacctgctgggctcagtcatgctgaggatcttcgtggactacggcagagtggacacggctacagtgaacctgagcccaggtgaccctcggtggatcggagcctggtggctgggcctgctcatctcctcaggcttcttgatcgtcacctctttgccctttttcttctttccccgagcgatgtccagaggagcagagaggtctgttatcgcagaggagaccatgaagatggaggaagacaagtcaagaggctccctgatggatttcattaaacggttcccccgcatcttcctgaggctgctgatgaacccactcttcatgctggtggtcctgagccagtgcaccttctcctcagtcattgctggcctctccacgttcctcaacaagttcctggagaagcagtacgatgcctcggcagcctatgccaacttactcattggtgctgtgaaccttccagctgcggccttggggatgctgtttggaggaatcctcatgaagcgttttgttttccctctgcaaaccatcccccgagtagctgccaccatcatgaccatctccataatcctatgtgcccctctcttctttatgggatgttccacacccgccgtggctgaggtctaccctcccagcacaccaagttctatacatccgcagcctcccgcctgccgcagggactgcctgtgcccagattccgtcttccaccctgtctgcggagacaatggagtcgagtacctctccccctgccatgctggctgcagcagcctcaacgtgagctcagcagcttctaagcaaccaatctatttgaactgtagctgtgtgactggaggatccgcatcggccaagacaggctcctgccctacatcctgtgcacagatgctgctcccgtccatcttcctcatctcctttgtggcactcattgcctgcgtctcccacaaccccctctacatgatggtcctacgtgtggtgaaccaggatgaaaagtcgtttgccattggagtacagttcttgttgatgcgtttgctggcctggctgccatctccatccctttatggcctgctcatcgactcctcctgtatccggtggaactacctatgctcagggagacgaggggcctgtgcgtattatgacaacgatgctcttcgaaacaggtacctgggcctacaggtaatctacaaggtcttgggcacactgctgctcttcttcatcagctggagggtgaagaagaacagggaatacagtctgcaggagaatgcctcgggcctcatctgaccttcagctgggactactgccctgccccagagactggatatcctacccctccacacctacctatattaactaatgttagcatgccttcctcctccttccctctctctctccctctctcttgcgcacacacacacacacacacatacacacatacacacacatgcgccagtgcgcgcacaaaagagagagagagagagagttagttcactcaccccttgtctcaccggcctcttcctcctaaagtctcccgcatggttcttagggcctgaagggtcctgagctgaatgagcgctggactgaagggtctagtttctcagagtccttggaagggatcctctcctcagccctgggtcttccactgtccgtactaaggcagcctctgttctcaccagtctctcaggaacacttcagtggtgggagaaatgggagccttgacttccgtgccaggcagcccagctcctctgtctctgcccacacccaacagagaggcaggggagcagcaggtggttgtttcttagcagctaccactgggctaagggagcttggctgtggccgctttgcatctggcttcagtctagcatggaacccaggagggacctatctccctttcctttcccactttctgccctcaaggctgatttggaaaccaccactttgggaagtataaccctctctgtatactactccctggtgtcagagcaggaacgaaggaaccagcaaggctaggtcatccaagcactgttcctaggaacctgaggcctaccctcaggtcagcatgtgcttccttctgcctttcaaaccaacaaagcccatgtaaggagcccatgtaaggaggacccagtctcccaccctcacagtagagacaaggtctttcccccttcagagacgcaaatagccatctttaccatgccccggaaacaaaagagtgacctcacatgggctttgctgtctggacttcagctcatgtgcagaggagtaaaggcggtgaatggggggtgtgatcctgagatgcagtcagaccaaggaatggagcagagtggatgccacctgtcactgtgccagatggcaagttgcagcccacaaagagagtagccgggttgactcgcttgcaaacacattgtcttcgttggcattttctcagcttttcctcactacctctctggatgtggaggtgggctccttctgtgggcctgggctgggggccaccactgccatgcagtggagaggcaaaggcagaggcccaggaatgaggccttttctcaacgattctgtttatcagagaactggcttggtgtttgtcagggatgctgtatggttctctgagagctcccctggaaaaccttacctccattcgcattgggattgctcccagagagcgctcggtgggcagcaagaacatgctcacacacttgccaagcatatccagaaccaaaaaggctggcggaaaagatcctggtctgactgcccatgcacaccctgaggctccagcaggttgactgtgtgcctgagctggagatctggctcaccgtgtccccgaagcagctaggcaattgacattgccctatgtgacatttaagtgcctttcagaaatgccttatatggtgagaagccaaatggtttatgtcggcgtggcaaaggtcctgtgagactgaagccttcagggagcctttgttactggcagtgttctttctgaagccaccgggctcatttccacagatcttattaaggaggaggctccacacaacctcacgggccagtttcagcatgtggaacggttctgcttggaacctgattctctgcaactaaccctgggcttactcactgcagtttaaccagattctgaaggcatagccttccaccaatctcgcaaacaatgaacgtcaaccttccgttcccggaagatcagctgtccccacaagtctttattctattatattgctattaatatattataattctgttctgggtgt

SEQ ID NO: 534 - protein, 643 aa, Mus musculus
MGLLPKPGARQGSGTSSVPARRCSRSVFNNIKVFVLCHGLLQLCQLLYSAYFKSSLTTIEKRFGLSSSSSGLISSLNEISNAILIIFVSYFGSRVNRPRMIGIGGLLLAAGAFVLTLPHFLSEPYQYASTTAGNSSHFQTDLCQKHLPGLLPSKCHSTVPDTQKETSSMWSLMVVAQLLAGVGTVPIQPFGISYVDDFAEPTNSPLYISILFAIAVFGPAFGYLLGSVMLRIFVDYGRVDTATVNLSPGDPRWIGAWWLGLLISSGFLIVTSLPFFFFPRAMSRGAERSVIAEETMKMEEDKSRGSLMDFIKRFPRIFLRLLMNPLFMLVVLSQCTFSSVIAGLSTFLNKFLEKQYDASAAYANLLIGAVNLPAAALGMLFGGILMKRFVFPLQTIPRVAATIMTISIILCAPLFFMGCSTPAVAEVYPPSTPSSIHPQPPACRRDCLCPDSVFHPVCGDNGVEYLSPCHAGCSSLNVSSAASKQPIYLNCSCVTGGSASAKTGSCPTSCAQMLLPSIFLISFVALIACVSHNPLYMMVLRVVNQDEKSFAIGVQFLLMRLLAWLPSPSLYGLLIDSSCIRWNYLCSGRRGACAYYDNDALRNRYLGLQVIYKVLGTLLLFFISWRVKKNREYSLQENASGLI

SEQ ID NO: 535 - DNA, 2193 bp, Mus musculus
cgtctcgctccccatagcccggctaccgccgctgaagcctgaagcacccaagtcccgcagaacctgaccccggcctgtcgccaccaccttggcccggtcaggggacgtcgcctcagtcacgatggggctcctgcccaagcccggagcacgccagggcagcggcacctcctcggtcccagccagacgttgctcccgctcggtcttcaacaacattaaggtcttcgtgctttgtcatggcctcctacagctctgccagttgctctacagtgcctacttcaagagcagcctcaccactatcgagaagcgctttgggctctccagttcttcctccggtctcatctccagtttgaatgagatcagcaacgctatcctcatcatcttcgtcagctacttcggcagccgggtgaaccgcccacggatgatcggcatagggggtctcctcctggctgcaggggcctttgtcctcaccctcccacacttcctgtcagaaccctatcagtacgcgtcgacaactgctggaaacagcagccactttcagaccgacctctgtcagaagcatttgccaggcctgctccccagtaagtgccacagcaccgtgcccgatacccagaaggagaccagcagcatgtggagcctgatggtggtcgctcagctgctggccggcgttgggacggtgcccattcagccatttgggatctcctatgtggacgactttgcagagcctaccaactcgcctctgtatatctccatcttatttgctatcgccgtgtttgggccggctttcgggtacctgctgggctcagtcatgctgaggatcttcgtggactacggcagagtggacacggctacagtgaacctgagcccaggtgaccctcggtggatcggagcctggtggctgggcctgctcatctcctcaggcttcttgatcgtcacctctttgccctttttcttctttccccgagcgatgtccagaggagcagagaggtctgttatcgcagaggagaccatgaagatggaggaagacaagtcaagaggctccctgatggatttcattaaacggttcccccgcatcttcctgaggctgctgatgaacccactcttcatgctggtggtcctgagccagtgcaccttctcctcagtcattgctggcctctccacgttcctcaacaagttcctggagaagcagtacgatgcctcggcagcctatgccaacttactcattgcacaccaagttctatacatccgcagcctcccgcctgccgcagggactgcctgtgcccagattccgtcttccaccctgtctgcggagacaatggagtcgagtacctctccccctgccatgctggctgcagcagcctcaacgtgagctcagcagcttctaagcaaccaatctatttgaactgtagctgtgtgactggaggatccgcatcggccaagacaggctcctgccctacatcctgtgcacagatgctgctcccgtccatcttcctcatctcctttgtggcactcattgcctgcgtctcccacaaccccctctacatgatggtcctacgtgtggtgaaccaggatgaaaagtcgtttgccattggagtacagttcttgttgatgcgtttgctggcctggctgccatctccatccctttatggcctgctcatcgactcctcctgtatccggtggaactacctatgctcagggagacgaggggcctgtgcgtattatgacaacgatgctcttcgaaacaggtacctgggcctacaggtaatctacaaggtcttgggcacactgctgctcttcttcatcagctggagggtgaagaagaacagggaatacagtctgcaggagaatgcctcgggcctcatctgaccttcagctgggactactgccctgccccagagactggatatcctacccctccacacctacctatattaactaatgtacatgaggattcaccaaaggtgaaagagccacacaccgagtcttatgtctcttcaatggctttgtagtcacagtgtctgaaaatgagtcacacagtcggaccccgattgcttgtctgcgtttacagttgtctgaaagatgggaagaaggttctcgaattctgcttttaatttgttggactgaaaacccaagacctcagaaatagtttcctacacagagcaaagtagcaataaccataaaaatgattggtcagtt

SEQ ID NO: 536 - protein, 414 aa, Mus musculus
MGLLPKPGARQGSGTSSVPARRCSRSVFNNIKVFVLCHGLLQLCQLLYSAYFKSSLTTIEKRFGLSSSSSGLISSLNEISNAILIIFVSYFGSRVNRPRMIGIGGLLLAAGAFVLTLPHFLSEPYQYASTTAGNSSHFQTDLCQKHLPGLLPSKCHSTVPDTQKETSSMWSLMVVAQLLAGVGTVPIQPFGISYVDDFAEPTNSPLYISILFAIAVFGPAFGYLLGSVMLRIFVDYGRVDTATVNLSPGDPRWIGAWWLGLLISSGFLIVTSLPFFFFPRAMSRGAERSVIAEETMKMEEDKSRGSLMDFIKRFPRIFLRLLMNPLFMLVVLSQCTFSSVIAGLSTFLNKFLEKQYDASAAYANLLIAHQVLYIRSLPPAAGTACAQIPSSTLSAETMESSTSPPAMLAAAAST

SEQ ID NO: 537 - DNA, 2943 bp, Mus musculus
atggtgaactgcaccatcaagtctgaggagaagaaggagccttgccacgaggctccccaaggtgcagcccctgcagtggagacccagcctggagacccggccctggcctctcaggatgccaccaacgctaaagctcctcctcaggactgtgcctcaccagagagcagtgggtccccagaacccaagagaccagcagcttccgaggctgcttcgggaagccaggagcgcctggacttcaaccgcaacttacaggaggttgtgccagccattgagaagctgctgtccagtgactggaaggagaggtttctgggaagaagcaatgtggaagctaaggatgtcaaagggacccaagagagcctggctgagaaggaactccagcttttggtcatgatccatcagctctctgcccttcgggaccagctccttacggcccactctgagcagaagaacatggccgccatgctgtttgagaagcagcagcaacagatggaactggccaggcagcagcaggagcagatcgccaagcagcagcagcagctgattcaacagcagcacaagatcaacctcctgcagcagcagatccagcaggttaacatgccttacgtcatgatcccagccttccccccaagccaccagcctttgcctgtcactcctgactcccagctggctttacctattcagcccattccctgcaagccagtggaatacccactgcagctgctgcacagcccgcctgcccctgtggtgaagaggtcgggggtggccgcccaccaccccctgcaggagcccccacaaccactgaacctcacagccaagcccaaggtacctgagctgcccaacacctccagctctcccagcctgaagatgaacagttgtgggcctcgccccgccagccatggggctcccacaagggacctgcaatccagcccccccagcctgcctctgggcttcctcggtgaaggggacgccgtcaccaaagccatccaggatgcccggcagctgctgcacagccacagtggggctttggaaaactcccccaataccccattccggaaggacctcatcagcctggactcctccccggccaaggagcggctggaggagagctgtgtgcatcccctggaggaagccatgctgagctgtgacatggatggctcccgtcatttttccgagtctcggaacagcagccacatcaagagacccatgaatgccttcatggtgtgggccaaggatgaacggaggaaaattctccaggccttcccagacatgcataactccagcatcagcaagatccttggttctcgctggaagtccatgaccaaccaggagaaacagccgtactacgaggagcaggcccgtctgagccggcagcacctggagaaataccctgactataagtacaagccaaggcctaagcgtacctgtgtcgtggagggccggcggctgcgagtgggcgagtacaaggccttgatgaggacacggccagggtgctcgccaaagctacaccatcccgtgagcaggccctccctggtggccagaggcggcttgtggctgctcccgcaggctggccaggcacaggtgagctcagatatcctgttccctcgggcagcgggcttgcccctggcacgtccactggtggagcactatgacccccagggcctggaccccaacatgcctgtcatcatcaatacctgcagtctccgggaggaaggggagggcacagatgacaggcactcggtggccgatggagagatgtaccggtacagcgaggacgaggactcagagggtgacgagaagagtgatgagtggtggtactcacagactgatccccagctcggcccggcccgtcaccgctgggggaaagaccttgttcccatccggacaggcacagccagccttcctgaactatcttggtacttggacttgggtggccaggtgatgggtgaaactgcacttgtagatacattcccaagatgggggtcctcctcttcatcacacctctgggcccatcggaggagccaatggcctggctgggtgggagtcatgtggccgtggtggacaaagcttgctgagggttttagcccttggaatggccagggaccactggatgtacttcctcctgtctgcccacccactcaaggggatgacagggacacacctgcccccctgaggtcacatgctttgtttccatttcttcttggtccagaccagccattgtgggacaacacacctgccctacaagctcccaggtcacccctctgccacctgggttactttgaactctgcagtctggctgtgctgtcttttgtcttccaagtccatgtgcctctggctactgtgtgtctgtgcgcggcccacacatgttcatcacgccactcttggcagaaggcatttgctgagtgtcactgtgagccaggcacgcccgtgagctctgtgatgtgtgtcttgatgcttctctgggggctgcttctgtgttcctttgtccccacattgctacctctttgtcagtctggtgtctcaggttctgcgtattttctccccatgtacacttctccctcttcctcctccgtctgtccctgtcaccacacccgctgtatcctctgggtgtttgtagggcccagcctgcccctgggactggcagttcctgacccccatgaccccttccctcccttcagactctgccagtcagttcccacggagccatttttagctcccagggccgtgagagccagcccaggcctccaagggggctctgccctgattcccaacgtgtgtgccgcagtcatgaggatctttttctcagtgacagccctgcagaggggaccccatggcagctggtctccatcccttcttcatgagcttagggtggcttcttccctcccccccccctttcctcctaaattagcttcctggttgtatcccaaggaaatcattagcacctag

SEQ ID NO: 538 - protein, 980 aa, Mus musculus
MVNCTIKSEEKKEPCHEAPQGAAPAVETQPGDPALASQDATNAKAPPQDCASPESSGSPEPKRPAASEAASGSQERLDFNRNLQEVVPAIEKLLSSDWKERFLGRSNVEAKDVKGTQESLAEKELQLLVMIHQLSALRDQLLTAHSEQKNMAAMLFEKQQQQMELARQQQEQIAKQQQQLIQQQHKINLLQQQIQQVNMPYVMIPAFPPSHQPLPVTPDSQLALPIQPIPCKPVEYPLQLLHSPPAPVVKRSGVAAHHPLQEPPQPLNLTAKPKVPELPNTSSSPSLKMNSCGPRPASHGAPTRDLQSSPPSLPLGFLGEGDAVTKAIQDARQLLHSHSGALENSPNTPFRKDLISLDSSPAKERLEESCVHPLEEAMLSCDMDGSRHFSESRNSSHIKRPMNAFMVWAKDERRKILQAFPDMHNSSISKILGSRWKSMTNQEKQPYYEEQARLSRQHLEKYPDYKYKPRPKRTCVVEGRRLRVGEYKALMRTRPGCSPKLHHPVSRPSLVARGGLWLLPQAGQAQVSSDILFPRAAGLPLARPLVEHYDPQGLDPNMPVIINTCSLREEGEGTDDRHSVADGEMYRYSEDEDSEGDEKSDEWWYSQTDPQLGPARHRWGKDLVPIRTGTASLPELSWYLDLGGQVMGETALVDTFPRWGSSSSSHLWAHRRSQWPGWVGVMWPWWTKLAEGFSPWNGQGPLDVLPPVCPPTQGDDRDTPAPLRSHALFPFLLGPDQPLWDNTPALQAPRSPLCHLGYFELCSLAVLSFVFQVHVPLATVCLCAAHTCSSRHSWQKAFAECHCEPGTPVSSVMCVLMLLWGLLLCSFVPTLLPLCQSGVSGSAYFLPMYTSPSSSSVCPCHHTRCILWVFVGPSLPLGLAVPDPHDPFPPFRLCQSVPTEPFLAPRAVRASPGLQGGSALIPNVCAAVMRIFFSVTALQRGPHGSWSPSLLHELRVASSLPPPFPPKLASWLYPKEIIST

SEQ ID NO: 539 - DNA, 4338 bp, Mus musculus
agagtctgggagaacaagttcaggggcaggcgacaaggtccgggtgctgagcaaggtggctggacaagcctagcgggagagaaacctgaggccacgagcgacctccggaggagcccctagacgggagtcttagctgagacacggcagcatgcaaccagcccagatgcgccttgcagaacgagagcctattttcaacactcttcccgcagtcgggcctgcacgccttcaggaacccaccaccactctcccaattgttccctgaaatgaacgttcctggcgcgccctctcgtggactgttgaagtaaccatctgtctctaggaagccatggcaaccacgcatgcgcagggccaccagccagtcttgggaaatgacactctccgggaacattacgattacgtggggaaactggcaggcaggctgcgggacccccctgagggtggcaccctcatcaccaccatcctcttcttggtcacctgtagcttcatcgtcttggagaacctgatggttttgattgccatctggaaaaacaataaatttcacaaccgcatgtactttttcatcggcaacttggctctctgcgacctgctggccggcatagcatacaaggtcaatattcttatgtccggcaggaagacgttcagtctgtctccaacagtgtggttcctcagggagggcagtatgttcgtagccctgggcgcatccacctgcagcttactggccattgccattgagcgacacctgaccatgatcaagatgaggccatatgatgccaacaagaagcaccgcgtgttccttctgattgggatgtgctggctaattgccttctcgctgggtgccctgccaatcctgggctggaactgcctggagaactttcccgactgctctaccatcttgcccctctactccaagaaatacatcgccttcctcatcagtatcttcaccgccattctggtgaccatcgtcatcttgtatgcgcgcatctactgcctggtcaagtccagcagccgcagggtggccaaccacaactctgagagatccatggcccttctgcggaccgtagtgattgtggtgagtgtgttcattgcctgttggtccccactttttatcctcttcctcatcgacgtggcctgcagggcaaaggagtgctccatcctcttcaagagtcagtggttcatcatgctggctgtcctcaactcggccatgaaccctgtcatctacacgctggccagcaaagagatgaggcgcgccttcttccggttggtgtgcggctgtctagtcaagggcaaggggacccaggcctcacccatgcagcctgccctcgacccaagcagaagtaagtcaagctccagtaacaacagcagccactctccgaaggtcaaggaagacctgccccgcgtggctacttcttcctgcatcattgacaaaaacaggtcgtttcagaacggggtcctctgcaagtgacggtctcaacagggcaagctctgcagccacacctatttattgcatgcatcacttccacgtggggccttaagagatcttaactctggaggtctgcttgctgtggccagactgtgtggtatctcctgaggaggagacccaaggagtcaccaacgcatttcagcctggacttggatgtgacttatctgttgcgggctccatccttctgaatgtaccaagctgctgacacggtgcactgccttcggatgccgctacccctggtccagggaaggcaggtggtgatgtgctatgcacatgcacattgggatgatgtctccctgcgttcacactacatttattttccatagaatgggtgctcatgtgtgtgtgtgtgtgtgtgtgtgttcgttgctgtgttgtacaggatgtatacgattgattttcccaggtggaacccattacaaagtgtcagtcttccacacatcattggtccaaacctgcccacactgctgtcccaggttcagcatgtgataaggtcatgtccccttcccagtgcccttgcactggtgttctaactcatagctgtgaaaagttactaaagtattctgtattctcaaaagcctcacccaagagcagcccaggtgtgtgggtcttacccttacattcctgcacccctcctccctcttgggtcccttgcgtaagcttaggtacacctaagagccaaattatgcgatcattgaggcatttctgaaagccacagaaaagccagccgggatctctcggaatgcaggcaccactaaaggaagaactcctaaggagaggcaaggtgctctccactgtgggcaatctttctaggggactgcagtctgtctgctgcatgtagagagtttccagcagtgacgttcacaagccagcccttcatctgtatggtcctgagttcaagtctatagagagaagcttgaggctgcttgtcccctttgctgtcaccctttgctggcaaggagctggagctgtcagcaaagcttctcaactccctcagttatggaccctgtccaggactattcagtgagaggattccgccaggctgggaggcgtgatgtagttatttgtgtgctctttagagagaaccattccaattcccatatgatggacactccagccactctcctccgcttggacctgcgttcatttgtccatcctgtaaagaaaatgcgtagaagacacctctgaacatcccctccccaaggattccgcccacagggcacacagatgaaaggtgggtgcgttggagagtggccagcatccatgctcccagaacagccttcggaaagactctcatttgaggaaacgtcatgtcaaggctccccataagttgattagtctcagagactgttgccttatgaaccctggaagagcagcctttacacactcatgggcctttttaaaactgatttttttttccctcttggtggttacctgatggcatttgctcttgtttagggacatttttctgggccttaggtaaccctggtctgactaactaaagacttcccctcatgtcactcctggtgtatataggtcactgccaagaagttctgctccatcattggccttgcccttctctatgtcaccaagaaaatgtcaccgtgttgacaaaacccatggcatttctggaaaaggaaagcatacaagtgctgggttaagggaaaaataaatagcagagcagtgtgtaggggagttgaggtggaaagagaacagggcttgtgggcacgctctttcatgattgcaaggctttgaggccgtgggtctaggtcactgatattaatcacacattgtacaggattctggcttctccatttcctcctgtgtctgctttcacacaacagcccttgtggagggccaggcccaccatccccagctaggaggtgacatttgtagcatgacagactgccaagcaactgaaaataaaaatacactaaaacccaattgcgctcacttgatgtatgcccagtggatccgtcgaccgtgatgccagtgtgcacacctttccctagctagcctccgagacagcactgagacatcgggtgcatccaaccctcaccctgaaggtcaaaggtcggaaaccagtgacaccagagaccctggggctcgcccaaggtagtgagcaaccttggctacttgcagtttatgtttgttaataataaataaaaccaaaagcctgtataaaaacccatcctggaggcctgtgtggtatgttctattgttttggaatagacactcggggggtgtagtggggtggtcttgcttctctccctagaacctgatctcacagcattacaggcataaactacatttgatgcccaatcactaagtcccttttatcccccagggccatcttgtagatgatgttagattgaagctttagcgtactggatgctactgatacaggtctgggtagatgctgttttactggtggtggtggtggtggtggtggtagcggtggtgagtgtgtgtatgtgtgtgcccacccatgtacactattgtgcatgcaggagaggccagaggttaatgttggatctctctctctctctctatgctctccatcttggtttttttgttgttgttttgttgttgttgttgttgttttgttgtttgtttttttgagacaccatttctcactgaacccgaagctgccagctttggctagattgactgaccaacaattccccccaggacctgtgttcctcctgtcatggttataggcacaaactgccctctgtggcatttacgtaggcacagggcatcccaggggagccatttcccagcagatcctatgatttgaagaatggtaatagcccctctgtagggaagaaattataaaataaaaatgtcatccaacc

SEQ ID NO: 540 - protein, 378 aa, Mus musculus
MATTHAQGHQPVLGNDTLREHYDYVGKLAGRLRDPPEGGTLITTILFLVTCSFIVLENLMVLIAIWKNNKFHNRMYFFIGNLALCDLLAGIAYKVNILMSGRKTFSLSPTVWFLREGSMFVALGASTCSLLAIAIERHLTMIKMRPYDANKKHRVFLLIGMCWLIAFSLGALPILGWNCLENFPDCSTILPLYSKKYIAFLISIFTAILVTIVILYARIYCLVKSSSRRVANHNSERSMALLRTVVIVVSVFIACWSPLFILFLIDVACRAKECSILFKSQWFIMLAVLNSAMNPVIYTLASKEMRRAFFRLVCGCLVKGKGTQASPMQPALDPSRSKSSSSNNSSHSPKVKEDLPRVATSSCIIDKNRSFQNGVLCK

SEQ ID NO: 541 - DNA, 2978 bp, Mus musculus
gagacaacgaccctgactatttgaccagaccacaagcccaccctgaagatgtattctacaaacccgggcagctgggtcacctttgatgatgaccctgcttttcaatcttctcagaaaagaaaggatttttctctggagactcagggtgtttgtagaccaaacggactgaagctgacccttcctaccctccgggaccctcccagcaccccctcctctgccagcagcacccccctgtcctctcccatggtggatttttatttcagtccaggacccccaagcaactcccctctttctacacccaccaaagacttcccagggttccctggcatccctaaagcagggacacatgtgctttatcctattccagagtgttcttcaagcagtgcccccacaacggcgggaggagtgggtcccccattattacttactaagccagactgctccccccatgtatcgttacccagtagccactcccacactcagcccactccaacactcggttttacagaagacgctggccctcagcgggtccaaagcgaggctcggcagttcgaatattttcaggaccattgtgctttctccaacccattttggaaagatgaaggtagcgcttccccgttcccccttgactccctggcaagcagaaagccgttctcaccaaaggacaaggaggtacctattggccacaaaagcctaacccagtgctcactggactacatctgcgagaagctggaacacttgcactcagcggagacccaagaccctcttggagatttgtctatgcaggatccatatgcaggagacacagtctcgtttgtcccacactccctcttccggagtcagcccagagctggatggtccttcatgctgaggattcccgagaagaagaacatgatgtcttcccggcaatggggacccattttcctaaaggttcttcctggagggattctgcagatgtactatgagaaggggctagaaaaaccattcaaagagttccagcttgacccacattgcaggctttctgagcccaaactcgagaacttcagcatggcagggaaaatccacaccgtgaaggtggaacacgtgtcttactcagagaaaaggaaataccatgccaagacagaggtggttcacgagccggaagtggagcagatgctgaagctggggtccacggaacaccgtgacttcctcgagtttctgactaccgtcgaagaggagctaataaagctgccggctactgccaagcccaagaacaaaagctacgaggaacaagaaatttgcctggacattcaggacagcctttggggtaaagtaaccaaagaggggcagctggtggaaagcgccgtggtaactcagatctgctgcctctgctttctcaacgggcccgcggaatgtttcttagccttaaacgaccgtgagctccagaaacgggacgaatgctattttgagaaagaaccggaaaaaaaggggattgctattcttgactaccatttccatacgtgtgtgaaggctgaagaatttgaacagtccagaatcattaagttcgtgcctctggatgcttgccggtttgagctgatgcgtttcaaaacctcgtacgaagcgggtgagctcccctttgcggtgaagtccgtagtaactgtccagggagcctatgtggagctgcaggcctttgtcaacatgaccccagcagctcaggggtcaccccatgccggtgccctgaggagctgtaacaatatcatgattcattttcctgtcccagcccagtggatcaaggccctctggaccaggaaccttcagaggcagaagtccctgaaagccaaaatgaaccgtcgggcttgtctggggagtttacaggagcctgaatctgaacctgtcattcaggtcactgtcgggtcagcaaaatatgagagcgcctaccgggctgtggtgtggaagatagaccggcttccggataaaaactcaagtcctgatcagccccattgtctgtcatacaaactagaacttgggtcagaccaggaagttccctcagattggtatccatttgctactgtccagttttccatgcttgaagcctgtgcctcaaggacagaggtgaggtctctgggagtggagagcgatgcccagcctcagaagcacgtgtgtcagcgagcttgctacaacatccaggttgaaatagaaaagaagtggattcaagtagatggagaagacgcagataaaactggtggctgtgtaactcaataaacacaaccccacggttcaaacacagaacctacccacagggcaggaagttctgctactgtatggtgggactgagaagcggccttaggccagagatccagtggcgagtcccaaagcaggccatctgcgtgccactcttctgatgctctgcaatgtgtccatgagtcgtaccatgagttacatcatgttgaaacttggaggcgctgctatctgatgcaagacctgctggccagtttgactgaagggtatctgggtttggattcctcagcgactttgttttataatctgggttttgtgattccacatcgcttcttgctttctgtgtggaacggttcgaatggatgagaagagttaggagaaatgcagagtcagaataaatcagcaccagcaaccctggaagcatttcagagttccggggtgtacagattaccgtgaagcagagccagggggacagcaccgctggatgcaatgtgtctgtggcagtgtgcagaagcgaattttgtgtatttgctgccttaagccacacgctcagagactaagtcacactttccattacagataaatatattattagaacctgtgccattactgaaaaagaaaaccacatttgactgtaatgtataatatgtaaaagaaatagggttgtctctaaaatatatacatttaaacattcttatttaaggagggaacctcagtgatacttccattttacacaataaacaaattgaagtgctttcttt

SEQ ID NO: 542 - protein, 730 aa, Mus musculus
MYSTNPGSWVTFDDDPAFQSSQKRKDFSLETQGVCRPNGLKLTLPTLRDPPSTPSSASSTPLSSPMVDFYFSPGPPSNSPLSTPTKDFPGFPGIPKAGTHVLYPIPECSSSSAPTTAGGVGPPLLLTKPDCSPHVSLPSSHSHTQPTPTLGFTEDAGPQRVQSEARQFEYFQDHCAFSNPFWKDEGSASPFPLDSLASRKPFSPKDKEVPIGHKSLTQCSLDYICEKLEHLHSAETQDPLGDLSMQDPYAGDTVSFVPHSLFRSQPRAGWSFMLRIPEKKNMMSSRQWGPIFLKVLPGGILQMYYEKGLEKPFKEFQLDPHCRLSEPKLENFSMAGKIHTVKVEHVSYSEKRKYHAKTEVVHEPEVEQMLKLGSTEHRDFLEFLTTVEEELIKLPATAKPKNKSYEEQEICLDIQDSLWGKVTKEGQLVESAVVTQICCLCFLNGPAECFLALNDRELQKRDECYFEKEPEKKGIAILDYHFHTCVKAEEFEQSRIIKFVPLDACRFELMRFKTSYEAGELPFAVKSVVTVQGAYVELQAFVNMTPAAQGSPHAGALRSCNNIMIHFPVPAQWIKALWTRNLQRQKSLKAKMNRRACLGSLQEPESEPVIQVTVGSAKYESAYRAVVWKIDRLPDKNSSPDQPHCLSYKLELGSDQEVPSDWYPFATVQFSMLEACASRTEVRSLGVESDAQPQKHVCQRACYNIQVEIEKKWIQVDGEDADKTGGCVTQ

SEQ ID NO: 543 - DNA, 4536 bp, Mus musculus
ggacaggcaagaccgacctccactcaccaggagaaagaggcaaagcccctgggaaatccattgcctttgggaaggcttcaaaccaagcaagcattgaaaagttctgtacacaccgtaacacacttaccgaaagcaaggacacaggtttcctgtgcctccagccttcctgctacaagcaacgagtgtgtggagattgctcaaatatgtcagagacttcctcccacgactccttctatgactccttatcagacgtgcaggaagagggcaaaagtgctgacttctttccaggcctctctgctttcctcagccaggaagaaataaataaaagccttgacctggcacgcagagctatagacagctctgaaactgaagattttgactctgagaaggagatctcgcagattttcagcaagtctcccataagcctctgcgaaactccttcccatgaggagccgaaatcaggcaagcagacttcctcagaacgacctcaggatagcaggcgagcacctgtccagcctctaacaggagatcaagctgaaaggatcacttccccaggttcaaagagaaaacccggggtatcacccctgctggccagccccagctacatccggagcctccgcaaggctgaaaaacgaggtgcaaaaaatcccaatccaagttcaaagcccaaaactgcccagcaaagcaaggctggcccccagagccaactgtgcgacaaggcggctagtttcatcgaggaactgacctccatatttagagaagcggcaaagccaaggaacagaagcccaaatggtgagtcctcatcaccagacagtgggtatctgtctcctaaaaatcagccatcagccctgatgagtgcctcagccagtcagagccccactgcagaccagctagatcaactggagatggacgcagaagtcaagcaagcccagggcagcctttgctaccaggcccaccaggcctcggaagagaccttgccactcgctcacatcccgcacccacagccccagaaagcccgccacttgccaactgcacctaggttcatccagaaactgaggagccaagaagttgctgaaggaagcagagtttatttggagtgtagagtcacaggaaacccaacgcccagggtcagatggttctgtgaggggaaggagctgtacaacagtcctgacgttcagatccactgcgagagtggggagctgcacaccttggtcattgctgaggcctttgaggacgacacaggtcgctacacgtgtctggctacaaaccccagtggctcagacagcacatctgcagaggtgttcattgaaggagccagttcaacggactctgacagcgaaagcttatctttcatatcaaaagctggagccatgccacaagctcagaagaaaacaacgtccgtttccttaacgataggatcctcagctccgaaaacaggagtgaccacagctgtgattcagcccctatctgtgcccgtccaacaggctcacagcgctacttcatatctctgccgacctgacggaaccaccatgggctgccttcttcctgtttttactaaggaactacagaacacagcagcctccgagggccaggtggtggtgctggaatgcagagtccgaggggcacccccgctgcaggtccagtggttccggcaaggaagtgagatccaagactctccggacttcagaattctccagaaaaaacccagatcgacagctgaacccgaggagatctgcacccttgtcattgctgagagtttccctgaagatgcaggcatctttacctgctcagccacaaatgactacggctcagtgaccagcactgcacagcttgttataacctccgccaacaacgagaactgtagttacgactcaacaggagaacccaacagtgatcacttccaacactttccacctccccctccgatcctggagacaggctcctatgagctggcatcccagaaaccatctgaaatccagcaggtgaacagccccaatttaggatttagcatggcagctcttcaaatgcaattcaacactgcagagagggagaccaacggagtccatcccagccatggagtcaacgggctgattaatggcaaagcttatggcaataaatctcctccaacaccaactgccctgctttcacccactaaggaaccaccgccactccttgccaaacccaaactggatcctctgaagcttcagcagctgcagaaccaagtgcgcctggaacaggaggcctgcgcctggcccccagcgcccccaggtgtcccttgcaacagcagcagcagcggcagcagcgcgcccccgtcgccgcccttccccccaccgccaccagcctttccggagctcgcggcctgtgcgtcgccggtgccctcggagcccatgagcgctctggcctcccgcgctaccgccatgcagtcctccggctccttcaactacgcgcgccctaagcagttcatcgcggcgcagaacctgggtcccgcatcggggctgcccacgccaacctccagccccagctcctccagcttgccgtcaccattgtcccccacgcccaggcccttcggccgcgcgcccgggccgcccttcgtggaacccgaggccatgtggggcccgtcctcgccctcgccgccaccgccgccacctccggtcttcagcccctctgcagcctacccggtgcccgacgtgttcccactgccaccgccgccgccaccgctacctagctccacctcacactgcgcctcgcccgcccgcttcggccccagccagacgcccgcagccttcctcagcgccctgctgccctctcagccaccgcctgtcgctgtcaacgccctggggctgcccaagggagtcacccccgcggggttcccaaagaagtccagtagaactgctagaattgcctctgatgaggagattcaaggcacaaaggatgctgtcatccaagacctggaacggaagcttcgcttcaaggaggaccttctgaacaatggccaaccgaggctaacctatgaggaaagaatggctcgccgcctgcttggagccgacagcgcaaacgtcttcaacatccaggagccagaggaaacggcagccaatcaggacgctggggctcctcgggcttctgtagggggtcctctggatggtcaaaaggagtacaaagtctctagctgcgagcagaggctgattagcgagattgagtaccggctggagcgctcccctgtggatgagtcgggagacgaggtgcaggatccagatgtgcctgtggagaacgcaacagctcccttctttgagatgaagctgaaacactacaagatctttgaggggatgccggtgactttcacgtgtcgagtggctgggaatccaaagccaaagatctattggtttaaagatgggaagcagatttctccgaagagcgatcactacaccattcagagagaccttgatgggacctgctctctccacaccacggcctctaccctagacgacgatgggaactacaccatcatggctgccaaccctcagggtcgcgtcagttgtacaggaaggctaatggtacaggctgtcaaccaaagaggccgcagtccccgctctccctcaggccatcctcatgccagaaggcctcgctctcgatcacgggacagtggagatgaaaacgagcccattcaggagcgattcttcagacctcacttcctgcaggctcctggagacctgaccgttcaggaaggcaagctctgcaggatggactgcaaggtcagtgggttaccaaccccagatctcagctggcaactagatggaaagcccatacgccccgacagtgctcacaagatgctggtccgtgagaatggggtccactccctcattatagagccagtcacgtcccgggacgccggcatctacacatgtattgccaccaacagagcaggacagaactcgtttaacctggagcttgtggttgctgctaaggaagcacacaaggcccctgtgtttatggagaagctacagaacacgggggttgctgatggatacccagtgcggctggaatgccgtgtctcgggagtgccgccacctcagatattttggaagaaagaaaatgaatcgctcactcacagcactgagcgagtaagcatgcaccaggataatcatggctacatctgcctgctcatccagggagccacaaaggaagacgctgggtggtacactgtgtccgccaagaacgaagcaggcattgtgtcctgcactgcccggctggatgtctacacccagtggcaccagcagccacagaccaccaagccaaaaaaagtacggccctcggccagtcgctacgcagcactttcggaccagggactagacatcaaagccgctttccaacctgaagccagcccatctcacctgactctgaacagcggcttggtagaaagtgaagacctgtgatgggcgcccttgttgaagctgaaaactgaacgccagcgcttccaccagcctactcctctgtcgcattatgggaaaggcagaagtatacttttgacttaggaaattg

SEQ ID NO: 544 - protein, 323 aa, Mus musculus
MAALQMQFNTAERETNGVHPSHGVNGLINGKAYGNKSPPTPTALLSPTKEPPPLLAKPKLDPLKLQQLQNQVRLEQEACAWPPAPPGVPCNSSSSGSSAPPSPPFPPPPPAFPELAACASPVPSEPMSALASRATAMQSSGSFNYARPKQFIAAQNLGPASGLPTPTSSPSSSSLPSPLSPTPRPFGRAPGPPFVEPEAMWGPSSPSPPPPPPPVFSPSAAYPVPDVFPLPPPPPPLPSSTSHCASPARFGPSQTPAAFLSALLPSQPPPVAVNALGLPKGVTPAGFPKKSSRTARIASDEEIQGTKDAVIQDLERKLRFKED

SEQ ID NO: 545 - DNA, 3626 bp, Mus musculus
actcgcacacactcggcgcacacgcgcccctctgcagacgcggtgcactcgcgcggctgcagtccagctgcctggctccggtgacgggaccgggacccacgtcctcctctccaccgtaggctgccgggagccctgcgcaaggcggctctgctgcctgtgcattttcccgcacccgcaatctcgagcctaaaaagttgcactcggacagctggcgggatccgaaagagcccagaagagcttcttcggcggggtgtacagagcgtatttggtgcccagttgatggttctgtgaggggaaggagctgtacaacagtcctgacgttcagatccactgcgagagtggggagctgcacaccttggtcattgctgaggcctttgaggacgacacaggtcgctacacgtgtctggctacaaaccccagtggctcagacagcacatctgcagaggtgttcattgaaggagccagttcaacggactctgacagcgaaagcttatctttcatatcaaaagctggagccatgccacaagctcagaagaaaacaacgtccgtttccttaacgataggatcctcagctccgaaaacaggagtgaccacagctgtgattcagcccctatctgtgcccgtccaacaggctcacagcgctacttcatatctctgccgacctgacggaaccaccatgggctgccttcttcctgtttttactaaggaactacagaacacagcagcctccgagggccaggtggtggtgctggaatgcagagtccgaggggcacccccgctgcaggtccagtggttccggcaaggaagtgagatccaagactctccggacttcagaattctccagaaaaaacccagatcgacagctgaacccgaggagatctgcacccttgtcattgctgagagtttccctgaagatgcaggcatctttacctgctcagccacaaatgactacggctcagtgaccagcactgcacagcttgttataacctccgccaacaacgagaactgtagttacgactcaacaggagaacccaacagtgatcacttccaacactttccacctccccctccgatcctggagacaggctcctatgagctggcatcccagaaaccatctgaaatccagcaggtgaacagccccaatttaggatttagcatggcagctcttcaaatgcaattcaacactgcagagagggagaccaacggagtccatcccagccatggagtcaacgggctgattaatggcaaagcttatggcaataaatctcctccaacaccaactgccctgctttcacccactaaggaaccaccgccactccttgccaaacccaaactggatcctctgaagcttcagcagctgcagaaccaagtgcgcctggaacaggaggcctgcgcctggcccccagcgcccccaggtgtcccttgcaacagcagcagcagcggcagcagcgcgcccccgtcgccgcccttccccccaccgccaccagcctttccggagctcgcggcctgtgcgtcgccggtgccctcggagcccatgagcgctctggcctcccgcgctaccgccatgcagtcctccggctccttcaactacgcgcgccctaagcagttcatcgcggcgcagaacctgggtcccgcatcggggctgcccacgccaacctccagccccagctcctccagcttgccgtcaccattgtcccccacgcccaggcccttcggccgcgcgcccgggccgcccttcgtggaacccgaggccatgtggggcccgtcctcgccctcgccgccaccgccgccacctccggtcttcagcccctctgcagcctacccggtgcccgacgtgttcccactgccaccgccgccgccaccgctacctagctccacctcacactgcgcctcgcccgcccgcttcggccccagccagacgcccgcagccttcctcagcgccctgctgccctctcagccaccgcctgtcgctgtcaacgccctggggctgcccaagggagtcacccccgcggggttcccaaagaagtccagtagaactgctagaattgcctctgatgaggagattcaaggcacaaaggatgctgtcatccaagacctggaacggaagcttcgcttcaaggaggaccttctgaacaatggccaaccgaggctaacctatgaggaaagaatggctcgccgcctgcttggagccgacagcgcaaacgtcttcaacatccaggagccagaggaaacggcagccaatcaggagtacaaagtctctagctgcgagcagaggctgattagcgagattgagtaccggctggagcgctcccctgtggatgagtcgggagacgaggtgcaggatccagatgtgcctgtggagaacgcaacagctcccttctttgagatgaagctgaaacactacaagatctttgaggggatgccggtgactttcacgtgtcgagtggctgggaatccaaagccaaagatctattggtttaaagatgggaagcagatttctccgaagagcgatcactacaccattcagagagaccttgatgggacctgctctctccacaccacggcctctaccctagacgacgatgggaactacaccatcatggctgccaaccctcagggtcgcgtcagttgtacaggaaggctaatggtacaggctgtcaaccaaagaggccgcagtccccgctctccctcaggccatcctcatgccagaaggcctcgctctcgatcacgggacagtggagatgaaaacgagcccattcaggagcgattcttcagacctcacttcctgcaggctcctggagacctgaccgttcaggaaggcaagctctgcaggatggactgcaaggtcagtgggttaccaaccccagatctcagctggcaactagatggaaagcccatacgccccgacagtgctcacaagatgctggtccgtgagaatggggtccactccctcattatagagccagtcacgtcccgggacgccggcatctacacatgtattgccaccaacagagcaggacagaactcgtttaacctggagcttgtggttgctgctaaggaagcacacaaggcccctgtgtttatggagaagctacagaacacgggggttgctgatggatacccagtgcggctggaatgccgtgtctcgggagtgccgccacctcagatattttggaagaaagaaaatgaatcgctcactcacagcactgagcgagtaagcatgcaccaggataatcatggctacatctgcctgctcatccagggagccacaaaggaagacgctgggtggtacactgtgtccgccaagaacgaagcaggcattgtgtcctgcactgcccggctggatgtctacacccagtggcaccagcagccacagaccaccaagccaaaaaaagtacggccctcggccagtcgctacgcagcactttcggaccagggactagacatcaaagccgctttccaacctgaagccagcccatctcacctgactctgaacagcggcttggtagaaagtgaagacctgtgatgggcgcccttgttgaagctgaaaactgaacgccagcgcttccaccagcctactcctctgtcgcattatgggaaaggcagaagtatacttttgacttagg

SEQ ID NO: 546 - protein, 492 aa, Mus musculus
ASDEEIQGTKDAVIQDLERKLRFKEDLLNNGQPRLTYEERMARRLLGADSANVFNIQEPEETAANQEYKVSSCEQRLISEIEYRLERSPVDESGDEVQDPDVPVENATAPFFEMKLKHYKIFEGMPVTFTCRVAGNPKPKIYWFKDGKQISPKSDHYTIQRDLDGTCSLHTTASTLDDDGNYTIMAANPQGRVSCTGRLMVQAVNQRGRSPRSPSGHPHARRPRSRSRDSGDENEPIQERFFRPHFLQAPGDLTVQEGKLCRMDCKVSGLPTPDLSWQLDGKPIRPDSAHKMLVRENGVHSLIIEPVTSRDAGIYTCIATNRAGQNSFNLELVVAAKEAHKAPVFMEKLQNTGVADGYPVRLECRVSGVPPPQIFWKKENESLTHSTERVSMHQDNHGYICLLIQGATKEDAGWYTVSAKNEAGIVSCTARLDVYTQWHQQPQTTKPKKVRPSASRYAALSDQGLDIKAAFQPEASPSHLTLNSGLVESEDL

SEQ ID NO: 547 - DNA, 1325 bp, Mus musculus
ggaggagccctcgacacccaccctcttgcttcgctgagaccccagatcggcgagcgccaggcagagccgggagactcaagggatcctctgaagcttcagcagctgcagaaccaagtgcgcctggaacaggaggcctgcgcctggcccccagcgcccccagggggttcccaaagaagtccagtagaactgctagaattgcctctgatgaggagattcaaggcacaaaggatgctgtcatccaagacctggaacggaagcttcgcttcaaggaggaccttctgaacaatggccaaccgaggctaacctatgaggaaagaatggctcgccgcctgcttggagccgacagcgcaaacgtcttcaacatccaggagccagaggaaacggcagccaatcaggagtacaaagtctctagctgcgagcagaggctgattagcgagattgagtaccggctggagcgctcccctgtggatgagtcgggagacgaggtgcaggatccagatgtgcctgtggagaacgcaacagctcccttctttgagatgaagctgaaacactacaagatctttgaggggatgccggtgactttcacgtgtcgagtggctgggaatccaaagccaaagatctattggtttaaagatgggaagcagatttctccgaagagcgatcactacaccattcagagagaccttgatgggacctgctctctccacaccacggcctctaccctagacgacgatgggaactacaccatcatggctgccaaccctcagggtcgcgtcagttgtacaggaaggctaatggtacaggctgtcaaccaaagaggccgcagtccccgctctccctcaggccatcctcatgccagaaggcctcgctctcgatcacgggacagtggagatgaaaacgagcccattcaggagcgattcttcagacctcacttcctgcaggctcctggagacctgaccgttcaggaaggcaagctctgcaggatggactgcaaggtcagtgggttaccaaccccagatctcagctggcaactagatggaaagcccatacgccccgacagtgctcacaagatgctggtccgtgagaatggggtccactccctcattatagagccagtcacgtcccgggacgccggcatctacacatgtattgccaccaacagagcaggacagaactcgtttaacctggagcttgtggttgctgctaaggaagcacacaaggcccctgtgtttatggagaagctacagaacacgggggttgctgatggatacccagtgcggctggaatgccgtgtctcgggagtgccgccacctcagatattttgg

SEQ ID NO: 548 - protein, 441 aa, Mus musculus
RSPRHPPSCFAETPDRRAPGRAGRLKGSSEASAAAEPSAPGTGGLRLAPSAPRGFPKKSSRTARIASDEEIQGTKDAVIQDLERKLRFKEDLLNNGQPRLTYEERMARRLLGADSANVFNIQEPEETAANQEYKVSSCEQRLISEIEYRLERSPVDESGDEVQDPDVPVENATAPFFEMKLKHYKIFEGMPVTFTCRVAGNPKPKIYWFKDGKQISPKSDHYTIQRDLDGTCSLHTTASTLDDDGNYTIMAANPQGRVSCTGRLMVQAVNQRGRSPRSPSGHPHARRPRSRSRDSGDENEPIQERFFRPHFLQAPGDLTVQEGKLCRMDCKVSGLPTPDLSWQLDGKPIRPDSAHKMLVRENGVHSLIIEPVTSRDAGIYTCIATNRAGQNSFNLELVVAAKEAHKAPVFMEKLQNTGVADGYPVRLECRVSGVPPPQIFW

SEQ ID NO: 549 - DNA, 2339 bp, Mus musculus
gccttagggaaatgaacattgttcatcatttcttaagcttaccacaacttaatttctttctcacattacgttgtgagctacccagggacatcatccttttaaagacttttcggttctgattcttcatctgagaaaactcatttaaagctccgagaatttaaagtctccccaaatggataacaaactggatgtcttcaggagggagttagtggatgttgaaggtatccctctcttttggagcattgctgagcattggtcccaagtagagtcatttgaagcccggcctgatgacattttgatctccacatatcccaaatctggaacaacttgggtcagtgaaatactggatttgatctacaacaatggggatgcagagaaatgtaaaagggatgcaatctacaaacgagtaccattcatggagcttataattcctgggataacaaatggagttgaaatgctgaacaacatgccgtctcctcgaatagtgaaaacacaccttcctgttcagctgcttccttcctcattctggaaaaatgactgcaagattatttatgtggcacggaatgccaaagatgtggttgtttcttactattatttctatcaaatggcaaaaatccacccagagcctggcacctgggaagagttcctagagaaattcatggctggacaagtgagctttggtccctggtatgatcatgtgaagagctggtgggaaaaaagaaaagaatatcggatcctttacctgttttatgaagatatgaaagaaaatccaaagtgtgaaattcaaaaaatattaaagtttctagaaaaggacataccagaagaaattttaaataaaatactctaccatagctctttcagtgtaatgaaggagaatcctagtgcaaattacactactatgatgaaagaagagatggaccactctgtgtctcctttcatgagaaagggaatttcaggcgattggaagaatcagttcactgtagcccagtatgagaaatttgaagaagattatgtcaagaaaatggaagattcaacactgaagtttagatcagagatctagggagagttggtttcttctcagtctcttttgtcaggcactaacattagagaaaaagcacattcatggttcagtcaaagaaaatgttgtatattatttttctatacttactaaaactcttggtcttgaaatgtacagatatcaggtaataattctcttctaattatcttccttacagaaaggttcatatagtagtttcccttttactttatgttatcaaaataatacaattttaagaggctttataacacagtatatttttagttttagttcctaatagcttcctgtctgaaatagtctcagtggcctcctagaggaagattacatttcattaattaattcaacttcatctgtggtgattttgcattttaaaatattatgttgttaacattgccaaattatttagattcattatgtcagaatatcctgttttctcttaaaccttatttagaaatattaaattttaatgaaaaaatcaataaaacccattttatagatttaaattaagaaaattagagatctaattattttatccttcatttcctatattgaagctattgtgaaatttattacagaaaatgttgaggcttattcaaaatactccaaattattattctattgtctattttatgtccacttaggatcactttttaaaggaaaactctgtacaataaactaatttccataatctctcttctttttttttttttattgggttttggatcacaccagggtcattttcatcctcctgaaattaatcattcctgagtgagataaatactcatttttgaactatcacgaaatatgaattcaaatccctttacatttgacttcaggaactaatgtttagtgaaaaatgaaaacttaaaaataaatgaataaagtactgtatgattacattcaatgtataacattcttgacatgagaaaattgttgaagtggacagctagttaatggtaacataatttaatgaagaactttaaaggacatgataggagtcacagaacagcaacctgggcaatattgctgtagaacaagtagtctgtaatatattaatattctggcattaataaaatgttataggcttaccagatgttactactggagaaaatgtgctaaaattataatttctgaccatttcatgctgattgtctcaaattttaccattatgtttaatgaatgtcttactatttttaatttttttctaaagccaaggtaattttaagtaacaacaccagtaatgactgtctaaaataaacatccttaaataaattcaacaatg

SEQ ID NO: 550 - protein, 295 aa, Mus musculus
MDNKLDVFRRELVDVEGIPLFWSIAEHWSQVESFEARPDDILISTYPKSGTTWVSEILDLIYNNGDAEKCKRDAIYKRVPFMELIIPGITNGVEMLNNMPSPRIVKTHLPVQLLPSSFWKNDCKIIYVARNAKDVVVSYYYFYQMAKIHPEPGTWEEFLEKFMAGQVSFGPWYDHVKSWWEKRKEYRILYLFYEDMKENPKCEIQKILKFLEKDIPEEILNKILYHSSFSVMKENPSANYTTMMKEEMDHSVSPFMRKGISGDWKNQFTVAQYEKFEEDYVKKMEDSTLKFRSEI

SEQ ID NO: 551 - DNA, 1099 bp, Mus musculus
gccttagggaaatgaacattgttcatcatttcttaagcttaccacaacttaatttctttctcacattacgttgtgagctacccagggacatcatccttttaaagacttttcggttctgattcttcatctgagaaaactcatttaaagctccgagaatttaaagtctccccaaatggataacaaactggatgtcttcaggagggagttagtggatgttgaaggtatccctctcttttggagcattgctgagcattggtcccaagtagagtcatttgaagcccggcctgatgacattttgatctccacatatcccaaatctggaacaacttgggtcagtgaaatactggatttgatctacaacaatggggatgcagagaaatgtaaaagggatgcaatctacaaacgagtaccattcatggagcttataattcctgggataacaaatggagttgaaatgctgaacaacatgccgtctcctcgaatagtgaaaacacaccttcctgttcagctgcttccttcctcattctggaaaaatgactgcaagattatttatgtggcacggaatgccaaagatgtggttgtttcttactattatttctatcaaatggcaaaaatccacccagagcctggcacctgggaagagttcctagagaaattcatggctggacaagtgagctttggtccctggtatgatcatgtgaagagctggtgggaaaaaagaaaagaatatcggatcctttacctgttttatgaagatatgaaagaaaatccaaagtgtgaaattcaaaaaatattaaagtttctagaaaaggacataccagaagaaattttaaataaaatactctaccatagctctttcagtgtaatgaaggagaatcctagtgcaaattacactactatgatgaaagaagagatggaccactctgtgtctcctttcatgagaaagggaatttcaggcgattggaagaatcagttcactgtagcccagtatgagaaatttgaagaagattatgtcaagaaaatggaagattcaacactgaagtttagatcagagatcgggagagttggtttcttctcagtctcttttgtcaggcactaa

SEQ ID NO: 552 - protein, 308 aa, Mus musculus
MDNKLDVFRRELVDVEGIPLFWSIAEHWSQVESFEARPDDILISTYPKSGTTWVSEILDLIYNNGDAEKCKRDAIYKRVPFMELIIPGITNGVEMLNNMPSPRIVKTHLPVQLLPSSFWKNDCKIIYVARNAKDVVVSYYYFYQMAKIHPEPGTWEEFLEKFMAGQVSFGPWYDHVKSWWEKRKEYRILYLFYEDMKENPKCEIQKILKFLEKDIPEEILNKILYHSSFSVMKENPSANYTTMMKEEMDHSVSPFMRKGISGDWKNQFTVAQYEKFEEDYVKKMEDSTLKFRSEIGRVGFFSVSFVRH

SEQ ID NO: 553 - DNA, 5281 bp, Mus musculus
tttccaacaggagaccagtgcctgtagctccagtaaagatgtctactccagacccacccttgggtgggactcctcggcctggtccttccccaggccctggtccttcacctggtgcaatgctgggtcctagccctggcccctcaccaggttctgcccacagcatgatggggccaagcccaggacctccttcagcaggacatcccatgcccacccaggggcctggagggtacccccaggacaacatgcatcagatgcacaagcctatggagtccatgcacgagaagggcatgcctgatgacccacgatacaaccagatgaaagggatgggcatgcggtcaggggcccacacaggcatggcacctccacctagtcccatggaccagcattctcaaggttacccctcacccctcggcggctctgaacatgcctccagtcctgtcccagccagtggcccatcttcaggcccccagatgtcctctgggccaggaggggccccactagatggttctgatccccaggccttgggacagcaaaacagaggcccaaccccatttaaccagaaccagctgcatcaactcagagctcagataatggcctacaagatgttggccaggggccagccattgcccgaccacctgcagatggccgtgcaaggcaagcggccgatgcctggaatgcagcaacagatgccaacactacctccaccctcagtgtccgccacaggacccggacctggacccggccctggccctggccctggcccaggaccagcccctccaaattacagtagaccccatggtatgggagggcccaacatgcctcccccaggaccctcaggtgtgccccccgggatgcctggtcagccgcctggagggcctcccaagccatggcctgaaggacccatggccaatgctgctgcccccacaagcaccccacagaagctgattcctccgcaaccaacaggccgtccttcacctgcacctcctgctgtcccgcctgctgcctcacctgtaatgccaccacaaacacagtccccagggcagccagcccagcctgctccattggtgccactgcaccagaagcagagccgaatcacccccatccagaagccccgaggccttgaccctgtggagatcctacaagagcgggagtacaggcttcaggctcgaatcgcacacagaattcaggaacttgaaaacctccctgggtccctggctggggaccttcgaaccaaagcaaccatcgaactcaaggcccttaggttgctgaacttccagaggcagctgcgccaggaggtggtggtgtgcatgcgaagagacacagccctggagacagccctcaatgccaaggcctacaagcgcagcaaacgtcagtcactacgggaggcccgcatcactgagaagttggagaagcagcagaagattgaacaggagcgcaagcgccgccagaagcaccaggagtacctcaacagcattctgcagcatgccaaggacttcagggagtatcacagatcagtcacaggcaaactccagaaactcaccaaggctgtggccacctaccatgccaacactgagcgggagcagaagaaagaaaatgagcgcattgagaaggagcgaatgcggaggcttatggctgaagatgaggagggctaccgcaaactcattgaccagaagaaggacaagcgcctggcctaccttctgcagcagacagatgagtatgtggccaacctcacagagctggtgcggcagcacaaagctgcccaggttgccaaggagaagaagaagaaaaagaaaaagaagaaggcagaaaatgctgaaggacagacacctgctattggaccagatggtgagcctctggatgagaccagccagatgagtgacctccctgtgaaggtgatccacgtggagagtggcaagatcctcactggcacagatgccccaaaagccgggcagctggaagcctggcttgaaatgaacccagggtatgaagtagcccccaggtcagacagtgaagaaagtggctctgaagaggaggaggaggaggaggaagaggagcagcctcagcccgcacagccccctacactgcctgtggaagaaaagaagaagattccagacccagacagcgatgatgtctctgaggtggacgcccgacacattattgagaacgccaagcaagatgtggacgatgagtacggtgtgtcccaggcccttgctcgtggcctgcagtcttactatgctgtggcccatgcagtcacagagagagtagataagcagtccgccctcatggtcaacggtgtcctcaaacagtaccagatcaagggtttggagtggctggtgtccctgtacaacaacaacctgaatggcatcctggctgatgagatggggctggggaagaccatccagaccatcgcgctcatcacatacctcatggagcacaagcgcatcaacgggcctttcctcatcatcgtgcctctctcgacactgtcaaactgggcgtatgaatttgacaagtgggccccctctgtggtgaaggtttcttacaagggctctccagctgcaaggcgagcttttgtcccacagcttcgcagtgggaagttcaacgtcttactgaccacctatgaatatatcatcaaagacaagcatatcctagccaagatccgctggaagtacatgattgtggatgaaggccaccgcatgaaaaaccaccactgcaagttgacgcaggtccttaacacacactacgtggcccctcggcgcctgcttcttacaggcacaccactgcagaacaagctaccggagctctgggccctgcttaacttcctgctccccactatcttcaagagctgcagcaccttcgaacagtggttcaatgcaccctttgccatgactggagaaaaggtggacctgaatgaagaggagactatcctcattattcgtcgcctacacaaagttctgcggcccttcctgctgcggcggctcaagaaggaagttgaagcccagctccctgagaaggtagagtatgtcatcaaatgcgacatgtcagccctgcagcgtgtgctgtaccgtcacatgcaggccaaaggtgtgctgctgactgacggctccgagaaggacaagaagggcaaaggtggcaccaagacactgatgaacactattatgcaactgcgtaagatctgcaaccacccctacatgttccagcacatcgaggagtccttttctgagcacttggggttcaccggcggcatcgtgcaaggattggacctttaccgtgcctcagggaaatttgaacttcttgatagaattctacccaaactccgtgcaacgaaccataaagtgctcctcttttgccaaatgacctccctcatgaccatcatggaagactactttgcataccgtggcttcaaatacctcaggcttgatggaaccacaaaagcagaagaccggggcatgctgttgaaaacctttaatgaacctggctctgagtatttcattttcctgctcagtacccgtgctggggggctgggcctgaatctgcagtcagctgacactgtgatcatctttgacagtgactggaatccccaccaggacctgcaagcacaggatcgagcccatcgcattggacagcagaatgaggtgcgtgttcttcgcctgtgcacggtcaacagtgtggaagagaagatactggctgctgccaaatacaaactcaatgtggatcagaaggtgatccaggcaggcatgttcgaccagaagtcgtccagccatgagaggcgtgccttcctgcaggccatcctggagcacgaggagcaggatgaggaggaagatgaggtgcctgatgatgagaccgtcaaccagatgattgcccggcacgaagaagagtttgacctcttcatgcgcatggacttggaccgccggcgtgaagaagcccgcaaccccaagcggaagccacgcctgatggaagaggatgagctcccatcctggatcatcaaggatgatgccgaggtggagcggctgacatgtgaagaggaagaggagaagatgttcggccgtggttctcgccaccgcaaggaggtagactacagcgactcactgacagagaagcagtggctcaaggctatcgaggagggcacgctggaggagatcgaagaggaggtccggcagaagaaatcttcacgtaagcgtaagcgagacagcgaggccggctcctccaccccgaccaccagcacccgcagccgtgacaaggatgaggagagcaagaagcagaagaaacgtgggcggccacctgctgagaagctgtccccaaacccacctaacctcaccaagaagatgaagaagatcgtggatgctgtgatcaagtacaaagacagcagcagtggacgtcagctcagcgaggtgttcatccagctcccctctcgcaaggagcttcctgagtactatgagctcatccgaaagcctgtggacttcaagaagatcaaggaacgcatccgaaaccacaagtaccgcagcctcaatgacctggagaaggatgtgatgctgctgtgccagaacgctcagacgttcaacctcgagggttccctgatctatgaggactccatcgtcctgcagtctgtcttcaccagcgtacggcagaagattgagaaggaggacgacagtgaaggcgaggaaagcgaggaggaggaggagggcgaggaggaaggctccgagtctgagtcccgctccgtcaaggtgaagatcaagctgggccgcaaggagaaggcccaggaccgactcaaggggggccgccggcggccaagccggggatcccgggccaagccggttgtgagtgacgatgacagtgaggaggagcaggaggaggaccgctcaggaagtggcagtgaggaagactgaaccagacattcctgagtcctgaccccgaggcgctcgtcccagccaagatggagtagcccttagcagtgatgggtagcaccagatgtagtttcgaacttggagaactgtacacatgcaatcttccacatttttaggcagagaagtataggcctgtctgtcggccctggcctggcctcgagtctctaccagcattaactgtctagagaggggacctcctgggagcaccatccacctccccaggccccagtcactgtagctcagtggatgcatgcgcgtgccggccgctccttgtactgtatcttactggacagggccagctctccaggaggctcacaggcccagcgggtatgtcagtgtcactggagtcagacagtaataaattaaagcaatgacaagcc

SEQ ID NO: 554 - protein, 1348 aa, Mus musculus
MSTPDPPLGGTPRPGPSPGPGPSPGAMLGPSPGPSPGSAHSMMGPSPGPPSAGHPMPTQGPGGYPQDNMHQMHKPMESMHEKGMPDDPRYNQMKGMGMRSGAHTGMAPPPSPMDQHSQGYPSPLGGSEHASSPVPASGPSSGPQMSSGPGGAPLDGSDPQALGQQNRGPTPFNQNQLHQLRAQIMAYKMLARGQPLPDHLQMAVQGKRPMPGMQQQMPTLPPPSVSATGPGPGPGPGPGPGPGPAPPNYSRPHGMGGPNMPPPGPSGVPPGMPGQPPGGPPKPWPEGPMANAAAPTSTPQKLIPPQPTGRPSPAPPAVPPAASPVMPPQTQSPGQPAQPAPLVPLHQKQSRITPIQKPRGLDPVEILQEREYRLQARIAHRIQELENLPGSLAGDLRTKATIELKALRLLNFQRQLRQEVVVCMRRDTALETALNAKAYKRSKRQSLREARITEKLEKQQKIEQERKRRQKHQEYLNSILQHAKDFREYHRSVTGKLQKLTKAVATYHANTEREQKKENERIEKERMRRLMAEDEEGYRKLIDQKKDKRLAYLLQQTDEYVANLTELVRQHKAAQVAKEKKKKKKKKKAENAEGQTPAIGPDGEPLDETSQMSDLPVKVIHVESGKILTGTDAPKAGQLEAWLEMNPGYEVAPRSDSEESGSEEEEEEEEEEQPQPAQPPTLPVEEKKKIPDPDSDDVSEVDARHIIENAKQDVDDEYGVSQALARGLQSYYAVAHAVTERVDKQSALMVNGVLKQYQIKGLEWLVSLYNNNLNGILADEMGLGKTIQTIALITYLMEHKRINGPFLIIVPLSTLSNWAYEFDKWAPSVVKVSYKGSPAARRAFVPQLRSGKFNVLLTTYEYIIKDKHILAKIRWKYMIVDEGHRMKNHHCKLTQVLNTHYVAPRRLLLTGTPLQNKLPELWALLNFLLPTIFKSCSTFEQWFNAPFAMTGEKVDLNEEETILIIRRLHKVLRPFLLRRLKKEVEAQLPEKVEYVIKCDMSALQRVLYRHMQAKGVLLTDGSEKDKKGKGGTKTLMNTIMQLRKICNHPYMFQHIEESFSEHLGFTGGIVQGLDLYRASGKFELLDRILPKLRATNHKVLLFCQMTSLMTIMEDYFAYRGFKYLRLDGTTKAEDRGMLLKTFNEPGSEYFIFLLSTRAGGLGLNLQSADTVIIFDSDWNPHQDLQAQDRAHRIGQQNEVRVLRLCTVNSVEEKILAAAKYKLNVDQKVIQAGMFDQKSSSHERRAFLQAILEHEEQDEEEDEVPDDETVNQMIARHEEEFDLFMRMDLDRRREEARNPKRKPRLMEEDELPSWIIKDDAEVERLTCEEEEEKMFGRGSRHRKEVDYSD

SEQ ID NO: 555 - DNA, 2838 bp, Mus musculus
gagagagcctgcggggaagagccaaggcggcggaggtgaacgcgcgagggaaattataaatattcgaccttactcaaaatgtacaaagaagaataatggaagcccctgaataccttgatttggatgaaatcgactttagtgatgacatttcttattcagtcacctctctcaagaccatcccagcactgtgcagaagatgtgactcacaaaacgaagacagatcagtttctagctctggctggaattgtggtgtctcaactctcattacaaacccacaaaagcccactggaatcgctgatgtatacagtaagttccgcccagtgaagcgagtttctccactgaagcatcagccggagactctggagaacaacgaaaatgaggaccaaaagaacaatacggtggaataccagaaagggggggagactgaccagggcccccagcctgaggagctcagccctgaagatggagtcggggggttgccaggcaaaggctcagagcccagccaagccctgggcgagctggagcactatgacctcgacatggatgagattctcgatgtgccttacattaaatccagtcaacagctggccccgctcacgaaggtgacttcggagaaaaggattctgggtttatgcacaaccatcaatggcctctctgccaaaacctgccctattgcaagcactgagaactccacacccaacatgactccattttgtgttctttctcctgtgaaaagccctcacttacggaaagcacctactgccctccgggaccagcacaagctctctacagaagactccgagagctcgccagctctgggtaaatgtggccctgcatatgaatcagaaaaccacagtaaagacttcttaaacaaggtttttagtgatccccatagtcggaaaattgagaagtctgggccagactgcaagctcaggtccttccacctgcaatcttcagcagcaggagccaaaacagaggagccgatcaatggcatgaactggaccaacacccaaggcacggaagaaagaactgagtacctgaagaaagtaagaagcatactgaacattgtcaacgaaggacagatatcgctcttgccacacctagctgcagacaatctggacaaaattcacgatgagaacggaaacaatctgttacacattgctgcatcaaagggccatgcagaatgcctgcagcacctcacgtcactgatgggcgaagactgtctgaatgaacggaacacagagcagctgactccagcaggcctggccatcaagaatggtcagctggagtgtgttcgctggatggtgagtgagacagaagccattgcggaattgagttgttccaaggatttcccaagccttattcattacgcaggttgctatgggcaggaaaagatccttctgtggcttcttcaattcatgcaagaacaaggcatctcattggatgaagtggaccgggaaggcaacagtgctgttcatgtcgcctcacaacatggctaccttggatgcatacagaccctggtggagtatggagcgaatgtcacaatgcagaaccacgctggggaaaagccctcccagagtgctgagcggcacggccacaccctatgctcccggtacctcgtggtggtggagacctgcatgtcactggcctcacaagtggtaaagttgaccaagcagctaaaggagcagacagtggagcgtgtcacactgcagagtcaactccaacaacttctagaagcccagaaatcagagggcaagtccctgccttcttcacccagttcaccctcctcaccagcttctacaaagtcccagtggaaagctctagatacagatgaggagtctacaggcaaaagcaaagtgggagcccaggagggaatacaagttcttggaagtttgtcagtctccagcagggctaggaccaaaggaaaagatgaagactcagataaaatcctacgtcagttattggggaaagaaatatcagagaatgtctgcacccaggaaaagctgtcactggaattccaggatgctcaggcatcctctaggaattcgaaaaaaatccctctagagaagagggaactgaagctagccagactgaggcagctgatgcagagatcgttgagtgaatctgacacggactcaaacaactctgaagatcccaaaaatactcctgtgaaaagagcagacaggccgaggccacagcccattgtagaaagcgtggagaatgtagacagcgcagaaagcttacacctgatgataaagaaacactctctggcatcaggacgcaggtttccttttggtatgaaagcctccaaatccctggatggacacagcccatctcccacctcagagagcagtgaaccagacttggactcccatggtccaggcctggggatgactcctccaacccagccttccacagaagccactcagtccagtcccgacagtaccgctgcccagaaagttgccacaagccccaagagtgccctcaagtctccatcatccaagcgccggacatcccaaaactcaaaactcagagtgacctttgaggaacctgtcgtacaaatggaacaaactggccttgaactaaatggagaaaaagacaaagataagggcagggccccccagaggactagtgaatccggagaacaaatgaaaaggcctttcggaaccttccgatccatcatggagagtttaagtggtaatcagaacaacaataataactaccagccagccagccagctgaagacctgcacactacccttgacatcccttggaaggaagacagcagatgccaagggaaatcctgtgagcccggcgagcaaaggaaagaataaggcag

SEQ ID NO: 556 - protein, 914 aa, Mus musculus
MEAPEYLDLDEIDFSDDISYSVTSLKTIPALCRRCDSQNEDRSVSSSGWNCGVSTLITNPQKPTGIADVYSKFRPVKRVSPLKHQPETLENNENEDQKNNTVEYQKGGETDQGPQPEELSPEDGVGGLPGKGSEPSQALGELEHYDLDMDEILDVPYIKSSQQLAPLTKVTSEKRILGLCTTINGLSAKTCPIASTENSTPNMTPFCVLSPVKSPHLRKAPTALRDQHKLSTEDSESSPALGKCGPAYESENHSKDFLNKVFSDPHSRKIEKSGPDCKLRSFHLQSSAAGAKTEEPINGMNWTNTQGTEERTEYLKKVRSILNIVNEGQISLLPHLAADNLDKIHDENGNNLLHIAASKGHAECLQHLTSLMGEDCLNERNTEQLTPAGLAIKNGQLECVRWMVSETEAIAELSCSKDFPSLIHYAGCYGQEKILLWLLQFMQEQGISLDEVDREGNSAVHVASQHGYLGCIQTLVEYGANVTMQNHAGEKPSQSAERHGHTLCSRYLVVVETCMSLASQVVKLTKQLKEQTVERVTLQSQLQQLLEAQKSEGKSLPSSPSSPSSPASTKSQWKALDTDEESTGKSKVGAQEGIQVLGSLSVSSRARTKGKDEDSDKILRQLLGKEISENVCTQEKLSLEFQDAQASSRNSKKIPLEKRELKLARLRQLMQRSLSESDTDSNNSEDPKNTPVKRADRPRPQPIVESVENVDSAESLHLMIKKHSLASGRRFPFGMKASKSLDGHSPSPTSESSEPDLDSHGPGLGMTPPTQPSTEATQSSPDSTAAQKVATSPKSALKSPSSKRRTSQNSKLRVTFEEPVVQMEQTGLELNGEKDKDKGRAPQRTSESGEQMKRPFGTFRSIMESLSGNQNNNNNYQPASQLKTCTLPLTSLGRKTADAKGNPVSPASKGKNKA

SEQ ID NO: 557 - DNA, 3411 bp, Mus musculus
agaagcagcaggttcgctggccggggacaccaggggaaggcggctgctgctgaggggcgtgggctgggccgggacgcagggggacggtcactgtcggtcctgcctggtggttgcgtccctgagctcagcgtcccgccgccccgggtgtccccgcccgcgcgcgcccgttggggggcccggggtgcggcgccggccgcccggccgcattgtgacgtagcggggccgcggcagcgcctccgccgcccgccgggtctcctgcgcccgccgctctcgccgtctgtccgtccatccctcccgccgtcctcccgcgctccgggaaattataaatattcgaccttactcaaaatgtacaaagaagaataatggaagcccctgaataccttgatttggatgaaatcgactttagtgatgacatttcttattcagtcacctctctcaagaccatcccagcactgtgcagaagatgtgactcacaaaacgaagacagatcagtttctagctctggctggaattgtggtgtctcaactctcattacaaacccacaaaagcccactggaatcgctgatgtatacagtaagttccgcccagtgaagcgagtttctccactgaagcatcagccggagactctggagaacaacgaaaatgaggaccaaaagaacaatacggtggaataccagaaagggggggagactgaccagggcccccagcctgaggagctcagccctgaagatggagtcggggggttgccaggcaaaggctcagagcccagccaagccctgggcgagctggagcactatgacctcgacatggatgagattctcgatgtgccttacattaaatccagtcaacagctggccccgctcacgaaggtgacttcggagaaaaggattctgggtttatgcacaaccatcaatggcctctctgccaaaacctgccctattgcaagcactgagaactccacacccaacatgactccattttgtgttctttctcctgtgaaaagccctcacttacggaaagcacctactgccctccgggaccagcacaagctctctacagaagactccgagagctcgccagctctgggtaaatgtggccctgcatatgaatcagaaaaccacagtaaagacttcttaaacaaggtttttagtgatccccatagtcggaaaattgagaagtctgggccagactgcaagctcaggtccttccacctgcaatcttcagcagcaggagccaaaacagaggagccgatcaatggcatgaactggaccaacacccaaggcacggaagaaagaactgagtacctgaagaaagtaagaagcatactgaacattgtcaacgaaggacagatatcgctcttgccacacctagctgcagacaatctggacaaaattcacgatgagaacggaaacaatctgttacacattgctgcatcaaagggccatgcagaatgcctgcagcacctcacgtcactgatgggcgaagactgtctgaatgaacggaacacagagcagctgactccagcaggcctggccatcaagaatggtcagctggagtgtgttcgctggatggtgagtgagacagaagccattgcggaattgagttgttccaaggatttcccaagccttattcattacgcaggttgctatgggcaggaaaagatccttctgtggcttcttcaattcatgcaagaacaaggcatctcattggatgaagtggaccgggaaggcaacagtgctgttcatgtcgcctcacaacatggctaccttggatgcatacagaccctggtggagtatggagcgaatgtcacaatgcagaaccacgctggggaaaagccctcccagagtgctgagcggcacggccacaccctatgctcccggtacctcgtggtggtggagacctgcatgtcactggcctcacaagtggtaaagttgaccaagcagctaaaggagcagacagtggagcgtgtcacactgcagagtcaactccaacaacttctagaagcccagaaatcagagggcaagtccctgccttcttcacccagttcaccctcctcaccagcttctacaaagtcccagtggaaagctctagatacagatgaggagtctacaggcaaaagcaaagtgggagcccaggagggaatacaagttcttggaagtttgtcagtctccagcagggctaggaccaaaggaaaagatgaagactcagataaaatcctacgtcagttattggggaaagaaatatcagagaatgtctgcacccaggaaaagctgtcactggaattccaggatgctcaggcatcctctaggaattcgaaaaaaatccctctagagaagagggaactgaagctagccagactgaggcagctgatgcagagatcgttgagtgaatctgacacggactcaaacaactctgaagatcccaaaaatactcctgtgaaaagagcagacaggccgaggccacagcccattgtagaaagcgtggagaatgtagacagcgcagaaagcttacacctgatgataaagaaacactctctggcatcaggacgcaggtttccttttggtatgaaagcctccaaatccctggatggacacagcccatctcccacctcagagagcagtgaaccagacttggactcccatggtccaggcctggggatgactcctccaacccagccttccacagaagccactcagtccagtcccgacagtaccgctgcccagaaagttgccacaagccccaagagtgccctcaagtctccatcatccaagcgccggacatcccaaaactcaaaactcagagtgacctttgaggaacctgtcgtacaaatggaacaaactggccttgaactaaatggagaaaaagacaaagataagggcagggccccccagaggactagtgaatccggagaacaaatgaaaaggcctttcggaaccttccgatccatcatggagagtttaagtggtaatcagaacaacaataataactaccagccagccagccagctgaagacctgcacactacccttgacatcccttggaaggaagacagcagatgccaagggaaatcctgtgagcccggcgagcaaaggaaagaataaggcagcataatgacatcaaaagaaacgcaacgaaaacctaccacatgaagcacactgctgagccagagccaagggaactcttcttataaattactcttagcgtgattctcacacatgccctccggccaccattggaagctaatggactgtccactgtggcaatcagaccataagaacaacacctcaccagtcgagcagaatatctggatgccttaaatttataatatgagacttgttataagatacattttggaccatatctgtatatagaacttgtttgttcatttgttttttttttaatatactatttg

SEQ ID NO: 558 - protein, 915 aa, Mus musculus
MEAPEYLDLDEIDFSDDISYSVTSLKTIPALCRRCDSQNEDRSVSSSGWNCGVSTLITNPQKPTGIADVYSKFRPVKRVSPLKHQPETLENNENEDQKNNTVEYQKGGETDQGPQPEELSPEDGVGGLPGKGSEPSQALGELEHYDLDMDEILDVPYIKSSQQLAPLTKVTSEKRILGLCTTINGLSAKTCPIASTENSTPNMTPFCVLSPVKSPHLRKAPTALRDQHKLSTEDSESSPALGKCGPAYESENHSKDFLNKVFSDPHSRKIEKSGPDCKLRSFHLQSSAAGAKTEEPINGMNWTNTQGTEERTEYLKKVRSILNIVNEGQISLLPHLAADNLDKIHDENGNNLLHIAASKGHAECLQHLTSLMGEDCLNERNTEQLTPAGLAIKNGQLECVRWMVSETEAIAELSCSKDFPSLIHYAGCYGQEKILLWLLQFMQEQGISLDEVDREGNSAVHVASQHGYLGCIQTLVEYGANVTMQNHAGEKPSQSAERHGHTLCSRYLVVVETCMSLASQVVKLTKQLKEQTVERVTLQSQLQQLLEAQKSEGKSLPSSPSSPSSPASTKSQWKALDTDEESTGKSKVGAQEGIQVLGSLSVSSRARTKGKDEDSDKILRQLLGKEISENVCTQEKLSLEFQDAQASSRNSKKIPLEKRELKLARLRQLMQRSLSESDTDSNNSEDPKNTPVKRADRPRPQPIVESVENVDSAESLHLMIKKHSLASGRRFPFGMKASKSLDGHSPSPTSESSEPDLDSHGPGLGMTPPTQPSTEATQSSPDSTAAQKVATSPKSALKSPSSKRRTSQNSKLRVTFEEPVVQMEQTGLELNGEKDKDKGRAPQRTSESGEQMKRPFGTFRSIMESLSGNQNNNNNYQPASQLKTCTLPLTSLGRKTADAKGNPVSPASKGKNKAA

SEQ ID NO: 559 - DNA, 2558 bp, Mus musculus
gaggagccgatcaatggcatgaactggaccaacacccaaggcacggaagaaagaactgagtacctgaagaaagtaagaagcatactgaacattgtcaacgaaggacagatatcgctcttgccacacctagctgcagacaatctggacaaaattcacgatgagaacggaaacaatctgttacacattgctgcatcaaagggccatgcagaatgcctgcagcacctcacgtcactgatgggcgaagactgtctgaatgaacggaacacagagcagctgactccagcaggcctggccatcaagaatggtcagctggagtgtgttcgctggatggtgagtgagacagaagccattgcggaattgagttgttccaaggatttcccaagccttattcattacgcaggttgctatgggcaggaaaagatccttctgtggcttcttcaattcatgcaagaacaaggcatctcattggatgaagtggaccgggaaggcaacagtgctgttcatgtcgcctcacaacatggctaccttggatgcatacagaccctggtggagtatggagcgaatgtcacaatgcagaaccacgctggggaaaagccctcccagagtgctgagcggcacggccacaccctatgctcccggtacctcgtggtggtggagacctgcatgtcactggcctcacaagtggtaaagttgaccaagcagctaaaggagcagacagtggagcgtgtcacactgcagagtcaactccaacaacttctagaagcccagaaatcagagggcaagtccctgccttcttcacccagttcaccctcctcaccagcttctacaaagtcccagtggaaagctctagatacagatgaggagtctacaggcaaaagcaaagtgggagcccaggagggaatacaagttcttggaagtttgtcagtctccagcagggctaggaccaaaggaaaagatgaagactcagataaaatcctacgtcagttattggggaaagaaatatcagagaatgtctgcacccaggaaaagctgtcactggaattccaggatgctcaggcatcctctaggaattcgaaaaaaatccctctagagaagagggaactgaagctagccagactgaggcagctgatgcagagatcgttgagtgaatctgacacggactcaaacaactctgaagatcccaaaaatactcctgtgaaaagagcagacaggccgaggccacagcccattgtagaaagcgtggagaatgtagacagcgcagaaagcttacacctgatgataaagaaacactctctggcatcaggacgcaggtttccttttggtatgaaagcctccaaatccctggatggacacagcccatctcccacctcagagagcagtgaaccagacttggactcccatggtccaggcctggggatgactcctccaacccagccttccacagaagccactcagtccagtcccgacagtaccgctgcccagaaagttgccacaagccccaagagtgccctcaagtctccatcatccaagcgccggacatcccaaaactcaaaactcagagtgacctttgaggaacctgtcgtacaaatggaacaaactggccttgaactaaatggagaaaaagacaaagataagggcagggccccccagaggactagtgaatccggagaacaaatgaaaaggcctttcggaaccttccgatccatcatggagagtttaagtggtaatcagaacaacaataataactaccagccagccagccagctgaagacctgcacactacccttgacatcccttggaaggaagacagcagatgccaagggaaatcctgtgagcccggcgagcaaaggaaagaataaggcagcgatgtacagcagctgtatccatcttccctctaatgcgctggttgaagagcatctacgtgactatgcacggcataatgacatcaaaagaaacgcaacgaaaacctaccacatgaagcacactgctgagccagagccaagggaactcttcttataaattactcttagcgtgattctcacacatgccctccggccaccattggaagctaatggactgtccactgtggcaatcagaccataagaacaacacctcaccagtcgagcagaatatctggatgccttaaatttataatatgagacttgttataagatacattttggaccatatctgtatatagaacttgtttgttcatttgttttttttttaatatactatttgaaaacatgatcgggcaatgtatgcattgaaacattggacacttgtttgattcgatcttctcaaagcacatctgccaggacctgacactgttggtgttttgtgaattgcatgaggatttgctaatgttgatattcactttttccatcacaagggcagctgcagctcagctcattgaggccaggtcactggttttattttctgtccagagtgtttttctgtcatttctacttttttaataaagaaaattgaacatttttaacagccaactctgggcatggggcagcgactttctaataaatctgtgatgtgctgatttc

SEQ ID NO: 560 - protein, 666 aa, Mus musculus
MNWTNTQGTEERTEYLKKVRSILNIVNEGQISLLPHLAADNLDKIHDENGNNLLHIAASKGHAECLQHLTSLMGEDCLNERNTEQLTPAGLAIKNGQLECVRWMVSETEAIAELSCSKDFPSLIHYAGCYGQEKILLWLLQFMQEQGISLDEVDREGNSAVHVASQHGYLGCIQTLVEYGANVTMQNHAGEKPSQSAERHGHTLCSRYLVVVETCMSLASQVVKLTKQLKEQTVERVTLQSQLQQLLEAQKSEGKSLPSSPSSPSSPASTKSQWKALDTDEESTGKSKVGAQEGIQVLGSLSVSSRARTKGKDEDSDKILRQLLGKEISENVCTQEKLSLEFQDAQASSRNSKKIPLEKRELKLARLRQLMQRSLSESDTDSNNSEDPKNTPVKRADRPRPQPIVESVENVDSAESLHLMIKKHSLASGRRFPFGMKASKSLDGHSPSPTSESSEPDLDSHGPGLGMTPPTQPSTEATQSSPDSTAAQKVATSPKSALKSPSSKRRTSQNSKLRVTFEEPVVQMEQTGLELNGEKDKDKGRAPQRTSESGEQMKRPFGTFRSIMESLSGNQNNNNNYQPASQLKTCTLPLTSLGRKTADAKGNPVSPASKGKNKAAMYSSCIHLPSNALVEEHLRDYARHNDIKRNATKTYHMKHTAEPEPRELFL

SEQ ID NO: 561 - DNA, 5082 bp, Mus musculus
gtaggctgagctgaggagccgcggcgagctctcaggctgctgcgaactctcttctggatcagccacctagaggcgactttggtgagcgcgcggcgccctggtggctccccgccctcccctctgatcatgttgacataaacgcaggacaggccgtagtaccgcgcggcgcagcgacgttccagtttccgacaccttctttttataactcggctctattcccccagcactcgacctgtgaaaaccacgcctatgcagccacacaattggtccgaaagcgtcaaagagccaatcaacaagcctcgggctcccgcagcccacagcgctgccggaccgtccagagccgccgagcagacgcccggggaattctagaggcggaggagggtggcgaggtgctcgctcgctctctttctctctttctctccctccctctacttgcctactccagctcccaatcactccgttctcttccttctttcctatttttttttttttgcacccgtcttcttgatcctccctcgccctgcgtgcccggacgctgatttttttttaatttattatttttaggaaagcgatttcgctcacgtttttttagcacaaggaagacagccggctccccgaggcagaagatcgcaggcaccattcgctcgccacccagactctgcgcgcagcccggagccagagaggaggatcgcgaaccgaagccagcttcgcagttctagttttgaaagcgccgctggaaaggggcttaaatcgctttttttttttttttttttttaaaggagagacttttcctcccccccttgatctcgctgcctgtgaaagccagagtctagctcaactaagacgcctcctgcgagaaagccagagaagagctagggggcgggggaaggagtcgaaaaaaaggttaaaaaaaaaagtctccgagaaccttgcgctttggcaacaaagagcgtgggagccggggagccaccccgggaaagggctgcagtgtctatttccagctaagccacagggcttgggcgccagtcgagcccctgcttgctgcttgccctactgaaaccgacttccaggagcggcttttccaacacactccacgcaccaggacagcccctgcagcggctatgtctccagatctgctgccgctttgtcctctttaaaagcggcgttctcttccccccaaagacactttccccctccctttcaaacgctttatttgtaatttgccctcttttttattttaaacaaaactatgcgtcgctgttgaattttttaattattatttttgaaaagcaacaacaaaagcggagccaagccagcagctgcggactggttccctgtctggagtggatgagcctctccatgagagatccggttatccctgggacaagcatggcctatcatcccttcctacctcaccgggcgccggacttcgccatgagcgcggtactgggccaccagccgcctttcttccccgcgctaacgctgcctcccaacggcgccgcggcgctctcgctccccggagctctggccaagcccatcatggatcagttagtgggggctgctgagaccggcatccctttctcatccctgggaccccaggcacatctgaggcctctgaagaccatggaacccgaagaagacgtagaagatgaccctaaggtgcacctggaggccaaggaactttgggaccagtttcacaagcggggtacagagatggtcatcacgaagtcaggaaggcgaatgttccctccgtttaaagtgaggtgctctggactggataaaaaggccaagtatattttattgatggacattatagctgctgacgactgtcgatataaatttcacaactctcggtggatggtggccggtaaggcagaccccgaaatgccaaagagaatgtatatacacccggacagccccgctacgggggagcaatggatgtccaaagtcgtcactttccacaaactgaaactcaccaacaacatatcggataaacacggatttactttggccttcccaagcgatcacgcaacgtggcaggggaattatagttttgggacccagactatactaaactctatgcataagtaccagccgcggttccacatcgtcagagccaacgatatcctgaaactgccttacagtacttttcgaacctacctgttcccggaaacagaattcatcgccgttactgcctatcagaatgacaagataactcagttaaaaatagacaacaatccctttgcaaagggttttcgagacactggcaatggcaggagagaaaaaagaaagcagctcacactgcagtccatgagagtgtttgaggagaggcataagaaggagacttcggatgagtcctccagcgagcaggcagccttcaactgctttgcccaggcatcctctcctgctgtctccatcgtggggacatccaacctcaaagatctgtgtcccagcgaagccgagagtgacgccgaggctgagagcaaggaggagcacggccctgaggcctgcgacgcggccaagatttccaccactacggccgaggagccaggccgcgacaagggcagcccagcaaccagggcgcagctgttccccgcggagcccagccgggcccgcgacaccgcgcgtctggacaaggcatcgccagactcgcgccatagcccggccaccatctcgtccagcacgcgagttccgggagctgatgagcgcaggagtcccgggcgcgagggtccagtcgccaccaaggtggatgaggcgcgcgcgattcctgccaaggacgccttcgctccactgtcggtgcagacagacgccaccgcgcacctagcgcaggggcccctcccgggcttgggtttcgccccaggccttgcgggccagcagttcttcaacgggcacccgctcttcctgcacccgggccagttcgccatgggcggcgccttctctagcatggctgcaggcatggggcccctgctggccacagtatccggagcatccaccggcgtctcaggcctagaatccacagccatggcctcggctgccgcagcgcagggactgtctggggcgtcggctgccaccctgcccttccacctccaacaacacgttctggcctcccagggcttggctatgtcgcctttcgggagcctgtttccttacccctacacatacatggctgcagcagctgcagcctccaccgcggccgcctccagctccgtgcaccgccacccgttcctcaatttgaacagcatgcgccccaggctgcgttacagcccctattccatccccgtcccagtgccggatagcagcagtttgctggccacagctttaccatcaatggcttccgccgcggggcccctagacggcaaagcggccgccctggcagccagcccagcctcggtggctgtggactcggggtcggaactgaacagccgctcgtccacgctgtcctctggctcagtgtccttgtcacccaaactctgctccgagaaggaggcggctaccagcgaactgcagagtatccagcggctggtcagtggcttggaagccaagccagacaggtcttgcagcgggtccccttaaaaacaagaaaaacaaaatcgccccctcccccaaggtctctccattccagtttggtcaaatctgccagtgcactttgttagatgtaaaataaaccacgggccttccacatggggtgacccccgccctgtccctttcagttttgtctgggagggagcactaaagcctttccagagactatgctagataccacaggccctgccaccatgggctgtgtaaccaggctgctgttgctttgaaacgcgggactgagggggcgggaggagtggtggcaaacaggcttttgtgtctagagcgacttttgtgcaggctggtatggaagtcggggctgaagaacaaggtagccaggccagccaggagcgcgggtctttgagagacttcaccggaatctttcccccttcgtgtgtttagtggaaacatcccccctcctaaacaaactaacaaaaccaatatggaggtggggggagatgaagtcctgtggaactgtctatgaagactgaaactcaccaattgctgagtactttcgttggggcagagagaagaggggccttaccttgccccatctatattaaaggaatcctgtctttttttgtttgtttgtttttaaatattgtgatgttttaagagccgatgctggcttcttttttgcatgttacagttttctgggtttattttgcccccccccccttttatggaaaaacaacggaagtcccattatcctcaaccttgctcaaggcggcaaccaggaggaagtggggtaaaaggggcagctatgggcatgaaaccaaccgagttgatttttatctgagcgcttgtagagggcttcgtgtgcctgttggaccattagttcttttaactgtatatgcaataacaaggttttaaaagataataataaagaggaaacacgactattggacaaagtatttatgtaattatttgatatctcttgtaaataggtggaatatgactgctcagaaagttaaactttaatttattgaattgtacatagctggatgtaaataggagcgtgtctgtcaggttttattcttgttttgccttttgggtcttatttccaggtcaggagatggctaatccacactagcaagcctaggcatctttattcacatctccatgctttcaagtagagctggctgcaaagtttttttttttttttctgatggagggggtgggatcgggagtactcctaactattttcaccaaaattggggaggtaatggcccttccgggctccacttgaaattccctaaactcttgacacccccagaggggttgagattgttgtgtgagtagggggggggggggaacggccttgcggaggccaccatagaaccgtcctaatttttcatagactctggcatcttactaacccatgtgaggttttcattgttcatctttatggtgttttggattggtgtactgagagggacttggttcaaacgaccatgaaaggcaaaacaaaacaaaaaattaaaaaaaaaaacaaaaaacaac

SEQ ID NO: 562 - protein, 741 aa, Mus musculus
MSLSMRDPVIPGTSMAYHPFLPHRAPDFAMSAVLGHQPPFFPALTLPPNGAAALSLPGALAKPIMDQLVGAAETGIPFSSLGPQAHLRPLKTMEPEEDVEDDPKVHLEAKELWDQFHKRGTEMVITKSGRRMFPPFKVRCSGLDKKAKYILLMDIIAADDCRYKFHNSRWMVAGKADPEMPKRMYIHPDSPATGEQWMSKVVTFHKLKLTNNISDKHGFTLAFPSDHATWQGNYSFGTQTILNSMHKYQPRFHIVRANDILKLPYSTFRTYLFPETEFIAVTAYQNDKITQLKIDNNPFAKGFRDTGNGRREKRKQLTLQSMRVFEERHKKETSDESSSEQAAFNCFAQASSPAVSIVGTSNLKDLCPSEAESDAEAESKEEHGPEACDAAKISTTTAEEPGRDKGSPATRAQLFPAEPSRARDTARLDKASPDSRHSPATISSSTRVPGADERRSPGREGPVATKVDEARAIPAKDAFAPLSVQTDATAHLAQGPLPGLGFAPGLAGQQFFNGHPLFLHPGQFAMGGAFSSMAAGMGPLLATVSGASTGVSGLESTAMASAAAAQGLSGASAATLPFHLQQHVLASQGLAMSPFGSLFPYPYTYMAAAAAASTAAASSSVHRHPFLNLNSMRPRLRYSPYSIPVPVPDSSSLLATALPSMASAAGPLDGKAAALAASPASVAVDSGSELNSRSSTLSSGSVSLSPKLCSEKEAATSELQSIQRLVSGLEAKPDRSCSGSP

SEQ ID NO: 563 - DNA, 5022 bp, Mus musculus
gtaggctgagctgaggagccgcggcgagctctcaggctgctgcgaactctcttctggatcagccacctagaggcgactttggtgagcgcgcggcgccctggtggctccccgccctcccctctgatcatgttgacataaacgcaggacaggccgtagtaccgcgcggcgcagcgacgttccagtttccgacaccttctttttataactcggctctattcccccagcactcgacctgtgaaaaccacgcctatgcagccacacaattggtccgaaagcgtcaaagagccaatcaacaagcctcgggctcccgcagcccacagcgctgccggaccgtccagagccgccgagcagacgcccggggaattctagaggcggaggagggtggcgaggtgctcgctcgctctctttctctctttctctccctccctctacttgcctactccagctcccaatcactccgttctcttccttctttcctatttttttttttttgcacccgtcttcttgatcctccctcgccctgcgtgcccggacgctgatttttttttaatttattatttttaggaaagcgatttcgctcacgtttttttagcacaaggaagacagccggctccccgaggcagaagatcgcaggcaccattcgctcgccacccagactctgcgcgcagcccggagccagagaggaggatcgcgaaccgaagccagcttcgcagttctagttttgaaagcgccgctggaaaggggcttaaatcgctttttttttttttttttttttaaaggagagacttttcctcccccccttgatctcgctgcctgtgaaagccagagtctagctcaactaagacgcctcctgcgagaaagccagagaagagctagggggcgggggaaggagtcgaaaaaaaggttaaaaaaaaaagtctccgagaaccttgcgctttggcaacaaagagcgtgggagccggggagccaccccgggaaagggctgcagtgtctatttccagctaagccacagggcttgggcgccagtcgagcccctgcttgctgcttgccctactgaaaccgacttccaggagcggcttttccaacacactccacgcaccaggacagcccctgcagcggctatgtctccagatctgctgccgctttgtcctctttaaaagcggcgttctcttccccccaaagacactttccccctccctttcaaacgctttatttgtaatttgccctcttttttattttaaacaaaactatgcgtcgctgttgaattttttaattattatttttgaaaagcaacaacaaaagcggagccaagccagcagctgcggactggttccctgtctggagtggatgagcctctccatgagagatccggttatccctgggacaagcatggcctatcatcccttcctacctcaccgggcgccggacttcgccatgagcgcggtactgggccaccagccgcctttcttccccgcgctaacgctgcctcccaacggcgccgcggcgctctcgctccccggagctctggccaagcccatcatggatcagttagtgggggctgctgagaccggcatccctttctcatccctgggaccccaggcacatctgaggcctctgaagaccatggaacccgaagaagacgtagaagatgaccctaaggtgcacctggaggccaaggaactttgggaccagtttcacaagcggggtacagagatggtcatcacgaagtcaggaaggcgaatgttccctccgtttaaagtgaggtgctctggactggataaaaaggccaagtatattttattgatggacattatagctgctgacgactgtcgatataaatttcacaactctcggtggatggtggccggtaaggcagaccccgaaatgccaaagagaatgtatatacacccggacagccccgctacgggggagcaatggatgtccaaagtcgtcactttccacaaactgaaactcaccaacaacatatcggataaacacggatttactatactaaactctatgcataagtaccagccgcggttccacatcgtcagagccaacgatatcctgaaactgccttacagtacttttcgaacctacctgttcccggaaacagaattcatcgccgttactgcctatcagaatgacaagataactcagttaaaaatagacaacaatccctttgcaaagggttttcgagacactggcaatggcaggagagaaaaaagaaagcagctcacactgcagtccatgagagtgtttgaggagaggcataagaaggagacttcggatgagtcctccagcgagcaggcagccttcaactgctttgcccaggcatcctctcctgctgtctccatcgtggggacatccaacctcaaagatctgtgtcccagcgaagccgagagtgacgccgaggctgagagcaaggaggagcacggccctgaggcctgcgacgcggccaagatttccaccactacggccgaggagccaggccgcgacaagggcagcccagcaaccagggcgcagctgttccccgcggagcccagccgggcccgcgacaccgcgcgtctggacaaggcatcgccagactcgcgccatagcccggccaccatctcgtccagcacgcgagttccgggagctgatgagcgcaggagtcccgggcgcgagggtccagtcgccaccaaggtggatgaggcgcgcgcgattcctgccaaggacgccttcgctccactgtcggtgcagacagacgccaccgcgcacctagcgcaggggcccctcccgggcttgggtttcgccccaggccttgcgggccagcagttcttcaacgggcacccgctcttcctgcacccgggccagttcgccatgggcggcgccttctctagcatggctgcaggcatggggcccctgctggccacagtatccggagcatccaccggcgtctcaggcctagaatccacagccatggcctcggctgccgcagcgcagggactgtctggggcgtcggctgccaccctgcccttccacctccaacaacacgttctggcctcccagggcttggctatgtcgcctttcgggagcctgtttccttacccctacacatacatggctgcagcagctgcagcctccaccgcggccgcctccagctccgtgcaccgccacccgttcctcaatttgaacagcatgcgccccaggctgcgttacagcccctattccatccccgtcccagtgccggatagcagcagtttgctggccacagctttaccatcaatggcttccgccgcggggcccctagacggcaaagcggccgccctggcagccagcccagcctcggtggctgtggactcggggtcggaactgaacagccgctcgtccacgctgtcctctggctcagtgtccttgtcacccaaactctgctccgagaaggaggcggctaccagcgaactgcagagtatccagcggctggtcagtggcttggaagccaagccagacaggtcttgcagcgggtccccttaaaaacaagaaaaacaaaatcgccccctcccccaaggtctctccattccagtttggtcaaatctgccagtgcactttgttagatgtaaaataaaccacgggccttccacatggggtgacccccgccctgtccctttcagttttgtctgggagggagcactaaagcctttccagagactatgctagataccacaggccctgccaccatgggctgtgtaaccaggctgctgttgctttgaaacgcgggactgagggggcgggaggagtggtggcaaacaggcttttgtgtctagagcgacttttgtgcaggctggtatggaagtcggggctgaagaacaaggtagccaggccagccaggagcgcgggtctttgagagacttcaccggaatctttcccccttcgtgtgtttagtggaaacatcccccctcctaaacaaactaacaaaaccaatatggaggtggggggagatgaagtcctgtggaactgtctatgaagactgaaactcaccaattgctgagtactttcgttggggcagagagaagaggggccttaccttgccccatctatattaaaggaatcctgtctttttttgtttgtttgtttttaaatattgtgatgttttaagagccgatgctggcttcttttttgcatgttacagttttctgggtttattttgcccccccccccttttatggaaaaacaacggaagtcccattatcctcaaccttgctcaaggcggcaaccaggaggaagtggggtaaaaggggcagctatgggcatgaaaccaaccgagttgatttttatctgagcgcttgtagagggcttcgtgtgcctgttggaccattagttcttttaactgtatatgcaataacaaggttttaaaagataataataaagaggaaacacgactattggacaaagtatttatgtaattatttgatatctcttgtaaataggtggaatatgactgctcagaaagttaaactttaatttattgaattgtacatagctggatgtaaataggagcgtgtctgtcaggttttattcttgttttgccttttgggtcttatttccaggtcaggagatggctaatccacactagcaagcctaggcatctttattcacatctccatgctttcaagtagagctggctgcaaagtttttttttttttttctgatggagggggtgggatcgggagtactcctaactattttcaccaaaattggggaggtaatggcccttccgggctccacttgaaattccctaaactcttgacacccccagaggggttgagattgttgtgtgagtagggggggggggggaacggccttgcggaggccaccatagaaccgtcctaatttttcatagactctggcatcttactaacccatgtgaggttttcattgttcatctttatggtgttttggattggtgtactgagagggacttggttcaaacgaccatgaaaggcaaaacaaaacaaaaaattaaaaaaaaaaacaaaaaacaac

SEQ ID NO: 564 - protein, 721 aa, Mus musculus
MSLSMRDPVIPGTSMAYHPFLPHRAPDFAMSAVLGHQPPFFPALTLPPNGAAALSLPGALAKPIMDQLVGAAETGIPFSSLGPQAHLRPLKTMEPEEDVEDDPKVHLEAKELWDQFHKRGTEMVITKSGRRMFPPFKVRCSGLDKKAKYILLMDIIAADDCRYKFHNSRWMVAGKADPEMPKRMYIHPDSPATGEQWMSKVVTFHKLKLTNNISDKHGFTILNSMHKYQPRFHIVRANDILKLPYSTFRTYLFPETEFIAVTAYQNDKITQLKIDNNPFAKGFRDTGNGRREKRKQLTLQSMRVFEERHKKETSDESSSEQAAFNCFAQASSPAVSIVGTSNLKDLCPSEAESDAEAESKEEHGPEACDAAKISTTTAEEPGRDKGSPATRAQLFPAEPSRARDTARLDKASPDSRHSPATISSSTRVPGADERRSPGREGPVATKVDEARAIPAKDAFAPLSVQTDATAHLAQGPLPGLGFAPGLAGQQFFNGHPLFLHPGQFAMGGAFSSMAAGMGPLLATVSGASTGVSGLESTAMASAAAAQGLSGASAATLPFHLQQHVLASQGLAMSPFGSLFPYPYTYMAAAAAASTAAASSSVHRHPFLNLNSMRPRLRYSPYSIPVPVPDSSSLLATALPSMASAAGPLDGKAAALAASPASVAVDSGSELNSRSSTLSSGSVSLSPKLCSEKEAATSELQSIQRLVSGLEAKPDRSCSGSP

SEQ ID NO: 565 - DNA, 1449 bp, Mus musculus
atggcgggaggaggcgggagcagcgatagcagcgggcgggcggcgagccgacgggcatcgcgcagcggcgggcgggctcgacgggggcgacacgagccagggttgggaggcgcggccgagcggggcgcgggggaagctcgcctggaggaggcggtcaaccgctgggtgctcaagttctatttccacgaggcgctgcgggcctttcggagtagccggtaccgggacttcaggcagatccgggacatcatgcaggcgttgcttgtcaggcccttggggaaggagcatacggtgtcccggttgctgcgggttatgcagtgtctgtcgcgcattgaagaaggagaaaatttagttataagagttaatgtttctgcagagtgtgttttggtatctgatattttaatgacaattgtcattacagaccttttacatttttctccctttgctgtcattatttgtatcaaaaacaaagaatttgaaaaggcttcaaagattttgaaaaaatacatgtctaaggaccccacaactcagaagctgagaactgatctcctgaacattatccgggaaaagaacttggcccaccctgttatccagaacttttcctatgaggtcttccagcagaagatgctgcgtttcctagagagccacctggatgacacggagccctacctcctcacgatggctaaaaaagctttgaaatctgaatcagctgcttcaagtacaatgagggaagaaaagcacccagagccagtggaaaaaccacttagagagcctccaagacagcctcagaaccctccagccaccatcgggatcaggactctgaaggcagctttcaaagctctgtctactgcacaagactcagaggccgcttttgcaaaactggaccagaaagatctggtacttgctaatctggcatccccatcatcaccagcccacaaacacaagagacccaggaaagatgaacatgaaagcgcagctcctgctgagggtgagggaggctcagaccggcagcccaggaacagtcccatgacaataagcagattgctgttggaggaggacagccagagtactgagcccagcccaggcctcaactcctcccacaaggccatgtcagcatccaagcccagagctctcaaccaaccccacccgggggagaagaagcccaaagcatccaaagacaagtggaacagccctaacgggcttgaagaaaaggaagtttggttggaagaggaccagctgtttgaagttcaggcaccaggtgaagacaggtcatccagtttaacaagaaagcagaagtggaccatagaagaaagcgagtgggtgaaggatggagtgcgcaaatacggggaaggaaactgggctgccatttctaaaagttacccctttgtcaaccgaacagctgtgatgattaaagaccgctggcggaccatgaaaaaacttggcatgaactga

SEQ ID NO: 566 - protein, 482 aa, Mus musculus
MAGGGGSSDSSGRAASRRASRSGGRARRGRHEPGLGGAAERGAGEARLEEAVNRWVLKFYFHEALRAFRSSRYRDFRQIRDIMQALLVRPLGKEHTVSRLLRVMQCLSRIEEGENLVIRVNVSAECVLVSDILMTIVITDLLHFSPFAVIICIKNKEFEKASKILKKYMSKDPTTQKLRTDLLNIIREKNLAHPVIQNFSYEVFQQKMLRFLESHLDDTEPYLLTMAKKALKSESAASSTMREEKHPEPVEKPLREPPRQPQNPPATIGIRTLKAAFKALSTAQDSEAAFAKLDQKDLVLANLASPSSPAHKHKRPRKDEHESAAPAEGEGGSDRQPRNSPMTISRLLLEEDSQSTEPSPGLNSSHKAMSASKPRALNQPHPGEKKPKASKDKWNSPNGLEEKEVWLEEDQLFEVQAPGEDRSSSLTRKQKWTIEESEWVKDGVRKYGEGNWAAISKSYPFVNRTAVMIKDRWRTMKKLGMN

SEQ ID NO: 567 - DNA, 1592 bp, Mus musculus
atggctgcgggagccgggacagcgggccctgcttccggcccgggcgttgtgcgtgacccgatggcgtcacagccaaggaaacggcccagtcgggagggcggggagggcggggagggcgagcggcggtcgaacacgatggcgggaggaggcgggagcagcgatagcagcgggcgggcggcgagccgacgggcatcgcgcagcggcgggcgggctcgacgggggcgacacgagccagggttgggaggcgcggccgagcggggcgcgggggaagctcgcctggaggaggcggtcaaccgctgggtgctcaagttctatttccacgaggcgctgcgggcctttcggagtagccggtaccgggacttcaggcagatccgggacatcatgcaggcgttgcttgtcaggcccttggggaaggagcatacggtgtcccggttgctgcgggttatgcagtgtctgtcgcgcattgaagaaggagaaaatttagttataagagttaatgtttctgcagagtgtgttttggtatctgatattttaatgacaattgtcattacagaccttttacatttttctccctttgctgtcattatttgtatcaaaaacaaagaatttgaaaaggcttcaaagattttgaaaaaatacatgtctaaggaccccacaactcagaagctgagaactgatctcctgaacattatccgggaaaagaacttggcccaccctgttatccagaacttttcctatgaggtcttccagcagaagatgctgcgtttcctagagagccacctggatgacacggagccctacctcctcacgatggctaaaaaagctttgaaatctgaatcagctgcttcaagtacaatgagggaagaaaagcacccagagccagtggaaaaaccacttagagagcctccaagcagacagcctcagaaccctccagccaccatcgggatcaggactctgaaggcagctttcaaagctctgtctactgcacaagactcagaggccgcttttgcaaaactggaccagaaagatctggtacttgctaatctggcatccccatcatcaccagcccacaaacacaagagacccaggaaagatgaacatgaaagcgcagctcctgctgagggtgagggaggctcagaccggcagcccaggaacagtcccatgacaataagcagattgctgttggaggaggacagccagagtactgagcccagcccaggcctcaactcctcccacaaggccatgtcagcatccaagcccagagctctcaaccaaccccacccgggggagaagaagcccaagtatgaagaccttctttgtaggagtttgggggctggttggcgggcctggttgggcctggttttacttccatgaatgacgtaatcttcagctaagctactgaccaccaaggcttgctcagactgctaggatgagactggagcagggagtgtcaatgtgacagtccctgccagctcctgaggctgctgtaggctgcagggcactgccctagggcatgagtaagcaggaaagggttctgagccgtctgcctgttggtctgagtgcctcaaggacgaaatatcagccttacttgt

SEQ ID NO: 568 - protein, 457 aa, Mus musculus
MAAGAGTAGPASGPGVVRDPMASQPRKRPSREGGEGGEGERRSNTMAGGGGSSDSSGRAASRRASRSGGRARRGRHEPGLGGAAERGAGEARLEEAVNRWVLKFYFHEALRAFRSSRYRDFRQIRDIMQALLVRPLGKEHTVSRLLRVMQCLSRIEEGENLVIRVNVSAECVLVSDILMTIVITDLLHFSPFAVIICIKNKEFEKASKILKKYMSKDPTTQKLRTDLLNIIREKNLAHPVIQNFSYEVFQQKMLRFLESHLDDTEPYLLTMAKKALKSESAASSTMREEKHPEPVEKPLREPPSRQPQNPPATIGIRTLKAAFKALSTAQDSEAAFAKLDQKDLVLANLASPSSPAHKHKRPRKDEHESAAPAEGEGGSDRQPRNSPMTISRLLLEEDSQSTEPSPGLNSSHKAMSASKPRALNQPHPGEKKPKYEDLLCRSLGAGWRAWLGLVLLP

SEQ ID NO: 569 - DNA, 582 bp, Mus musculus
atggctaaaaaagctttgaaatctgaatcagctgcttcaagtacaatgagggaagaaaagcacccagagccagtggaaaaaccacttagagagcctccaagcagacagcctcagaaccctccagccaccatcgggatcaggactctgaaggcagctttcaaagctctgtctactgcacaagactcagaggccgcttttgcaaaactggaccagaaagatctggtacttgctaatctggcatccccatcatcaccagcccacaaacacaagagacccaggaaagatgaacatgaaagcgcagctcctgctgagggtgagggaggctcagaccggcagcccaggaacagtcccatgacaataagcagattgctgttggaggaggacagccagagtactgagcccagcccaggcctcaactcctcccacaaggccatgtcagcatccaagcccagagctctcaaccaaccccacccgggggagaagaagcccaagtatgaagaccttctttgtaggagtttgggggctggttggggcctggttgggcctggttttacttccatgaatgacgtaatcttcagctaa

SEQ ID NO: 570 - protein, 193 aa, Mus musculus
MAKKALKSESAASSTMREEKHPEPVEKPLREPPSRQPQNPPATIGIRTLKAAFKALSTAQDSEAAFAKLDQKDLVLANLASPSSPAHKHKRPRKDEHESAAPAEGEGGSDRQPRNSPMTISRLLLEEDSQSTEPSPGLNSSHKAMSASKPRALNQPHPGEKKPKYEDLLCRSLGAGWGLVGPGFTSMNDVIFS

SEQ ID NO: 571 - DNA, 4047 bp, Mus musculus
ggaatcgggagcccgccgccggggtcgcagcatggggcgttttcgcgggggcctgcggtgcatcaagtatctgctgctcggcttcaacctgctgttctggctagccggatcagccgttattgcatttggactatggtttcgatttggaggtaccatgaaggatttatcatcagaggacaagtccccagagtatttctatgtggggctgtatgtgctggttggtgctggggccctgatgatgactgtgggtttcttcgggtgctgtggagccatgcgtgagtcacagtgtgtgctcggatcattttttacctgtctgttggtgatatttgctgctgaagtaaccactggagtatttgcatttataggcaaggatgtagctatacgacatgtacagagcatgtatgaggaggcctacagcgactaccttaaagacagggcaagaggaaatggaactctcattaccttccactcagcatttcagtgctgtggaaaagaaagctctgagcaagtccagcccacgtgtccaaaggagctcccaggccacaagaattgcatcgacaaaattgaaaccgtaatcagtgctaaactgcagctcattggaattgttggtattgggattgcgggtctcacgatctttggcatgatattcagcatggtgctttgctgtgcaatacggaactcacgcgatgtgatctgatgatacttcatcaggaaaattgcaatctagagttgtcgtgctaattatcacaagagctctctcggctcgtttttaatattcaggatattagaagctaaaataattttctgtcaactgtatatttgcacatgtatgtaagtctgactcattactgatttgccccttgagtgaatgtctgtttctggtatatgcattgcacatactgatatctgtttcctgggaaaccctagttcttgtatgcaagaataacctatttaagtaccagaaaaaaagcaatgagagatttttaaaactcggctattcaggaaatgtaataatgggtccatttctcagattttagccatgaaaattagatacataaagagaatgcaggatttctagttaatggaagcaataagatagaagaattgaagggccatagattgactgtgtctgagttgagtgtaaagatttcttgaaatatatatatatatatacatatattctccccagaatccagtaaaccacagttttagaactaaacacatctgtaaaagtaaatatagcatggaaaaatctaattcaaaaaagtcatgttttcttagcatttaaaaacagaaagcctctctctggaaagagaagtcacgcagacagacaagcatgtgccccagaaaagtgagtgctttaaagactaaaactaacaactttgaagggggagaaacactgctataggatgacatgcaaacgttgttttctccctcttctctgccaactctgctttgaactagtgaaggcctcgccttcccacaaggcctttccttcaccctccttactgtttttttcagatgtggtgacagaggaaagcaggcactgtgcagcgtgacagtgggggactctggctggcactgtctgtacctctggaatacctcatgacttgagtttacatactttcctaatatttttccatttttcttatttatctgtgcagagaattctttatagattaagaacatagttttattctttaaaataaataaatcgccccataactcagatattatgttatgagtaccctgtctaaaccaatataaacaccttcttcaatatgtatgcacacaacaaaggcaagttaatggatcaaaagtactttcgtgcatacagctgcagcacaactatattctttctcagcgaacccctgtggggatgaatagatgctcaggttctttgggagcctgagtgattgattttaagtggggaaacccaggcactgctcggccttttggcagcaagtgggaaaccccacagcagggtcgaaattgatgtatttgtcataatggaacagcgtataaaggagtcttaggattatattgaccacataaaagtgaaggcatgaggaattctggaaaccgtcaggctagcttctatgtccgctaagaacctaagactttggtatgtgctagaacaaagtgccatgcttcaggaaacttttaccaagtgttttgctgaggacacacaactcctgggatgtctcacccacagagcgccacctctctctttttcagatattcttgctactgctactagctttggagaaaaaaactgagggagttaaaagtataactgtgtatgactactttacctatgtatgcaaaagtatttaaaaaaaatcactctgtgatgtttataccccagtggttgacaaatgccagctttttaagcaaacaaagagtgatcagtccttcttatagctttagtttatctgtcttcctgaagacagagaacaggctcaagtgtgtactcaggttcctccagctcagagttatttcccgttcctcagaagtgagtttcattccctgggtgagtgaataagtttaaggaaaaccacagtaactatagacagaagagtaaaataattttttaatgcagaagaataagtctagaaacccatgtcctgtgtgattacctctctgagggtgaagctttccaaagaatgtgctgggtaaaattagagaattccatctttgagtaaagatggatatatatctttatgtgaatggataaagctatatctatagagatatataacccctatgtcctgaacttatacatatcttaaatacatatctcttaaggctaaagagatatgtaatttaatacatgtgtacccgtttgaaactatggagataaatgtttgtatacatacacatgtacatgtatatacatttacagttatttctgtttacctgaactaatttgagatcagacccaaacattttaagttattttaaattaaattttctatgtacttacactgcttgagttatcttaaaatcttagtgtatcttcttaacaagttcacattttcttatttaaatgtgttacctaccaatttacccaaacagtatagtaaaaacaaactggtaatcctttcatgctgttgttgtgcagtgggttcaaaagcaacacccctagggttctaattacatatagttgcgtttcagctaacaccagttcacccaaattgtttctccttcctccagaaaaacttggttacctatggcttagcctttcgagttaatcctgggtccagtgtggttctcctgtaccaacagccatcgtttccctctgaggaatctaaccgatgtagctgggtgagaatgagacccagagaaagatgataataatctcaataataatcaataaagaagatagcatgttctcccttctgaaataagttttctgaatattcaaagggtatttgctctcttgtcataggtgaaggtggtttctatggcccagaggcaagccactagtactccccacagcccagctttcaaggccccactggcatgctcttgaacaccaagcccgtttccccacacccaggaaagagcaatttatgtctcttgagggtagaaccagcgtaagctcatctgaatcaagttggtttttgtgtggattttaaagactaaagatttcctactttctttaaatatcctcccccccctttttttttactataaaaggtattttgtatatagatgtcttttaaaagtgaaaatactacagcaatacaaaatgttattgtttggtgtccttataacaagcaagggattcacagttcagacgctgccccctggaaacagggaagacacagcaagtacaagtaacatgccctgtgcttcccagagcttggctgcagaaatgtggagttaatacaacaggaacctttttgtgtgttttgtggtgtttatcctgtatattttgtgatttcttttactcctattaaacaacaaaaaaaaattagttaaagaaatttaaattgcatgttaattattaaataagtcaataaccaatatataagtacttac

SEQ ID NO: 572 - protein, 221 aa, Mus musculus
MGRFRGGLRCIKYLLLGFNLLFWLAGSAVIAFGLWFRFGGTMKDLSSEDKSPEYFYVGLYVLVGAGALMMTVGFFGCCGAMRESQCVLGSFFTCLLVIFAAEVTTGVFAFIGKDVAIRHVQSMYEEAYSDYLKDRARGNGTLITFHSAFQCCGKESSEQVQPTCPKELPGHKNCIDKIETVISAKLQLIGIVGIGIAGLTIFGMIFSMVLCCAIRNSRDVI

SEQ ID NO: 573 - DNA, 3169 bp, Mus musculus
gcggcgtcggatcccgggcgttggggcgagtgtggaccgcggccgccgggccgactgggcgcccggggcggacaggagccagggaccgtgctgggtgcggtgggtatgatggacctggcctatgtgtgcgaatgggagaagtgggccaagagcacgtactgcccgtcgctgcccctggcttgtgcctggtcctgcaggaacctcattgccttcaccacagacctacgcaatgatgaccaggatctgacacacatgatccatatcctagacacggaacacccctgggaagtgcactctgtcagctctggccacagcgaggccatcacctgcctggagtgggaccagtcagggtcccggctactgtctgctgatgctgatggacagatcaaatgctggagcatggctgaccacctggccaacagctgggagagctcggtgggcagccaggtggagggggaccccatcgtggccctgtcctggctgcacaacggtgtaaagctggccctgcatgtggagaagtctggtgcctctagcttcggagagaagttctcacgtgtgaagttctccccgtccctcacgctgttcggtggcaagccaatggagggttggattgcagtgacagtcagtggcctggtcactgtgtcccttctgaagcccagcgggcaggtgctgacgtccacggagagcctgtgccggctgcgtggtagagtggcgctggctgacatcgccttcacgggcggtgggaacattgtggtggctgctgcagatggcagcagcgcgtcacccgtgaagttctataaggtgtgcgtcagcgtggtcagcgagaagtgccgcatcgacacggagatcctgccctcactgtttatgcgctgcaccaccgaccccaaccgcaaagacaggttccccgccatcacacacctcaagttcctggcgcgagacatgtctgagcaggtgctcctgtgtgcgtccagccagaccagcagcctggtggaatgctggtcccttcggaaagagggccttcctgtgaacaatatcttccagcagatctcgcctgtggttggtgacaaacagcccatgatcctcaagtggcgaatcctgtcggccaccaatgacctggaccgtgtatccgcggtggcactgccgaaactgcccatctcactcaccaacactgacctcaaggtggccagtgacacccagttctatccaggccttggcttagcgctggccttccaggatggcagcgtgcacatggtgcaccgactgtccctgcagaccatggcggtgttctacagctcagccccgcgctcgctggatgagccggccctaaagcgcccacgcaccacatgccctgccgtacactttaaagccatgcagctgtcctggacttcgctggccctcgtgggcatcgataaccatgggaagctcagcatgctgcgaatctctccatccctgggccacccactggagcccaagctggccctgcagcacctgcttttcctgctggaatactgcatggtgaccggctatgactggtgggacatcctgctacacgtgcagcccggcatggtgcagagcctggtggagcggctgcatgaggagtacactcgccagaagcccgccctgcaacaggtcctctccactcggatcctggccatgaaggcttcactgtgcaagctgtcaccctgcacagtggctcgtgtgtgtgactaccacaccaagctgttcctcatggccatcacgtccaccctaaagtcgctgctgcgcccacacttcctcaacacccctgacaagagccctggggaccgcctggccgagatctgcgccaagatcaccgatgttgacatcgacaaagtcatgatcaacctgaagactgaagagttcgtccttgacatgaacactttgcaggcgctgcagcagttgctacagtgggtgggagacttcgtgctctacctcctggtcagcctgcccaaccagggctccccgctaaggccgggccacagcttcctccgagatggtacctccctgggcatgctgcgagagttgatggttgtcatccgaatctggggcctgctgaagcccagctgtctgcccgtctacacagccacctcggacacccaggacagcatgtccctgctcttccgactgctcaccaaactgtggatctgctgccgtgatgagggcgcagccagtgaaccagatgagggtttggtggatgaatgctgcctgctgcctagccagctgctggtccccaacttggactggcttcccgccagtgatggcctggtcagtcgcctgcagcccaaacagcccctgcgcctgcgcttcggcagagcgcccactctgcccagcagcacctccaccctgcagctggacggcctcaccagggcccctggccagcccaagatcgaccacctccggaggctacacctgggcgcctaccccaccgaggagtgcaaagcctgcaccaggtgtggctgtgtcaccatgctgaagtctcccaacaagacaaccgctgtgacacagtgggaacagcggtggatcaagaattgcctgtgtggtgggctgtggcggcgagtgcctctcagctgttcctgagccacagcccaccagcctgcgtatgtacaaccagtctctgaacattgacattgctgtgctcactgaggcacaagtacccaccaatggcccctgggtctgccccttctagggacatgcggcatctctagggcctgaagtcccatggtcatatccaagccagtgtgaaggagctgggctgtgtattcatcctttaaaagatccacagtggccgggcgtggtggcgcacgcctttaatcccagcactcgggaggcagaggcaggtggatttctgagttcgaggccagcctggtctacaaagtgagttccaggacagccagggctacacagagaaaccctgtctcgaaaaaacaaaacaaaaaaaaaaaaagattcacagtacataaagccccttgtcctgcttggggtcgtctgcctcagttttcttgtcctgcttggggtcgtctgcctcagttttcttgtcctgcttggggtcgtctgcctcagttttcttgtcctgcttggggtcgtctgcctcagttttctttgggtgccggtgggaggggaagactggcccaataaagttctctgatgcact

SEQ ID NO: 574 - protein, 828 aa, Mus musculus
MDLAYVCEWEKWAKSTYCPSLPLACAWSCRNLIAFTTDLRNDDQDLTHMIHILDTEHPWEVHSVSSGHSEAITCLEWDQSGSRLLSADADGQIKCWSMADHLANSWESSVGSQVEGDPIVALSWLHNGVKLALHVEKSGASSFGEKFSRVKFSPSLTLFGGKPMEGWIAVTVSGLVTVSLLKPSGQVLTSTESLCRLRGRVALADIAFTGGGNIVVAAADGSSASPVKFYKVCVSVVSEKCRIDTEILPSLFMRCTTDPNRKDRFPAITHLKFLARDMSEQVLLCASSQTSSLVECWSLRKEGLPVNNIFQQISPVVGDKQPMILKWRILSATNDLDRVSAVALPKLPISLTNTDLKVASDTQFYPGLGLALAFQDGSVHMVHRLSLQTMAVFYSSAPRSLDEPALKRPRTTCPAVHFKAMQLSWTSLALVGIDNHGKLSMLRISPSLGHPLEPKLALQHLLFLLEYCMVTGYDWWDILLHVQPGMVQSLVERLHEEYTRQKPALQQVLSTRILAMKASLCKLSPCTVARVCDYHTKLFLMAITSTLKSLLRPHFLNTPDKSPGDRLAEICAKITDVDIDKVMINLKTEEFVLDMNTLQALQQLLQWVGDFVLYLLVSLPNQGSPLRPGHSFLRDGTSLGMLRELMVVIRIWGLLKPSCLPVYTATSDTQDSMSLLFRLLTKLWICCRDEGAASEPDEGLVDECCLLPSQLLVPNLDWLPASDGLVSRLQPKQPLRLRFGRAPTLPSSTSTLQLDGLTRAPGQPKIDHLRRLHLGAYPTEECKACTRCGCVTMLKSPNKTTAVTQWEQRWIKNCLCGGLWRRVPLSCS

SEQ ID NO: 575 - DNA, 1528 bp, Mus musculus
cggcggcgccgcggtccgcccttcattcggagcccgcgacgtcagcggcggtggccggggccggtgcggcgggggcgggcatgggcgacgggggcggcgggggcagcgggggcccggcctgcggctagcacgagccgccgagcgagcagcgggcgcggccgcccgatcccgccatgaagaagagcggctccggcaagcgggggcctccggatggaaaccatcagtctgcggcgcccgagaaggtcggctgggtccggaaattctgcgggaaagggattttcagggagatttggaaaaaccgctatgtggtgctgaaaggcgaccagctctacgtctccgagaaggaggtaaaagatgagaaaaacagtcaggaggtgtttgacctgagtgactatgagaagtgcgaagagctccggaaatccaagagcaggagcaagaaaaatcacagcaagttcaccctggcccggtgcagacagccgggcaccacggcacccaacctcatcttcctggccgtgagtcctgaagagaaggagtcatggatcaacgccctgagttctgccattaccagagctaaaaaccgtatcttggatgaggtcaccgttgaggaggacagctatcttgcccaccctactcgagacagagcaaaaatccaacactcccgccgtcctccaacccggggacacctcatggctgtggcttcgacctctacctcagatgggatgctaacattagacctgatccaagaggaagacccttcccctgaggagccagcctcttgtgctgagagcttccgggtcgatctggacaagtctgtggcccagctggctggcagtcgacggagagcggactcagacaggatccagccctcttcgcagcgggcaagcagcctttctcggccttgggaaaaaccagacaagggagccccctacaccccacaagcactgaagaagttccccagtacagagaagagccgatgtgcctccctggaggagatcctatcccagagggacactgccccagcccgcccccttcaccttcaagctgaggaatccctaccccctgtccctgcccagccagggcagctgtcccggatccaggacctggtagcaaggaaactggagaagactcaggagctgctggcagaggttcagggactgggtgacggcaagcggaaggccaaggaccccccacagtctccacccgactcggagtcggagcagctgctgctggagacagagaggctgctgggagaggcttcctccaactggagccaggcaaagagagtgctgcaggaagtccgggagctgagagacctgtacaggcagatggacctgcagaccccggactcccacctcagacagacctcccagcacagtcaataccggaagagcctgatgtgaaagggggggcaggtctgaaatttgggggggcacagactctttatctccaaatgttgcaggataaagcttttttatttacctcaatccaaaaaaaaaaaaaatcaaattcattgcttttgctgccgcct

SEQ ID NO: 576 - protein, 408 aa, Mus musculus
MKKSGSGKRGPPDGNHQSAAPEKVGWVRKFCGKGIFREIWKNRYVVLKGDQLYVSEKEVKDEKNSQEVFDLSDYEKCEELRKSKSRSKKNHSKFTLARCRQPGTTAPNLIFLAVSPEEKESWINALSSAITRAKNRILDEVTVEEDSYLAHPTRDRAKIQHSRRPPTRGHLMAVASTSTSDGMLTLDLIQEEDPSPEEPASCAESFRVDLDKSVAQLAGSRRRADSDRIQPSSQRASSLSRPWEKPDKGAPYTPQALKKFPSTEKSRCASLEEILSQRDTAPARPLHLQAEESLPPVPAQPGQLSRIQDLVARKLEKTQELLAEVQGLGDGKRKAKDPPQSPPDSESEQLLLETERLLGEASSNWSQAKRVLQEVRELRDLYRQMDLQTPDSHLRQTSQHSQYRKSLM

SEQ ID NO: 577 - DNA, 1035 bp, Mus musculus
atgtgcacgaaaatggaacagcctttctatcacgacgactcttacgcagcggcgggatacggtcggagccctggcagcctgtctctacacgactacaaactcctgaaacccaccttggcgctcaacctggcggatccctatcggggtctcaagggtcctggggcgcggggtccaggcccggagggcagtggggcaggcagctacttttcgggtcagggatcagacacaggcgcatctctgaagctagcctccacggaactggagcgcttgatcgtccccaacagcaacggcgtgatcacgacgacgcccacgcctccgggacagtacttttacccccgtgggggtggcagcggtggaggtacagggggcggcgtcaccgaggagcaggagggctttgcggacggttttgtcaaagccctggacgacctgcacaagatgaaccacgtgacgccccccaacgtgtccctgggcgccagcgggggtccccaggccggcccagggggcgtctatgctggtccggagccgcctcccgtctacaccaacctcagcagttactccccagcctctgcaccctctggaggctccgggaccgccgtcgggactgggagctcatacccgacggccaccatcagctacctcccacatgcaccaccctttgcgggcggccacccggcacagctgggcttgagtcgcggcgcttccgcctttaaagaggaaccgcagaccgtaccggaggcacgcagccgcgacgccacgccgcctgtgtcccccatcaacatggaagaccaggagcgcatcaaagtggagcgaaagcggctgcggaacaggctggcggccaccaagtgccggaagcggaagctggagcgcatcgcgcgcctggaggacaaggtgaagacactcaaggctgagaacgcggggctgtcgagtgctgccggtctcctacgggagcaagtggcgcagctcaagcagaaggtcatgacccatgtcagcaacggctgccagttgctgctaggggtcaagggacacgccttctga

SEQ ID NO: 578 - protein, 344 aa, Mus musculus
MCTKMEQPFYHDDSYAAAGYGRSPGSLSLHDYKLLKPTLALNLADPYRGLKGPGARGPGPEGSGAGSYFSGQGSDTGASLKLASTELERLIVPNSNGVITTTPTPPGQYFYPRGGGSGGGTGGGVTEEQEGFADGFVKALDDLHKMNHVTPPNVSLGASGGPQAGPGGVYAGPEPPPVYTNLSSYSPASAPSGGSGTAVGTGSSYPTATISYLPHAPPFAGGHPAQLGLSRGASAFKEEPQTVPEARSRDATPPVSPINMEDQERIKVERKRLRNRLAATKCRKRKLERIARLEDKVKTLKAENAGLSSAAGLLREQVAQLKQKVMTHVSNGCQLLLGVKGHAF

SEQ ID NO: 579 - DNA, 3129 bp, Mus musculus
cccatttagtgaagaaactgaaatatggcccactcacactgctggcgggtctgaagtgcggttggccccaacactcctcccaaagtatctatcaagagaatggtcagcagaagttagatctagtttttagagaaatcaaccaagacagggaagacagagaaaatgcattctggacccgctactgttttcaatcgtcatttcaaacaaaacccgtagtttatttaaaaaaaaaaaaaacacggaaagagaaaattaggccctgagatctttgaaaagatgcccattactagatacaaaagagaagagtcactgtggaggtgagggactgcgtccctgcttctgagaggcaggagagctacatggggagactgtctcaaaactaacaacagaagagatagaattttttttttcttaaagagcacctggctagagaatcgatttgtaaaattgctatttctacccttagagtttccttgattaaacatctgaaatgcattttttttgttttactttcaagctaatgtttttcagaaaaaaataaaaagctttgaggaaaagcacattatcagttagatttaagaccaattgcttttaaattaccaatttaaaatatcattttttttatttcttaaagcagatttaattttaccccctttgtatgaatcttacagacctggagttttaactactatcactgatctctacacacaacctccagctttaaatgggagggagggtcaccactgctttataacataacaaattagagaaaagctggcttctgtatgagttctttggagacaaagtagctccagaaactgcagaccagaagctatcaaaatctctgtgcttttttggaacctccagtaagccagatttggtctctgaaataatacaggaaaacctcagcatgtcacctcatggatacaatgagcagcacctccagacatctgaatttcagccttcctatttccccaagaggtcttggcgccagcgcccggctccagccagttttccccaagggtcgggggaagcggcgtgtcccgtggccatagcagagctcggggtcggtctggagagccatgagcagcccggatgcgggatacgccagtgacgaccagagccagccccggagcgcgcagcccgcggtgatggcagggttgggcccctgtccctgggccgagtccctgagccccctcggggatgtaaaggtgaaaggcgaggtggtggcgagtagcggggcgccagccgggacgtcgggccgagccaaagcggagtctcgcatccggcggccgatgaacgcctttatggtgtgggccaaagacgaacgcaagcggttggcacagcagaacccagatctgcacaacgcagagctaagcaagatgctaggcaagtcttggaaggcgttgaccttggcagagaagcggcccttcgtggaagaggccgagcggctgcgcgtgcagcatatgcaggaccaccccaactacaagtaccggccgcggcggcgcaagcaggtgaagcgcatgaagcgggtggagggaggcttcctgcacgctctcgtcgagccccaggccggcgcgcttggtcccgagggcggccgcgtggccatggatggcctgggtctgcctttcccggagccgggctatccggccggtcctccgctgatgtctccgcacatgggcccccactatcgggactgccagggactgggcgctcccgcgctcgacggctaccctctgcccactccggacacatccccgctggatggcgtggagcaggacccggctttctttgcagccccgctgccaggggactgcccggcggccggcacctacacttacgctccagtctcggactatgcagtgtccgtagagccgcccgctggccccatgcgagtggggccggacccctcgggccctgcgatgccggggatcctggcgccccccagcgctctgcacctgtactacggcgcgatgggctcgcccgccgcaagtgcggggcgcggtttccacgcgcaaccccagcagccgctgcaaccgcaggcaccgccgccgccaccgcagcagcagcacccagcgcacggccccgggcaaccttcgccccctcccgaggctctgccctgccgggatggcacggaatccaaccagcccactgagctcctaggggaggtggaccgcacggaattcgaacagtatctgccctttgtgtataagcccgagatgggtcttccctaccagggacacgactgcggagtgaacctctcagacagccacggagccatttcctccgtggtgtccgacgctagctcagcggtctactattgcaactaccccgacatttgacggttgccgacccgacctgagggccagaagcagtgttacacacttcctggaagcgctaaggaaatccttagcgtcaagctgttttgtttttaagttgccttggcatataatttatggtaatttattttgtctgccacttgaacagttgaggggctacacgagatttttgttttaaatgccttgagggacttgctccccacaatcactgtccagttttagccagttttaaaatatctcactgacttattccatttcttgaaagtgtattgatctagagaaattttgtcatgcgtgttttctcaatcttaaataaatcctggaatctttttaaaatctctcgcatcgatttttatcaaattaaagatcaacagtaagtattatacaattagaagtgtatacttaattgtaaaattttcatttttcttacaatggtaagaaaatgcatctaagaaaccctaaacacaaacagcggggtgttcaaatgtgatataattgttctgagaaaaattctcaaaagatgaacttgttatgtacattccaaatattggtttctaaaaatgatactgtaaatgtttttaattctgtacactttaatgaggctgttcaaaaatttcggattttcagtcatctcgacacctgccaaaagagcttttcagatataactttttcctgttgtcttttcttccaaaagtcttgatcccacttcccacaaaatttgcctttaattcctacaattttagagtcagagaaactaatcaaaataaagtttgtgttgtgactgttagtg

SEQ ID NO: 580 - protein, 419 aa, Mus musculus
MSSPDAGYASDDQSQPRSAQPAVMAGLGPCPWAESLSPLGDVKVKGEVVASSGAPAGTSGRAKAESRIRRPMNAFMVWAKDERKRLAQQNPDLHNAELSKMLGKSWKALTLAEKRPFVEEAERLRVQHMQDHPNYKYRPRRRKQVKRMKRVEGGFLHALVEPQAGALGPEGGRVAMDGLGLPFPEPGYPAGPPLMSPHMGPHYRDCQGLGAPALDGYPLPTPDTSPLDGVEQDPAFFAAPLPGDCPAAGTYTYAPVSDYAVSVEPPAGPMRVGPDPSGPAMPGILAPPSALHLYYGAMGSPAASAGRGFHAQPQQPLQPQAPPPPPQQQHPAHGPGQPSPPPEALPCRDGTESNQPTELLGEVDRTEFEQYLPFVYKPEMGLPYQGHDCGVNLSDSHGAISSVVSDASSAVYYCNYPDI

SEQ ID NO: 581 - DNA, 3242 bp, Mus musculus
acgggagaggctagcaaagcgaagattgcagggtctggcctgaatgttctgggccaccgtgggggccggtgatcactgtctttcttgccactctttcctctcaagttcccgaatttccatctccacctccgacccactggggactgaccagggactggaaagagcgcgaaaggtataaaggggagaagagactgcgccttttggtgcccgggtgaaaggtgccaatcgaccgcatcgctctgcgtggccctacctgggaggtgcggagcccggggcacgacgctcggtgttctcagaggcagactctgaggcacgtattttagaccgtccagtggtactattgtctctgttatcttagagtccgccgggggctgtctccgtgatgacagcccacgctcccttttccgccctcatgaacttgctctccacagaccacggatctgcttgagtgcccacggatcctgtgcaattggacttgaatgtcctttaacaggccttggccatcagaacaccaaaaccataaaaccttcgagaaatcaaccactcactctgaggctcgctgtagaagagtggcttagactctcccacttcggagtcccagttgatcaccaacccgcttgctacaggccccaaatggttacgggcacagcttctagttacattagacgcttccttgccccagcctttcgagcctcaggtctgctttggggatgtggcttaggcagtagccacctagaaatcctgcactgtttgagtgtgataccgctgcggactacagcagacaggcgtgccaggcttctagtccagatacccacccccaccccagtaaatctctagtgttgagggaagcaaggcttgcaggaagccgctccggatgtttgcttctttacttgtggcatttgtggctggctttgataacgtcgtgagctcggcttccaacacccatttagtgaagaaactgaaatatggcccactcacactgctggcgggtctgaagtgcggttggccccaacactcctcccaaagtatctatcaagagaatggtcagcagaagttagatctagtttttagagaaatcaaccaagacagggaagacagagaaaatgcattctggacccgctactgttttcaatcgtcatttcaaacaaaacccgtagtttatttaaaaaaaaaaaaaacacggaaagagaaaattaggccctgagatctttgaaaagatgcccattactagatacaaaagagaagagtcactgtggaggtgagggactgcgtccctgcttctgagaggcaggagagctacatggggagactgtctcaaaactaacaacagaagagatagaattttttttttcttaaagagcacctggctagagaatcgatttgtaaaattgctatttctacccttagagtttccttgattaaacatctgaaatgcattttttttgttttactttcaagctaatgtttttcagaaaaaaataaaaagctttgaggaaaagcacattatcagttagatttaagaccaattgcttttaaattaccaatttaaaatatcattttttttatttcttaaagcagatttaattttaccccctttgtatgaatcttacagacctggagttttaactactatcactgatctctacacacaacctccagctttaaatgggagggagggtcaccactgctttataacataacaaattagagaaaagctggcttctgtatgagttctttggagacaaagtagctccagaaactgcagaccagaagctatcaaaatctctgtgcttttttggaacctccagtaagccagatttggtctctgaaataatacaggaaaacctcagcatgtcacctcatggatacaatgagcagcacctccagacatctgaatttcagccttcctatttccccaagaggtcttggcgccagcgcccggctccagccagttttccccaaggcaagtcttggaaggcgttgaccttggcagagaagcggcccttcgtggaagaggccgagcggctgcgcgtgcagcatatgcaggaccaccccaactacaagtaccggccgcggcggcgcaagcaggtgaagcgcatgaagcgggtggagggaggcttcctgcacgctctcgtcgagccccaggccggcgcgcttggtcccgagggcggccgcgtggccatggatggcctgggtctgcctttcccggagccgggctatccggccggtcctccgctgatgtctccgcacatgggcccccactatcgggactgccagggactgggcgctcccgcgctcgacggctaccctctgcccactccggacacatccccgctggatggcgtggagcaggacccggctttctttgcagccccgctgccaggggactgcccggcggccggcacctacacttacgctccagtctcggactatgcagtgtccgtagagccgcccgctggccccatgcgagtggggccggacccctcgggccctgcgatgccggggatcctggcgccccccagcgctctgcacctgtactacggcgcgatgggctcgcccgccgcaagtgcggggcgcggtttccacgcgcaaccccagcagccgctgcaaccgcaggcaccgccgccgccaccgcagcagcagcacccagcgcacggccccgggcaaccttcgccccctcccgaggctctgccctgccgggatggcacggaatccaaccagcccactgagctcctaggggaggtggaccgcacggaattcgaacagtatctgccctttgtgtataagcccgagatgggtcttccctaccagggacacgactgcggagtgaacctctcagacagccacggagccatttcctccgtggtgtccgacgctagctcagcggtctactattgcaactaccccgacatttgacggttgccgacccgacctgagggccagaagcagtgttacacacttcctggaagcgctaaggaaatccttagcgtcaagctgttttgtttttaagttgccttggcatataatttatggtaatttattttgtctgccacttgaacagttgaggggctacacgagatttttgttttaaatgccttgagggacttgctccccacaatcactgtccagttttagccagttttaaaatatctcactgacttattccatttcttgaaagtgtattgatctagagaaattttgtcatgcgtgttttctcaatcttaaataaatcctggaatctt

SEQ ID NO: 582 - protein, 291 aa, Mus musculus
MQDHPNYKYRPRRRKQVKRMKRVEGGFLHALVEPQAGALGPEGGRVAMDGLGLPFPEPGYPAGPPLMSPHMGPHYRDCQGLGAPALDGYPLPTPDTSPLDGVEQDPAFFAAPLPGDCPAAGTYTYAPVSDYAVSVEPPAGPMRVGPDPSGPAMPGILAPPSALHLYYGAMGSPAASAGRGFHAQPQQPLQPQAPPPPPQQQHPAHGPGQPSPPPEALPCRDGTESNQPTELLGEVDRTEFEQYLPFVYKPEMGLPYQGHDCGVNLSDSHGAISSVVSDASSAVYYCNYPDI

SEQ ID NO: 583 - DNA, 603 bp, Mus musculus
cccgcgcccggcgagctcatggcggccatccgcaagaagctggtggtggtgggcgacggcgcgtgcggcaagacgtgcctgctgatcgtgttcagtaaagacgaattccccgaggtgtacgtgcccaccgtgttcgagaactatgtggcggacatcgaggtggacggcaagcaggtggagctggcgctgtgggacacggcaggccaggaggactacgatcgtttacggccgctctcctatccggacaccgacgtcatccttatgtgcttctcggtggacagcccggactctctcgagaacatccccgagaagtgggtgcccgaggtaaagcacttctgccccaatgtgcccatcatcctggtggccaacaaaaaagacctgcgcagcgacgagcatgtccgcacggagctggcccgcatgaagcaggagccagtgcgcacggatgacggccgcgccatggcggtgcgcatccaagcctatgactacctcgagtgctcggccaagaccaaggagggcgtgcgcgaggtttttgagacggccacgcgcgccgcgctgcagaagcgctacggatcccagaatggctgcatcaactgctgcaaggtg

SEQ ID NO: 584 - protein, 201 aa, Mus musculus
PAPGELMAAIRKKLVVVGDGACGKTCLLIVFSKDEFPEVYVPTVFENYVADIEVDGKQVELALWDTAGQEDYDRLRPLSYPDTDVILMCFSVDSPDSLENIPEKWVPEVKHFCPNVPIILVANKKDLRSDEHVRTELARMKQEPVRTDDGRAMAVRIQAYDYLECSAKTKEGVREVFETATRAALQKRYGSQNGCINCCKV

SEQ ID NO: 585 - DNA, 4142 bp, Mus musculus
ccgggattggcctagggcgccgtggccatcccctttaatttttaaatacacggtcctctcctacttctgggtggcaagaaaaaaaaaataataagaaaagaagacaagccgtcgatttttatttttcccgcagagcaaaccccgccgtgcaatttggtcgcaaggcatcgggagacaagagtggtttgcaaattgtttcaaggctcaagacccagttgtgcagcggaaaaggaacgccgcgggttgacggagtccggggagcatctgctggcagctcctgcaggacccccggaaagctcctgctgctggtaccccccaggtcaccgcccgcacttcttgcttcatcggaggaggatctgggacgtgagcagcgacagcaagagctagtgctgaccgcgcgggctctgccttgggctttgtcgcggtacctgtgcctgccctactccgcgcactccctactcagcttttgcaatcttttgttgccactgctgaccgccccaagttaaaagcgcctttgcaattttttttttctgtctttttttttttttcttgagagagacagctctgcgattttttggaaaagcctcagacgccatctacagttaagacttaggtaactgccctctctagcaccccccttacacgccccccaccctttccaccaaaaagaggggggtgcagcgcggattctggctgccgcgcggcgtgagccggtagacccgagcttatttcctttttctttttgttgggtttctaacgcgtggagggcgagccggcgccgcgcgctccctgaagactgcacaaactccacgcagggcttctccgcccggtctgcggatcctcagctggggatcgctcagaagcccggcgctgcagctcctcaccccagaggcacgctcactcgtccagatccacgctgcgaacagagacccactgagtccagcgtgcggttctgcaccgcgctggcagcttctgggtaacaaaaggacccgagttgtccgcagagcgagcacccccgggagcggggctcgcagccggggaccagccctgcagcgcccatctgggggctagttcttaactcttcctccacggagccccagacgggtcccctcccttcttgatccttttaagtcggtagcaccgaggcgcctgcaccggcgcggctcatccatctctccagaggggttttttggtttgtttgtttgttttgtcgtgtgcgatcctcacactcatgaacatacacaggtctacccctatcacaatagcgagatatgggagatcgcggaacaaaacccaggatttcgaagagctgtcgtctataaggtccgctgagcccagccagagtttcagcccgaaccttggctctccgagcccgcccgagactccgaacttgtcgcattgcgtttcttgcatcgggaaatacttactgttggagcctctggagggagaccacgttttccgcgctgtgcatctgcacagcggagaggagctggtttgcaaggtgtttgagatcagctgctaccaggagtccctggccccctgcttctgcctgtctgcccatagcaacatcaaccaaatcacggaaatcctcctgggagagaccaaagcctatgtgttctttgagcgaagctatggagacatgcattcctttgtccgcacttgtaagaagctgagggaggaggaggcagcccgactgttctaccagattgcctcagctgtggcccattgccacgatggaggcctggtgctgcgtgacctcaagctgcggaaatttatcttcaaggatgaagagaggactcgtgtcaagctggagagtttggaagacgcttacattctccggggtgatgatgactcactctctgacaagcatggctgcccagcgtatgtcagcccagagatcttgaacaccagcggcagttattcgggcaaggcagcggacgtgtggagcctgggggtaatgctgtacaccatgttggtggggcgttaccctttccatgacattgagcctagttctcttttcagtaagatccgcaggggccagttcaacattccagaaactctgtctcccaaggccaagtgcctcatccgaagcatcctgcgacgggagccgtcagagcggctgacctcgcaggaaattctggaccatccttggttttctacagattttagtgtctcaaattcgggatttggtgctaaagaggcgtgtgaccagctggtgccagacgtcaacatggaggagaacttggaccctttctttaactgagctcaaggcccagggacacatagcaggtaccaggagcaagagagagccccagaaaggagttctgggacacaggtggcctggctgagaagcaagacggacattcatatttacacatttcttggttcagagaaggaatatgttctaggagctgacggaacacgtagcatgggaacaagacgtgtgggatgggggttgggttcagatggacgggagcccctcccctaagcttctcttccctggggtagcctgagagtcccccttaccagtagggctattctaccccacttttcattttgttcagaaatagttgcagatctcgatagaatccaaactcttctgcctcaaacacctaccttggcattgcactgttagcatttaacttcttgttacgattcagggaagggacaattgatcgaagattttttttttttttttggaacagaccaaccacctatgtaataattaataagattcacctaaaaataataataattcggtgcacacagactgacctgaaacctgggtgctaaactaaaagaaaacaaaagttccagttgtcgtctctcattcgcactttccaattcatttcttctaaataaacgatgtcctattctggttaggaagtaacacattaacgctttgctccctgaacggggagggggagtctgttcctccacagacatttctgttttgtatcagctggtttttgtagcaggaaactatcagaagtcaaacttccagatgtattatcacagttcaggggaagaagaaaggaaaagaagaaaaatccaactcctttctggtttttgttcttttgaaggaagagggttcacattgtagacattgctctctgctccaaattcagtgaggggctcccagagggcaggcgcctcctggagtcagatctttttgatgatgctgatctcaacgttttgtttttgctttatgggaaactagtaaaacgagacaggttgtcccatgtgtataaaatacagggcagctatttccttttctttgctaagaatgatcctttgggcttggaaaggccctctggtttgaacagaaagagtaaacgggcaataagccaaaagccaggatgatatacatacaaacagctctctgtcccaatacgcaccttgtatttattaaggaaaatgtcacattgtgatgtattaagccagtacttcaattacgggtcaacgggatgacatgttacatgctgtagtttaacatttataattttgttcccctgttttgagtatttctgtccctggaataaccttttatttggctttctctagatagccttatttgattttgagtggcaaaatgtttttccttttgtactctggcttttctattgctgtatgatacagaactcttttggcataaatatttgtgttcccagtacctcagtcgtttgggttttcctgcctgcatctgttttgtgaaatggtcctgtttttgggtaggtgacacgtggactctagtgtgtaaatgttacttgaatctgtgcttcactctagtatgtggcatgtgtgtgcggactcttggatgcttcacgcctactccactggagcccctgtccccaggaggacagcttccccactgataatcaggagaccaagctgccatggatttacccttgattctattttgataatggaagatacagagagagggtttttacattcagaagatggtgctgtggcaagaaggaccttttatcttccctctcccctgtttttaaagtcctcggtgggaggaaagattggaaacatgcatgatggggactaatggcctctggtgctttgtcctgtatttggtttaatgtttttgtcctaatctcttcaatcaataaaattgtgcgtatttaact

SEQ ID NO: 586 - protein, 343 aa, Mus musculus
MNIHRSTPITIARYGRSRNKTQDFEELSSIRSAEPSQSFSPNLGSPSPPETPNLSHCVSCIGKYLLLEPLEGDHVFRAVHLHSGEELVCKVFEISCYQESLAPCFCLSAHSNINQITEILLGETKAYVFFERSYGDMHSFVRTCKKLREEEAARLFYQIASAVAHCHDGGLVLRDLKLRKFIFKDEERTRVKLESLEDAYILRGDDDSLSDKHGCPAYVSPEILNTSGSYSGKAADVWSLGVMLYTMLVGRYPFHDIEPSSLFSKIRRGQFNIPETLSPKAKCLIRSILRREPSERLTSQEILDHPWFSTDFSVSNSGFGAKEACDQLVPDVNMEENLDPFFN

SEQ ID NO: 587 - DNA, 3549 bp, Mus musculus
ggttggaaatcactttccagagacacggcctcctcggcatggcggtgcccgttcggagcgagttcgtttactctgtgctgtggccggggcgggggtctgggctataggcagatagcgtttagttccaccatgtttgggaacctatttgaagaggattattccagtgtgtcaagtagtcagtatggaagagggaagaaattaaagactaaaggtttggagccgcctgcccctagagaattcaccaatttaagtggaatcagaaatcagggtggaacctgttacctcagctcccttcttcagacgcttcatttcacacctgaattcagagaagctttattttctcttggtccggaagagctgggttctttagaggataaagataaacctgatgcaaaggttcggatcatacctttgcagttgcagcgcttgtttgcccagcttctgctcttggaccaggaggctgcatctaccatagacctcaccgacagcttcgggtggaccaacgatgaggaaatgaggcaacatgatgtgcaggaactcaaccgaattctcttcagtgctttggaaacttctttagttgggacctctggccatgacctcattcatcgtctataccatggcaccattgtgaaccagattgtttgcaaagagtgtaagaacatcagtgagaggcaggaagacttcttggatttgacagtagcagtcaaaaatgtatctggtttagaagatgaactctgcaacatgtatgtggaggaagaaatttttgactatgacaacctgtaccactgtggaacctgtgaccgactggttaaagcagcaaagtctgccaaattgcgtaagctgcctccttttcttactatttcattactaagatttaattttgattttgtgaaatgtgaacgctacaaggatactagctgttatacattccccctccggatcaatctcaagcctttctgtgaacagagtgaactggatgacatggaatatatgtatgacctcttctccgtcattatccacaaaggtggctgctatggaggtcattaccatgtgtacattaaagatgttgatcatcttggcaactggcaatgtcaagaggagataagtgatacaaatgtgaatgtgaaagctcctcagagtgaagaagaggctaatgatccattggtggttctaaaaacaatcttattgcaggaggaggccaatcaaattcctgttgatcaactgggccagaaactcttgaaaaaaacaggaatatcttggaacaagaagtacaggaaacagcatggaccactgcgaaagttcttacagctccatcctcagatatttctgctcagcacagatgaaagtacagttagtctcctgaggaaccatcttacccaggccccatctgacctacagagctgtgaacagattctacatacacttgcttcagaatccccaggcttgaatgatgacaccagttgcccacactggtttgatatcaatgattccaaagtccatccaatcagagagaaagatatcacacagcagttccagggtaaagaaagtgcctacatgctgttttatcggaaagccacgttacaaaggccccctgaagctcgagccaatccaagatacagagttccatgtcacttgctgaaggaaatggatgcagccaacattctactgcagatgagaagggcagaatgtgactctgcaaacagtacttttgagttgcatcttcatttgggtcctcactaccgtttcttcaatggggctcttcaccctgcagtctctgagacagaaagcgtgtgggacttaacgtttgataaaagaaaaactttaggagatctccgtcagtcaatatttcagctattggaatgttgggaaggagacatggttcttagtgttgcgaagcgtgtgccagcaggacttcatgtgtaccacaccctcgatggagatgacttgacactgtgtgaagctgaggttgctgatggggaagacatctttgtatggaatggggtagaggttggtggagtccaaattcagactggttttgattgtgaacctctgctgttaaacattcttcatctagaactaagtggtgaaggctcaaaatgtgagcagttggtggagtcaccacatgtctttcctgctaatgcagaagtgggcgctgtgttcacagccttgggcaccccagcaggtgccatcctcatgaacagtgtggagtctgcagatggagagtgctggactgctgttcccaaagaagacatgaagaagacgttcagagaacaaggtctcagaaatggaagcttaattttggttcaagattcagacagtgataataacagtctgttgcccaaacaagggagatggaccaacagcatgaatgagctcaactggctccaagtgaaaaatttctgccagtcagaatctgaagagaagcaggttcagatagccgtgaccatgcacacagtggtgtttgatattcgaattaaagccataaaggaattaaaattaatgaaggaactagctgagaacagctgtttgagacccattgatagaaacgggaagcttctttgtccagtcccagacagtagcactttggaggaagcagaggtgaagatggggagctccgtgggcctgtgtctgggaaaagcaccaacttcctctcagctgttcctgttttttgctctggggactgacattcaccctggggcagagatggacatcatagtagaagaaacactctcagtgagagattgtttaaagataatgctggagaagtcaggtcagcaaggagagatttggcacttaaggaaaatggattggtgctatgaagctggtgaacctttatgtgaagaggatgcaacactgaaagagcttatgatacgttctggggatactttgcttttaactgaagggaaacttcctcctccgggtcacttgaagatgcccatctggtggtaccagcctgcaaggctgtcaggacactgtgagagtcgggaccacttaaactgtgccttttctcaagatagcacctggagggctgctcccacccaaggtgctcctggccccgagcctgcagaagtctctctcctctacttgggggatatggagatctcagaagaggccacattggtggaactgaagtctcaggccttggccttgccttctgtttcgaagctcgctgtccagtccacagccctgctcagagtctggacagtggagagcaagcgccccagcagactcttgcgcactaactggcggcagctcaaggagtacagactgggccggagagcagagctctgcctagagctccttcaaaaagaggaggacttggggccccgagatgtactgctgaggacacagctacgcatccctggtgagagagcctactccctggcgacagacctgatatgggacaccaccagaggatggactgctggctccttgaggcagagagtagctgacttctattctcttcctgtggagaaaattgaaattgccaaatattttcctgaaaagtttgagtggcttccaatatctagctggaatcagcaagttgcc

SEQ ID NO: 588 - protein, 1135 aa, Mus musculus
MFGNLFEEDYSSVSSSQYGRGKKLKTKGLEPPAPREFTNLSGIRNQGGTCYLSSLLQTLHFTPEFREALFSLGPEELGSLEDKDKPDAKVRIIPLQLQRLFAQLLLLDQEAASTIDLTDSFGWTNDEEMRQHDVQELNRILFSALETSLVGTSGHDLIHRLYHGTIVNQIVCKECKNISERQEDFLDLTVAVKNVSGLEDELCNMYVEEEIFDYDNLYHCGTCDRLVKAAKSAKLRKLPPFLTISLLRFNFDFVKCERYKDTSCYTFPLRINLKPFCEQSELDDMEYMYDLFSVIIHKGGCYGGHYHVYIKDVDHLGNWQCQEEISDTNVNVKAPQSEEEANDPLVVLKTILLQEEANQIPVDQLGQKLLKKTGISWNKKYRKQHGPLRKFLQLHPQIFLLSTDESTVSLLRNHLTQAPSDLQSCEQILHTLASESPGLNDDTSCPHWFDINDSKVHPIREKDITQQFQGKESAYMLFYRKATLQRPPEARANPRYRVPCHLLKEMDAANILLQMRRAECDSANSTFELHLHLGPHYRFFNGALHPAVSETESVWDLTFDKRKTLGDLRQSIFQLLECWEGDMVLSVAKRVPAGLHVYHTLDGDDLTLCEAEVADGEDIFVWNGVEVGGVQIQTGFDCEPLLLNILHLELSGEGSKCEQLVESPHVFPANAEVGAVFTALGTPAGAILMNSVESADGECWTAVPKEDMKKTFREQGLRNGSLILVQDSDSDNNSLLPKQGRWTNSMNELNWLQVKNFCQSESEEKQVQIAVTMHTVVFDIRIKAIKELKLMKELAENSCLRPIDRNGKLLCPVPDSSTLEEAEVKMGSSVGLCLGKAPTSSQLFLFFALGTDIHPGAEMDIIVEETLSVRDCLKIMLEKSGQQGEIWHLRKMDWCYEAGEPLCEEDATLKELMIRSGDTLLLTEGKLPPPGHLKMPIWWYQPARLSGHCESRDHLNCAFSQDSTWRAAPTQGAPGPEPAEVSLLYLGDMEISEEATLVELKSQALALPSVSKLAVQSTALLRVWTVESKRPSRLLRTNWRQLKEYRLGRRAELCLELLQKEEDLGPRDVLLRTQLRIPGERAYSLATDLIWDTTRGWTAGSLRQRVADFYSLPVEKIEIAKYFPEKFEWLPISSW

SEQ ID NO: 589 - DNA, 2023 bp, Mus musculus
ctgcgagttccgtctgctgtgtgaggactgccgccaccaccgctgacgatgcagatctttgtgaaaaccttaactggtaagaccatcaccctaggaggtcgagcccagtgacaccattgagaatgtcaaggcaaagatccaggacaagaagggcatcccccatgaccagcacaggatgatctttgcaggcaagcagctggaagatgtccgcaccctgtcagagtacaacatccagaaagagtcctccctgcacgtggtccttcgctgcagaggtggcatgcagatctttgtgaagaccctgacaggcaagaccatcaccctggaggtcgagcccagtgactccatagagaatgtcaaggcaaagattcaggacaaggagggcatcccccctgaccagcagaggctgatctttgcaggcaagcagctggaagatggccgcaccctgtcaggctacaacatccagaaagagtccaccctgcacttggtccttcgcctcagaggtgggatgcagatctttgtgaagaccctgacaggcaagaccatcaccctggaggtcgagcccagtgacaccatagagaatgtcaaggcaaagatccaggacaaggagggcatcccccctgaccagcagaggctgatctttgcaggcaagcagctggaagatggccgcaccctgtcagactacaacatccagaaagagtccaccctgcacctggtccttcgcctcagaggtggcatgcagatctttgtgaagaccctgacaggcaagaccatcaccctggaggtcgagcccagtgacaccatagagaatgtcaaggcaaagatccaggacaaggagggcatcccccctgaccagcagaggctgatctttgcaggcaagcagctggaagatggccgcaccctgtcagactacaacatccagaaagagtccaccctgcacctggtccttcgcctcagaggtgggatgcagatctttgtgaagaccctgacaggcaagaccatcaccctggaggtcgagcccagtgacaccatagagaatgtcaaggcaaagatccaggacaaggagggcatcccccctgaccagcagaggctgatctttgcaggcaagcagctggaagatggccgcaccctgtcagactacaacatccagaaagagtccaccctgcacctggtccttcgcctcagaggtggcatgcagatctttgtgaagaccctgacaggcaagaccatcaccctggaggtcgagcccagtgacaccattgagaatgtcaaggcaaagatccaggacaaggagggcatcccccctgaccagcagaggctgatctttgcaggcaagcagctggaagatggccgcaccctgtcagactacaacatccagaaagagtccaccctgcacttagtccttcgcctcagaggtgggatgcagatctttgtgaagaccctgacaggcaaaaccatcaccctggaggtcgagcccagtgacaccattgagaatgtcaaggcaaagatccaggacaaggagggcatcccccctgaccagcagaggctgatctttgcaggcaagcagctggaagatggccgcaccctgtcagactacaacatccagaaagagtccaccctgcacctggtccttcgcctcagaggtggcatgcagatctttgtgaagaccctgacaggcaagaccatcaccctggaggtcgagcccagtgacaccatagagaatgtcaaggcaaagatccaggacaaggagggcatcccccctgaccagcagaggctgatctttgcaggcaagcagctggaagatggccgcaccctgtcagactacaacatccagaaagagtccaccctgcacctggtccttcgcctcagaggtggcatgcagatctttgtgaagaccctgacaggcaagaccatcaccctggacgtcgagcccagtgttaccaccaagaaggtcaaacaggaagacagacgtaccttcctcaccacagtatctaaaaagagccctccttgtgcttgttcttgggtg

SEQ ID NO: 590 - protein, 304 aa, Mus musculus
MQIFVKTLTGKTITLEVEPSDTIENVKAKIQDKEGIPPDQQRLIFAGKQLEDGRTLSDYNIQKESTLHLVLRLRGGMQIFVKTLTGKTITLEVEPSDTIENVKAKIQDKEGIPPDQQRLIFAGKQLEDGRTLSDYNIQKESTLHLVLRLRGGMQIFVKTLTGKTITLEVEPSDTIENVKAKIQDKEGIPPDQQRLIFAGKQLEDGRTLSDYNIQKESTLHLVLRLRGGMQIFVKTLTGKTITLEVEPSDTIENVKAKIQDKEGIPPDQQRLIFAGKQLEDGRTLSDYNIQKESTLHLVLRLRGG

SEQ ID NO: 591 - DNA, 5259 bp, Mus musculus
ggaagtttgtgtctcctacgaatcccccccagagctcccgctcctcgcgcgctccggccattcccgccgaccctgcctgtggctgcccccttcccatccccgcgatgtgaccctacagccgagccgtcgccgctccggacccagtggttccacagcctctgctgcctctgccttcacctctaccgcgttaggatttttcgctgccgcctctcgcggcagaggaggaggcagaaataaagttggtgtgccggtcttgtgcggagattggaggcgtccttgcgggctccggcccggagagggggggtgtcggcgttggagttgtgaattcgctgcgtttccatgaaatcctgcggagtgtcgctcgctaccgccgccgccgccgccgccgccgccgctttcggtgatgaggaaaagaaaatggcggcgggaaaagcgagcggcgagagcgaggaggcgtcccccagcctgacagcggaggagagggaggcgctcggcggactggacagccgccttttcgggttcgtgaggtttcatgaagatggcgccaggatgaaggccctgctgggcaaggctgttcgctgctacgaatctctaatcttaaaagctgaagggaaagtggagtctgatttcttttgtcaattaggtcacttcaacctcttattggaagattatccaaaagcattatctgcataccagaggtactacagtttacagtctgattactggaagaatgctgcctttttatatggtcttggtttggtctacttccattacaatgcatttcagtgggctattaaagcatttcaggaggtgctttatgtcgatcccagcttttgtcgagccaaggaaattcatttacgacttgggcttatgttcaaagtgaacacagactatgagtctagtttaaagcattttcagttagctttggttgactgtaatccctgcactttgtccaatgctgaaattcagtttcacattgcccacttatatgaaacccagaggaagtatcattctgcaaaagaagcttatgagcaacttttgcagacagaaaacctttctgcacaagtaaaagcaactattttacaacaattaggttggatgcatcacactgtggatctcctgggagataaggccaccaaggaaagttatgctattcagtatctccagaagtccttggaagcagatccaaattctggccagtcctggtatttccttggaaggtgctattcaagtattgggaaagttcaggatgcctttatatcttacaggcaatctattgataaatcagaagcaagtgcagatacatggtgttcaataggtgtgctctatcaacagcaaaatcagcctatggatgctttgcaagcttatatttgtgctgtacaattggaccacggtcatgctgcagcctggatggatctaggcactctctatgaatcctgcaaccaacctcaggatgctattaaatgctatttaaatgcaactagaagcaaaaattgtagtaatacctctggacttgcagcacgaattaagtatttacaggctcagttgtgtaaccttccacaaggtagtctacagaataaaactaaattacttcctagtattgaggaggcatggagcctaccaatccccgcagagcttacctccaggcagggtgccatgaacacagcacagcagaatacttctgataattggagtggtggcaatgcaccacctccagtagaacaacaaactcattcatggtgtttgacaccacagaaattacagcacttggaacagctccgagcaaacagaaataatttaaatccagcacagaaactaatgctggaacagctggaaagtcagtttgtcttaatgcagcaacaccaaatgagacaaacaggagttgcacaggtacggcctactggaattcttaatgggccaacagttgactcatcactgcctacaaactcagtttctggccagcagccacagcttcctctgaccagaatgcctagtgtctctcagcctggagtccacactgcctgtcctaggcagactttggccaatggacccttttctgcaggccatgttccctgtagcacatcaagaacactgggaagtacagacactgttttgataggcaataatcatgtaacaggaagtggaagtaatggaaacgtgccttacctgcagcgaaacgcacccactctacctcataaccgcacaaacctgaccagcagcacagaggagccgtggaaaaaccaactatctaactccactcaggggcttcacaaaggtccgagttcacatttggcaggtcctaatggtgaacgacctctatcttccactgggccttcccagcatctccaggcagctggctctggtattcagaatcagaatggacatcccaccctgcctagcaattcagtaacacagggggctgctctcaatcacctctcctctcacactgctacctcaggtggacaacaaggcattaccttaaccaaagagagcaagccttcaggaaacacattgacggtgcctgaaacaagcaggcaaactggagagacacctaacagcactgccagtgttgagggacttcctaatcatgtccatcaggtgatggcagatgctgtttgcagtcctagccatggagattctaagtcaccaggtttactaagttcagacaatcctcagctctctgccttgttgatgggaaaagctaataacaatgtgggtcctggaacctgtgacaaagtcaataacatccacccaactgtccatacaaagactgataattctgttgcctcttcaccatcttcagccatttccacagcaacaccttctcctaagtccactgaacagacaaccacaaacagtgttaccagccttaacagccctcacagtgggctgcacacaattaatggagaaggaatggaagaatctcagagccccattaaaacagatctgcttctagttagccacagacctagtcctcagatcataccatcaatgtctgtgtccatatatcccagctcagcagaagttctgaaagcttgcaggaatctaggtaaaaacggcctgtctaatagtagcattctgttggataaatgtccgcctccaagaccaccatcctcaccataccctcccttgccaaaggacaagttgaatccacctacacctagtatttatttggaaaataaacgtgatgctttctttcctccattacatcaattttgtacaaacccaaacaaccctgttacagtaatacgtggccttgctggagctcttaaattagacttgggacttttctctactaaaactttggtggaagctaacaatgaacatatggtagaagtgaggacacagttgttacaaccagcagatgaaaattgggaccctactggaaccaagaaaatctggcactgtgaaagtaatagatctcatactacaattgctaaatatgctcagtaccaggcctcctcattccaagaatcattgagagaagaaaatgagaaaagaagtcaccataaagaccactcagacagtgaatctacatcatcagataattctgggaaaagaagaaaaggaccctttaaaaccattaagtttgggaccaacattgacctgtctgatgacaaaaagtggaagttacagctacatgagctgactaaacttcctgccttcgtgagagttgtatctgcaggaaatcttttaagccacgttggtcatactatactgggcatgaacacagttcaactatacatgaaagttccaggaagcagaacaccaggtcatcaagaaaataacaacttctgttcagttaatataaatattggcccaggtgactgtgaatggtttgttgttcctgaaggctactggggtgttttgaatgacttctgtgaaaaaaataatttgaatttcttaatgggttcttggtggcccaaccttgaagatctatatgaagcaaatgttccagtgtataggtttattcagcgacctggagatctggtctggataaatgctggcactgttcattgggttcaagctattggctggtgcaacaatattgcttggaatgttggtccacttacagcctgtcagtataagttagcagtggaacgttatgaatggaacaagttgcaaaatgtaaagtcaatagtacccatggttcatctttcctggaatatggcacgaaatatcaaggtttcagatccaaagctttttgaaatgattaagtattgtcttctgagaacgctgaagcaatgtcagacattgagggaagctctaattgctgcaggaaaagagatcatatggcacgggcggacaaaagaagaaccagctcattattgtagtatttgtgaggtggaggtttttgatctgctttttgtcactaatgagagtaattctcgaaaaacctacatagtacattgccaagattgtgcacgaaaaacaagtgggaatctggaaaattttgtggtgctagaacagtacaaaatggaggatctgatgcaagtctatgaccaatttacattagtaagtgaaatcaacatgctcctccattaccatccgcctcatcttgatattgttccatggacattaaacatgagaccttttctgctattcagaaagtaacccagttctgcaccactgctatttgtagctatctcgtaaggctgctggctgaaaactgtgtctatgcaaccttccaagtgtggagtgtcaaccaactggacgggagagtactgctcctatgccaggactctcgtaaagctaattagctgaacttcagagaaaaaaaaaagaataataattaccacgttttgtatatatctgacaaaactggcaacatcataaagactactgacttgaagacaacctcttttatatttctcgatttctgggctaatgaatttgttttcacctatcttttccctttcagaattttattcgggggggaaaataactagcctagctggtcatttctttgtaaggtagttagcaatatttagtctttctttggtcacctttttttttttaatgtgaaaagttaagtaagaaactttttttactgcttttatgaatttctgtcttgttttgaaactatgatcgttataattttggttcccaaataaaacatttaaaaaaaataattaacagcaacgtcacaaagataatggattgcacatagactaagaaataaacttcagaattgtgattttttttgtttctaatcttgatgtaaatttacactatttataaatacatatttattgcctg

SEQ ID NO: 592 - protein, 1424 aa, Mus musculus
MKSCGVSLATAAAAAAAAAFGDEEKKMAAGKASGESEEASPSLTAEEREALGGLDSRLFGFVRFHEDGARMKALLGKAVRCYESLILKAEGKVESDFFCQLGHFNLLLEDYPKALSAYQRYYSLQSDYWKNAAFLYGLGLVYFHYNAFQWAIKAFQEVLYVDPSFCRAKEIHLRLGLMFKVNTDYESSLKHFQLALVDCNPCTLSNAEIQFHIAHLYETQRKYHSAKEAYEQLLQTENLSAQVKATILQQLGWMHHTVDLLGDKATKESYAIQYLQKSLEADPNSGQSWYFLGRCYSSIGKVQDAFISYRQSIDKSEASADTWCSIGVLYQQQNQPMDALQAYICAVQLDHGHAAAWMDLGTLYESCNQPQDAIKCYLNATRSKNCSNTSGLAARIKYLQAQLCNLPQGSLQNKTKLLPSIEEAWSLPIPAELTSRQGAMNTAQQNTSDNWSGGNAPPPVEQQTHSWCLTPQKLQHLEQLRANRNNLNPAQKLMLEQLESQFVLMQQHQMRQTGVAQVRPTGILNGPTVDSSLPTNSVSGQQPQLPLTRMPSVSQPGVHTACPRQTLANGPFSAGHVPCSTSRTLGSTDTVLIGNNHVTGSGSNGNVPYLQRNAPTLPHNRTNLTSSTEEPWKNQLSNSTQGLHKGPSSHLAGPNGERPLSSTGPSQHLQAAGSGIQNQNGHPTLPSNSVTQGAALNHLSSHTATSGGQQGITLTKESKPSGNTLTVPETSRQTGETPNSTASVEGLPNHVHQVMADAVCSPSHGDSKSPGLLSSDNPQLSALLMGKANNNVGPGTCDKVNNIHPTVHTKTDNSVASSPSSAISTATPSPKSTEQTTTNSVTSLNSPHSGLHTINGEGMEESQSPIKTDLLLVSHRPSPQIIPSMSVSIYPSSAEVLKACRNLGKNGLSNSSILLDKCPPPRPPSSPYPPLPKDKLNPPTPSIYLENKRDAFFPPLHQFCTNPNNPVTVIRGLAGALKLDLGLFSTKTLVEANNEHMVEVRTQLLQPADENWDPTGTKKIWHCESNRSHTTIAKYAQYQASSFQESLREENEKRSHHKDHSDSESTSSDNSGKRRKGPFKTIKFGTNIDLSDDKKWKLQLHELTKLPAFVRVVSAGNLLSHVGHTILGMNTVQLYMKVPGSRTPGHQENNNFCSVNINIGPGDCEWFVVPEGYWGVLNDFCEKNNLNFLMGSWWPNLEDLYEANVPVYRFIQRPGDLVWINAGTVHWVQAIGWCNNIAWNVGPLTACQYKLAVERYEWNKLQNVKSIVPMVHLSWNMARNIKVSDPKLFEMIKYCLLRTLKQCQTLREALIAAGKEIIWHGRTKEEPAHYCSICEVEVFDLLFVTNESNSRKTYIVHCQDCARKTSGNLENFVVLEQYKMEDLMQVYDQFTLVSEINMLLHYHPPHLDIVPWTLNMRPFLLFRK

SEQ ID NO: 593 - DNA, 3201 bp, Mus musculus
aggcactctctatgaatcctgcaaccaacctcaggatgctattaaatgctatttaaatgcaactagaagcaaaaattgtagtaatacctctggacttgcagcacgaattaagtatttacagaatacttctgataattggagtggtggcaatgcaccacctccagtagaacaacaaactcattcatggtgtttgacaccacagaaattacagcacttggaacagctccgagcaaacagaaataatttaaatccagcacagaaactaatgctggaacagctggaaagtcagtttgtcttaatgcagcaacaccaaatgagacaaacaggagttgcacaggtacggcctactggaattcttaatgggccaacagttgactcatcactgcctacaaactcagtttctggccagcagccacagcttcctctgaccagaatgcctagtgtctctcagcctggagtccacactgcctgtcctaggcagactttggccaatggacccttttctgcaggccatgttccctgtagcacatcaagaacactgggaagtacagacactgttttgataggcaataatcatgtaacaggaagtggaagtaatggaaacgtgccttacctgcagcgaaacgcacccactctacctcataaccgcacaaacctgaccagcagcacagaggagccgtggaaaaaccaactatctaactccactcaggggcttcacaaaggtccgagttcacatttggcaggtcctaatggtgaacgacctctatcttccactgggccttcccagcatctccaggcagctggctctggtattcagaatcagaatggacatcccaccctgcctagcaattcagtaacacagggggctgctctcaatcacctctcctctcacactgctacctcaggtggacaacaaggcattaccttaaccaaagagagcaagccttcaggaaacacattgacggtgcctgaaacaagcaggcaaactggagagacacctaacagcactgccagtgttgagggacttcctaatcatgtccatcaggtgatggcagatgctgtttgcagtcctagccatggagattctaagtcaccaggtttactaagttcagacaatcctcagctctctgccttgttgatgggaaaagctaataacaatgtgggtcctggaacctgtgacaaagtcaataacatccacccaactgtccatacaaagactgataattctgttgcctcttcaccatcttcagccatttccacagcaacaccttctcctaagtccactgaacagacaaccacaaacagtgttaccagccttaacagccctcacagtgggctgcacacaattaatggagaaggaatggaagaatctcagagccccattaaaacagatctgcttctagttagccacagacctagtcctcagatcataccatcaatgtctgtgtccatatatcccagctcagcagaagttctgaaagcttgcaggaatctaggtaaaaacggcctgtctaatagtagcattctgttggataaatgtccgcctccaagaccaccatcctcaccataccctcccttgccaaaggacaagttgaatccacctacacctagtatttatttggaaaataaacgtgatgctttctttcctccattacatcaattttgtacaaacccaaacaaccctgttacagtaatacgtggccttgctggagctcttaaattagacttgggacttttctctactaaaactttggtggaagctaacaatgaacatatggtagaagtgaggacacagttgttacaaccagcagatgaaaattgggaccctactggaaccaagaaaatctggcactgtgaaagtaatagatctcatactacaattgctaaatatgctcagtaccaggcctcctcattccaagaatcattgagagaagaaaatgagaaaagaagtcaccataaagaccactcagacagtgaatctacatcatcagataattctgggaaaagaagaaaaggaccctttaaaaccattaagtttgggaccaacattgacctgtctgatgacaaaaagtggaagttacagctacatgagctgactaaacttcctgccttcgtgagagttgtatctgcaggaaatcttttaagccacgttggtcatactatactgggcatgaacacagttcaactatacatgaaagttccaggaagcagaacaccaggtcatcaagaaaataacaacttctgttcagttaatataaatattggcccaggtgactgtgaatggtttgttgttcctgaaggctactggggtgttttgaatgacttctgtgaaaaaaataatttgaatttcttaatgggttcttggtggcccaaccttgaagatctatatgaagcaaatgttccagtgtataggtttattcagcgacctggagatctggtctggataaatgctggcactgttcattgggttcaagctattggctggtgcaacaatattgcttggaatgttggtccacttacagcctgtcagtataagttagcagtggaacgttatgaatggaacaagttgcaaaatgtaaagtcaatagtacccatggttcatctttcctggaatatggcacgaaatatcaaggtttcagatccaaagctttttgaaatgattaagtattgtcttctgagaacgctgaagcaatgtcagacattgagggaagctctaattgctgcaggaaaagagatcatatggcacgggcggacaaaagaagaaccagctcattattgtagtatttgtgaggtggaggtttttgatctgctttttgtcactaatgagagtaattctcgaaaaacctacatagtacattgccaagattgtgcacgaaaaacaagtgggaatctggaaaattttgtggtgctagaacagtacaaaatggaggatctgatgcaagtctatgaccaatttacattagctcctccattaccatccgcctcatcttgatattgttccatggacattaaacatgagaccttttctgctattcagaaagtaacccagttctgcaccactgctatttgtagctatctcgtaaggctgctggctgaaaactgtgtctatgcaaccttccaagtgtggagtgtcaaccaactggacgggagagtactgctcctatgccaggactctcgtaaagctaattagctgaacttcag

SEQ ID NO: 594 - protein, 987 aa, Mus musculus
GTLYESCNQPQDAIKCYLNATRSKNCSNTSGLAARIKYLQNTSDNWSGGNAPPPVEQQTHSWCLTPQKLQHLEQLRANRNNLNPAQKLMLEQLESQFVLMQQHQMRQTGVAQVRPTGILNGPTVDSSLPTNSVSGQQPQLPLTRMPSVSQPGVHTACPRQTLANGPFSAGHVPCSTSRTLGSTDTVLIGNNHVTGSGSNGNVPYLQRNAPTLPHNRTNLTSSTEEPWKNQLSNSTQGLHKGPSSHLAGPNGERPLSSTGPSQHLQAAGSGIQNQNGHPTLPSNSVTQGAALNHLSSHTATSGGQQGITLTKESKPSGNTLTVPETSRQTGETPNSTASVEGLPNHVHQVMADAVCSPSHGDSKSPGLLSSDNPQLSALLMGKANNNVGPGTCDKVNNIHPTVHTKTDNSVASSPSSAISTATPSPKSTEQTTTNSVTSLNSPHSGLHTINGEGMEESQSPIKTDLLLVSHRPSPQIIPSMSVSIYPSSAEVLKACRNLGKNGLSNSSILLDKCPPPRPPSSPYPPLPKDKLNPPTPSIYLENKRDAFFPPLHQFCTNPNNPVTVIRGLAGALKLDLGLFSTKTLVEANNEHMVEVRTQLLQPADENWDPTGTKKIWHCESNRSHTTIAKYAQYQASSFQESLREENEKRSHHKDHSDSESTSSDNSGKRRKGPFKTIKFGTNIDLSDDKKWKLQLHELTKLPAFVRVVSAGNLLSHVGHTILGMNTVQLYMKVPGSRTPGHQENNNFCSVNINIGPGDCEWFVVPEGYWGVLNDFCEKNNLNFLMGSWWPNLEDLYEANVPVYRFIQRPGDLVWINAGTVHWVQAIGWCNNIAWNVGPLTACQYKLAVERYEWNKLQNVKSIVPMVHLSWNMARNIKVSDPKLFEMIKYCLLRTLKQCQTLREALIAAGKEIIWHGRTKEEPAHYCSICEVEVFDLLFVTNESNSRKTYIVHCQDCARKTSGNLENFVVLEQYKMEDLMQVYDQFTL

SEQ ID NO: 595 - DNA, 4699 bp, Mus musculus
ggagttggagcggggccggcgtcgcggccgctactgctggccgaactgctgccgccgccgggtggacgggcggacgcgcaaagccgggggcgggcgcggcggggcggaccggccccgatgaggcgcaaagagaagcggctcttgcaggcggtggctctggctctggcggccctggtcctgctgcccaacgtggggctttgggctctgtaccgcgagcggcagcccgacggcagccctgggggattgggggcggcggtggcccccgcggcggttcaggaattacacagtcgacaaaaaaagacatttttcttgggagctgaacaaaggctgaaggactggcataacaaggaggctatcaggagggacgcacagcgcgtaggatatggagaacaggggaagccttaccccatgaccgatgccgagagagtggaccaggcgtaccgggaaaatggatttaacatctacgtcagtgataaaatctccctgaatcgctctctccccgatatccggcacccaaactgtaacagcaagctctacctggagacgctccccaacaccagcatcatcatccccttccacaacgagggctggtcctcactgctgcgcactgttcacagcgtgctcaaccgctcgcccccagagctagtggcggagattgtgttggtcgatgacttcagtgatcgagagcacctgaagaagcccctggaggactacatggcccttttccccagcgtgaggattctccggaccaagaaacgggaaggcctgataaggacccgaatgctgggggcatcagctgccaccggagatgtcgtcactttcttagattcacactgtgaagccaacgtcaactggctcccccctttgcttgaccgcattgctcggaaccggaagaccatcgtgtgcccaatgatcgatgtcatcgaccacgatgacttccggtatgagactcaggctggggacgccatgcgtggtgccttcgactgggaaatgtattacaaacggatcccaatccctccagagctgcagaaggctgaccccagtgacccatttgagtctcccgtgatggctggagggttgttcgctgtggaccggaaatggttctgggagttgggtggctatgaccctggcttggagatctggggaggagagcagtatgagatctccttcaaggtgtggatgtgtgggggccgcatggaggacatcccctgctccagagtgggccacatctacaggaagtatgtgccctacaaggtccctgccggagtcagcctggcccggaacctgaagcgagtggcagaggtatggatggatgaatacgcagaatacatctaccagcgcaggccggagtaccgccacctctcagctggagatgtcgtggcccagaaaaagctccgagtctccctcaactgtaagagcttcaagtggtttatgaccaaaattgcctgggacctgcccaagttctacccacccgtggaacctccggctgcggcatggggggagattcgcaatgtgggcacaggactgtgcacagacacgaagcttggcacactgggctccccactgaggctcgagacctgcatccggggccgaggcgaggctgcttggaacagtatgcaggtctttaccttcacctggcgggaggacatccggcctggagaccctcagcacaccaagaagttttgcttcgacgctgtctcccacaccagcccagtcaccctctacgactgccacagcatgaagggcaaccagctgtggaaataccgcaaggacaagacgctgtaccaccctgtgagcggcagctgcatggactgcagcgagagtgaccacagggtcttcatgaacacctgcaatccctcctccctcacccagcagtggctctttgaacacaccaactcgacggtcttagagaatttcaacaagaactgagtccttagaccttgacaaacccctcaggttcctgtggagctcataaaccttcctcctgtgggagaagaggcatcggtgggcaccaaggtgctgggttcttgaaggactgacatggtggggccacggggagaacagaccataccaatggctctccaagaaggcggagcctgctcacatcatagcagagctcaccagcctgtcagcatgttccctaagtgttaggaatcgcctgggcagccttgagccatgaggttgcccttgcagacaggacagtgccctagaaaggaaggtggtatcggccttgggacagcttaaacctgtgtgccagctgctggcaaggaagtctgcctgttcttgagggaactgctagaattgcccagcttctgtgttggtccagggcaatgagaggccattgggacttccgagtgctccatagctagcactggccagcaaccaggcgaggggccccttcctctgcagccagatgtaaaggatgtctcccctggctctctgggtatttcagatgcccgttctagtttcagggctacctgggcaccaggtcgtcagggctagttcagccggctaagtagacctccagaccgaacagctcccagccaatgcttccaaagccctttctccgtgcttttccttggcggctccctgccttggagaggaaccggtgctgtgagggatcacctccagagtctcctggggggtggcttcccccagataatgactgctgtggttccaacctcacagaaccctggagtttctggaaagttctgtggttctgttgaaagcatagatgagccatggcacgtgtgggcatataacgcaagcagccaggtgtcaggcaacccctgacccaagcagaggcggtagggcaccagaagcttcggtccaacccaatgccgtcacagccacagcctcgtgaggtgtgaggacatcacctttagccccatgtctcaaacatgaactcaccctccaaggagctggtcacttgccagtgaagtaactgagacatggtcctgaggccagagctctgccttagagatgctgggatcggggtcatcgggtccccaggctcgtcgggttggtgctgtagaaccacctccacgtagcccctgtgctgtcacagctcacttgtggatttctagtgcccttttccatatgagcactctgtctgacaagtggccggctgggaaggagtcaaaaaggggagtgggtgggtgtccagaatccagcagggatgcgtgttgcagccaaggggagttgagtcctcagagagcaatgcggccttgtttcaataaaaaccgtgccttttacaaagagaaaatgcagccgagcagctgattccctaaacttgaaccacttactagtgccttgctagacagacagacagacagacaggggagcgtggagaagggacacttattcgggtcctatgagcccaatgagtgtctttacgtctgacttcaagcagaaagtgcagagcagaacctgagacccagaggcccccacagcagggacaactgcctatttgtgcggccctccctgagacaggacagctctagagacctgacaagcccagaagtgctctgcctgaacctcactatcaggggcgagctgagcagctgggtttccagcggatgccgagcaggtggttagggtggttaaggcagatgctgccgcaagccatccctagcctcactcgctcccttgctcgcccgattcattccatcctcatctggttccgtccccttctccagcagtcacttcctctgagcgcacctcagcatttgtgactgctgaactctgaccttagagcctaagacttgaggaggtgtgtcacaggaagaaccaggttggcttggtggctggctgcagatacttaatccccaccttgtttgggcttcaggtgtggaaatccttgtcctgaagagtcaggtttctactctgctgatgggcctgtgccacagcccacgcagcaggccgggcggctggcctcttcctccaaagctttattcagaggctaagactacaaaaacaagatgtggttagaaaggcggcctcccctccgccccggagattccagaaacattttggaatgcagtgtccttgccatgaggccattgtgtggcaggcaggctgtcttaccctgccctgccaactagagcttctggctttaaaagcagccagcaatgatagatcttgcgttgcggcagtgagctgctctgatgggcggcctagtggatctccaaagtcagcatcatgactccccttcagtccttcctgtcacgctcctccctgcgtggacccctcgcttcagcagtccctacttctcacagaggagactgtctgcatccagtgctcagggcagcctgtttgtctaaagtcaggcagtgtgaaaggaacaaagagtgcaattccaccctgaattcatcagcacttgccgctgaggctttctccggcaaatcctactcatattttggttcaaggttttgatgctgagccagggccctgctgccaccattaggtgagagtggtagctacatcccaggtttcaagatcttaacgcggtccactcagctctgacagggagtccaggggctgcaggcagggaagctgggcactgagacagggttctgggggcgggggaggggcggatcccaagaccacccacctctcctggaagagagagccttgtaaggaatgacttatcctgttcagttgtgactgtggttgttcaataaacctccagactttctct

SEQ ID NO: 596 - protein, 603 aa, Mus musculus
MRRKEKRLLQAVALALAALVLLPNVGLWALYRERQPDGSPGGLGAAVAPAAVQELHSRQKKTFFLGAEQRLKDWHNKEAIRRDAQRVGYGEQGKPYPMTDAERVDQAYRENGFNIYVSDKISLNRSLPDIRHPNCNSKLYLETLPNTSIIIPFHNEGWSSLLRTVHSVLNRSPPELVAEIVLVDDFSDREHLKKPLEDYMALFPSVRILRTKKREGLIRTRMLGASAATGDVVTFLDSHCEANVNWLPPLLDRIARNRKTIVCPMIDVIDHDDFRYETQAGDAMRGAFDWEMYYKRIPIPPELQKADPSDPFESPVMAGGLFAVDRKWFWELGGYDPGLEIWGGEQYEISFKVWMCGGRMEDIPCSRVGHIYRKYVPYKVPAGVSLARNLKRVAEVWMDEYAEYIYQRRPEYRHLSAGDVVAQKKLRVSLNCKSFKWFMTKIAWDLPKFYPPVEPPAAAWGEIRNVGTGLCTDTKLGTLGSPLRLETCIRGRGEAAWNSMQVFTFTWREDIRPGDPQHTKKFCFDAVSHTSPVTLYDCHSMKGNQLWKYRKDKTLYHPVSGSCMDCSESDHRVFMNTCNPSSLTQQWLFEHTNSTVLENFNKN

SEQ ID NO: 597 - DNA, 1364 bp, Mus musculus
cttgcactgttcgagatgcccatgtagggctctgccgggacctgggtcttccctctcctggagctgcagaggccagaagttcagtggtgaggggtccaaggagagtccggggagaccagggaggctctgtccatcccctgtccctgtccctgtgggaaggcccccggcagcagcaagacgctggctgttccacctgcccacaagaacagccaccaccagtacccaggggatgactagcggccggaccacagggccacaaaaagaagaaggctaccccacttacagatgcagaccatgtggggctccggagaactgcttgtagcatggtttctagtgttggcagcagatggtactactgagcatgtctacagacccagccgtagagtgtgtactgtggggatttccggaggttccatctcggagacctttgtgcagcgtgtataccagccttacctcaccacttgcgacggacacagagcctgcagcacctaccgaaccatctaccggactgcctatcgccgtagccctggggtgactcccgcaaggcctcgctatgcttgctgccctggttggaagaggaccagtgggctccctggggcttgtggagcagcaatatgccagcctccatgtgggaatggagggagttgcatccgcccaggacactgccgctgccctgtgggatggcagggagatacttgccagacagatgttgatgaatgcagtacaggagaggccagttgtccccagcgctgtgtcaatactgtgggaagttactggtgccagggatgggagggacaaagcccatctgcagatgggacgcgctgcctgtctaaggaggggccctccccggtggccccaaaccccacagcaggagtggacagcatggcgagagaggaggtgtacaggctgcaggctcgggttgatgtgctagaacagaaactgcagttggtgctggccccactgcacagcctggcctctcggtccacagagcatgggctacaagatcctggcagcctgctggcccattccttccagcagctggaccgaattgattcactgagtgagcaggtgtccttcttggaggaacatctggggtcctgctcctgcaaaaaagatctgtgataacctctcaccacccaggctggatagagcagtcatccctagatcccttgtagccagagttcaggcgctgtctggtggtgcctatgagcagaaggccctgcctcattgtccctctttcttaggaggttcctaggacttgggcatggggagtggggtcttgtgtgactcttcagtggggctccctgtctaagtggtaaggtggggattgtctccatctttgtcataataaagctgagacttga

SEQ ID NO: 598 - protein, 278 aa, Mus musculus
MQTMWGSGELLVAWFLVLAADGTTEHVYRPSRRVCTVGISGGSISETFVQRVYQPYLTTCDGHRACSTYRTIYRTAYRRSPGVTPARPRYACCPGWKRTSGLPGACGAAICQPPCGNGGSCIRPGHCRCPVGWQGDTCQTDVDECSTGEASCPQRCVNTVGSYWCQGWEGQSPSADGTRCLSKEGPSPVAPNPTAGVDSMAREEVYRLQARVDVLEQKLQLVLAPLHSLASRSTEHGLQDPGSLLAHSFQQLDRIDSLSEQVSFLEEHLGSCSCKKDL

SEQ ID NO: 599 - DNA, 1371 bp, Mus musculus
ctggcaggctgctgtgcagtccacgaggaaggcttcggtcgacaggacaggcgtgcagacttcaggagggaccctgggcagcagacattccctggaagggcaggttgcattgcatggttggctcatggaggcagcagaggtggcctcagccaggcctgggcagcatcagcccccggcagcagcaagacgctggctgttccacctgcccacaagaacagccaccaccagtacccaggggatgactagcggccggaccacaggccacaaaaagaagaaggctaccccacttacagatgcagaccatgtggggctccggagaactgcttgtagcatggtttctagtgttggcagcagatggtactactgagcatgtctacagacccagccgtagagtgtgtactgtggggatttccggaggttccatctcggagacctttgtgcagcgtgtataccagccttacctcaccacttgcgacggacacagagcctgcagcacctaccgaaccatctaccggactgcctatcgccgtagccctggggtgactcccgcaaggcctcgctatgcttgctgccctggttggaagaggaccagtgggctccctggggcttgtggagcagcaatatgccagcctccatgtgggaatggagggagttgcatccgcccaggacactgccgctgccctgtgggatggcagggagatacttgccagacagatgttgatgaatgcagtacaggagaggccagttgtccccagcgctgtgtcaatactgtgggaagttactggtgccagggatgggagggacaaagcccatctgcagatgggacgcgctgcctgtctaaggaggggccctccccggtggccccaaaccccacagcaggagtggacagcatggcgagagaggaggtgtacaggctgcaggctcgggttgatgtgctagaacagaaactgcagttggtgctggccccactgcacagcctggcctctcggtccacagagcatgggctacaagatcctggcagcctgctggcccattccttccagcagctggaccgaattgattcactgagtgagcaggtgtccttcttggaggaacatctggggtcctgctcctgcaaaaaagatctgtgataacctctcaccacccaggctggatagagcagtcatccctagatcccttgtagccagagttcaggcgctgtctggtggtgcctatgagcagaaggccctgcctcattgtccctctttcttaggaggttcctaggacttgggcatggggagtggggtcttgtgtgactcttcagtggggctccctgtctaagtggtaaggtggggattgtctccatctttgtcataataaagctgagacttg

SEQ ID NO: 600 - protein, 256 aa, Mus musculus
MWGSGELLVAWFLVLAADGTTEHVYRPSRRVCTVGISGGSISETFVQRVYQPYLTTCDGHRACSTYRTIYRTAYRRSPGVTPARPRYACCPGWKRTSGLPGACGAAICQPPCGNGGSCIRPGHCRCPVGWQGDTCQTDVDECSTGEASCPQRCVNTVGSYWCQGWEGQSPSADGTRCLSKEGPSPVAPNPTAGVDSMAREEVYRLQARVDVLEQKLQLVLAPLHSLASRSTEHGLQDPGSLLAHSFQQLDRIDSLS

SEQ ID NO: 601 - DNA, 1309 bp, Mus musculus
gggagagtgcctttgtcctgagaaatgtgctttgtgtttttcttttttactgctttctttttaaacccccaagacgggctcgagaagtcttctgaaatgattttttaaagccgaatagaagacacaatcagacaccttccacaagcccttgacgggttttgtttgagtctgatttttgtgtgtgtgtgtgtgtgtgtatgatttttaaaaaccttttacatactttgttttgatctcctgaggctgggcctctgtcttcctgaagttttaggagagcctggagctactcagctaagactgaattttgaaactttctctttgggggtgaaagcaaagaactgtttttctttgctagccggacagataaatgctgtttatgaagatggacctgttgaactaccaatacttggacaagatgaacaacaatatcggcgttctgtgctatgaaggtgaagcttccctcaggggagaacccaggatgcagaccctcccggtggcctctgcgctcagcagtcaccgcacaggcccgcctcccatcagccccagcaagaggaaattcagcatggagcccggggacaaggacttggactgtgaaaacgaccacgtctccaagatgagccgcatcttcagcccccatttgaataagactgtcaacggagactgccgcagagatccccgggagcggagccgcagtcccattgaacgggctgcagcccccgccgtgagcttgcatggtggccacctgtacgcatctctccccagcctcatggagcagcctcttgccctgactaagaacagcagtgacacaggcaggtcagctgtggagcggcagcagaaccggccctctgtgattacctgtgcatccgcgggtgcccgcaactgcaacctctctcactgtcccatcgcacacagtggctgttctgcgcctgggtctgccagctaccggagaccacccagtgcaactgccacctgtgaccctgtggtggaagagcacttccgtcggagcctgggcaagaactacaaggagccagagccggcgcctaactcggtgtccatcactggctcagtggatgaccactttgccaaagcactaggtgacacatggcttcagatcaaagcagccaaggacagcgcatccagcagcccggagtcagcctcacgcaggggccagccagccagccccactgcccacatggtcagccatagtcactccccctctgtggtctcctgaagggggaaccacccttcgaccacacaggaatctgcatggtttgcctgagctttgaacagtcagtgcttaaaaaaacag

SEQ ID NO: 602 - protein, 287 aa, Mus musculus
MLFMKMDLLNYQYLDKMNNNIGVLCYEGEASLRGEPRMQTLPVASALSSHRTGPPPISPSKRKFSMEPGDKDLDCENDHVSKMSRIFSPHLNKTVNGDCRRDPRERSRSPIERAAAPAVSLHGGHLYASLPSLMEQPLALTKNSSDTGRSAVERQQNRPSVITCASAGARNCNLSHCPIAHSGCSAPGSASYRRPPSATATCDPVVEEHFRRSLGKNYKEPEPAPNSVSITGSVDDHFAKALGDTWLQIKAAKDSASSSPESASRRGQPASPTAHMVSHSHSPSVVS

SEQ ID NO: 603 - DNA, 1888 bp, Mus musculus
atggctcggagaagagccttccctgctttcgcgctccggctctggagcatcctaccttgcctgctcctgctgcgagcggatgcagggcagccacctgaggagagcttgtacctgtggatcgacgcccatcaggctagagtgctcataggaatggggcaaagtcttgtttatctgtccctggcctcagcgcaccgcctgctgtctcttcaaagagaggcgtgtccagcccgcggctgctgtgagcacagcacacagtgtagacacgtggcaaacagaagggaaaaatacttctacgagttcctgtctctgcgctccctggataaaggcatcatggcagatccaactgtcaatgtccctttgctgggaacagtgcctcacaaggcatcagttgttcaagttggtttcccgtgtctcggcaaacaagacggggtagcagcatttgaagtgaatgtgattgtcatgaattctgaaggcaacaccatccttaggacccctcagaatgccatcttctttaaaacatgtcaacaagctgagtgtcccggagggtgtcgaaatggaggcttttgtaacgaaaggcgggtctgcgagtgtccggatgggttctacgggcctcactgtgagaaagccctgtgcataccccgatgtatgaacggtggtctgtgtgtcactcctggcttctgcatctgcccccctggattctacggtgtcaactgtgacaaagcaaactgctcaaccacctgctttaatggagggacctgcttttacccgggaaaatgtatttgccctcctggactcgagggagagcagtgtgaactcagcaaatgcccccaaccctgccgaaatggaggtaaatgcattggtaaaagcaagtgtaagtgcccgaaaggttaccaaggagacctgtgctctaagcccgtctgcgagcctggctgtggtgcccacggaacctgccacgaacccaacaagtgccagtgtcgagagggctggcacggcagacactgcaataagaggtatggagccagcctcatgcatgccccgaggccagcaggcgccgggctggagcgacacacgccttcacttaaaaaggctgaggatagaagggatccacctgaatccaattacatctggtgaacccctaccccaccatctgaaacggttcaagttacaccgggttcacagcctttgttaacctttcgcgtgttggatgttcaaatgctgttcattacactttagaacgccggcctgaattttattagcttcattataaatcactgggctgatatctactcttccttttaggttttctaagcgtgtctagcatgatggtatagattttcttccttcagtccttttgggacagatcttatattgtgtcagttgatcaggttaaaaagaaaaaaaatatctgtcttttcagtgtgtagttgacagatacttgcaaaatcacaacacatttgtggtcttagaatggggagtgttagagaggttaaactgggcagagatgcataaattacaaggtttcggataaagccaatagcagcgtttaagctacagtatttccaattttattgtcaaatatttggacatctgtctaattaatacttcaattgcccccccccccatcttgaatgcatacaatctatttcacccttgctgttactctagacagttcagttttgatggggcgggggacaaagtttaaaaaaattacactgagttagcggcatttaaacaatataatatattgtaaacacgacgagataaggaatataatgtatgaagcctttgcattggatggaagcaatataatatattgtaaacaaaacacagctcttacatagtaaacgttttatactgtttgtatgtatgaaataaaggtgacgctttc

SEQ ID NO: 604 - protein, 376 aa, Mus musculus
MARRRAFPAFALRLWSILPCLLLLRADAGQPPEESLYLWIDAHQARVLIGMGQSLVYLSLASAHRLLSLQREACPARGCCEHSTQCRHVANRREKYFYEFLSLRSLDKGIMADPTVNVPLLGTVPHKASVVQVGFPCLGKQDGVAAFEVNVIVMNSEGNTILRTPQNAIFFKTCQQAECPGGCRNGGFCNERRVCECPDGFYGPHCEKALCIPRCMNGGLCVTPGFCICPPGFYGVNCDKANCSTTCFNGGTCFYPGKCICPPGLEGEQCELSKCPQPCRNGGKCIGKSKCKCPKGYQGDLCSKPVCEPGCGAHGTCHEPNKCQCREGWHGRHCNKRYGASLMHAPRPAGAGLERHTPSLKKAEDRRDPPESNYIW

SEQ ID NO: 605 - DNA, 1794 bp, Mus musculus
cagagcgttgcgagtctcgggaccccagtgggagagactatggcgctcaacaagaatcactcagagggcggcggagtgatcgtcaacaacactgagagcatcctaatgtcctatgatcatgtggagcttaccttcaacgacatgaagaatgtgccagaggccttcaaagggaccaagaaaggcaccgtctaccttactccgtaccgggtcatctttctgtctaaggggaaggacgccatgcagtccttcatgatgcccttttacctgatgaaggactgtgagattaagcagccggtgtttggtgcgaacttcattaagggaatagtgaaggctgaagcaggaggtggctgggaaggctccgcctcctacaagctgaccttcacagcagggggcgccattgagtttgggcagaggatgctccaggtggcatctcaagcctccagaggtgaagtccccaatggagcctatgggtacccttacatgcccagcggggcctatgtctttcccccgccagtcgccaatggaatgtacccctgccctcctggctacccctatccaccacccccacccgagttctatccaggacctcccatgatggatggggccatgggctatgtacagcccccaccaccaccctatcctgggcccatggagcctccggtcagcggccccagtgcccccgctactcctgcagccgaggccaaggctgcagaagccgctgccagtgcctattacaacccaggcaacccacacaatgtctacatgcccacgagccagcctccaccaccaccctactaccccccagaagacaagaagacccagtagaccctgcccacttcccgcctcttacccagagaccccttcctgggcctcccgtggggctgcatctgggattccaggaggccagggagggccctgttcttccccaggcctgagtataaagttagcaggagctagccctgatagaaaggtggaactcctggcctctgagaggcacgtcccagcttctcgccctagctcagctcacagcgctcttcttcccagcttccctttcaccatctctggagctcgcaggagcacggggtgaccctcgttcctcatgatactagcccccacccatacagagggactctctggccactcctcactgctgcccagccccttcagcctggtgaccattgttcttcatctcttgggctcctaagaccagccatgtgtctccccaacaggccctgccaaaccctgttcacattccttacccctggtgtgctcctggctctggaaggccgctgtcccagcagactgtcagtccagtcacacttacccggccaccttgttctttgtgagagcttccagggattttgctgggcgcttccagtggctggcatcagaggtgaagccactgtgttacagaggaagcccctctgcccctatgctactgtttctgggaattattcgcctcctctcctctcccctttacagggggctgctctgcaggagggatagagaatgcatgtctgtcccgccaggccctttgatctgggactgaggccttccaactatgtgacctctaacctgcagtctgcccctctgtaagcttcacgccccctggatgcactaagaattgctcttgttcgttcctggtccagacacaaaatgaggagatggttatttaaagagaattcctatttatttgacacaaaatgtccagttaatatattaatgtgaaataaaccctgtttgcaccttgatttgtttgctacaactgtgaaatagtaaaaacgaagtgactgg

SEQ ID NO: 606 - protein, 261 aa, Mus musculus
MALNKNHSEGGGVIVNNTESILMSYDHVELTFNDMKNVPEAFKGTKKGTVYLTPYRVIFLSKGKDAMQSFMMPFYLMKDCEIKQPVFGANFIKGIVKAEAGGGWEGSASYKLTFTAGGAIEFGQRMLQVASQASRGEVPNGAYGYPYMPSGAYVFPPPVANGMYPCPPGYPYPPPPPEFYPGPPMMDGAMGYVQPPPPPYPGPMEPPVSGPSAPATPAAEAKAAEAAASAYYNPGNPHNVYMPTSQPPPPPYYPPEDKKTQ

SEQ ID NO: 607 - DNA, 1787 bp, Mus musculus
cagagcgttgcgagtctcgggaccccagtgggagagactatggcgctcaacaagaatcactcagagggcggcggagtgatcgtcaacaacactgagagcatcctaatgtcctatgatcatgtggagcttaccttcaacgacatgaagaatgtgccagaggccttcaaagggaccaagaaaggcaccgtctaccttactccgtaccgggtcatctttctgtctaaggggaaggacgccatgcagtccttcatgatgcccttttacctgatgaaggactgtgagattaagcagccggtgtttggtgcgaacttcattaagggaatagtgaaggctgaagcaggaggtggctgggaaggctccgcctcctacaagctgaccttcacagcagggggcgccattgagtttgggcagaggatgctccaggtggcatctcaagcctccagaggtgaagtccccaatggagcctatgggtacccttacatgcccagcggggcctatgtctttcccccgccagtcgccaatggaatgtacccctgccctcctggctacccctatccaccacccccacccgagttctatccaggacctcccatgatggatggggccatgggctatgtacagcccccaccaccaccctatcctgggcccggagcctccggtcagcggccccagtgcccccgctactcctgcagccgaggccaaggctgcagaagccgctgccagtgcctattacaacccacccacacaatgtctacatgcccacgagccagcctccaccaccaccctactaccccccagaagacaagaagacccagtagaccctgcccacttcccgcctcttacccagagaccccttcctgggcctcccgtggggctgcatctgggattccaggaggccagggagggccctgttcttccccaggcctgagtataaagttagcaggagctagccctgatagaaaggtggaactcctggcctctgagaggcacgtcccagcttctcgccctagctcagctcacagcgctcttcttcccagcttccctttcaccatctctggagctcgcaggagcacggggtgaccctcgttcctcatgatactagcccccacccatacagagggactctctggccactcctcactgctgcccagccccttcagcctggtgaccattgttcttcatctcttgggctcctaagaccagccatgtgtctccccaacaggccctgccaaaccctgttcacattccttacccctggtgtgctcctggctctggaaggccgctgtcccagcagactgtcagtccagtcacacttacccggccaccttgttctttgtgagagcttccagggattttgctgggcgcttccagtggctggcatcagaggtgaagccactgtgttacagaggaagcccctctgcccctatgctactgtttctgggaattattcgcctcctctcctctcccctttacagggggctgctctgcaggagggatagagaatgcatgtctgtcccgccaggccctttgatctgggactgaggccttccaactatgtgacctctaacctgcagtctgcccctctgtaagcttcacgccccctggatgcactaagaattgctcttgttcgttcctggtccagacacaaaatgaggagatggttatttaaagagaattcctatttatttgacacaaaatgtccagttaatatattaatgtgaaataaaccctgtttgcaccttgatttgtttgctacaactgtgaaatagtaaaaacgaagtgactgg

SEQ ID NO: 608 - protein, 346 aa, Mus musculus
MALNKNHSEGGGVIVNNTESILMSYDHVELTFNDMKNVPEAFKGTKKGTVYLTPYRVIFLSKGKDAMQSFMMPFYLMKDCEIKQPVFGANFIKGIVKAEAGGGWEGSASYKLTFTAGGAIEFGQRMLQVASQASRGEVPNGAYGYPYMPSGAYVFPPPVANGMYPCPPGYPYPPPPPEFYPGPPMMDGAMGYVQPPPPPYPGPGASGQRPQCPRYSCSRGQGCRSRCQCLLQPTHTMSTCPRASLHHHPTTPQKTRRPSRPCPLPASYPETPSWASRGAASGIPGGQGGPCSSPGLSIKLAGASPDRKVELLASERHVPASRPSSAHSALLPSFPFTISGARRSTG

SEQ ID NO: 609 - DNA, 348 bp, Mus musculus
atggtgcggatttcaaagcccaagacgtttcaggcctacttggatgactgtcaccggaggtatagctgtgcccactgccgtgctcacctggccaaccacgacgacctcatctccaagtccttccagggcagtcagggacgtgcctacctcttcaactctgtagtgaatgtgggctgcgggccagcagaagagcgggtgctgctgacaggtcttcatgctgtcgctgacatccactgtgagaactgcaagaccactttgggctggaaatatgagcaagcctttgagagcagccagaagtacaaagaggggaaatacatcattgaactcaaccacatgatcaaagacaac

SEQ ID NO: 610 - protein, 116 aa, Mus musculus
MVRISKPKTFQAYLDDCHRRYSCAHCRAHLANHDDLISKSFQGSQGRAYLFNSVVNVGCGPAEERVLLTGLHAVADIHCENCKTTLGWKYEQAFESSQKYKEGKYIIELNHMIKDN

SEQ ID NO: 611 - DNA, 4247 bp, Mus musculus
actgaccatctgaaccctgcccatattctcgactctgcagtgactattcatctctcctggaacaatgcttgccacatagaggcacctgacagaaagatactggataagaggatgacttccctaacagtgaggcagctttcattagcaactcttacgaaggggagggcatgggggttgaccccctgtttacagtgccggcaccaccgccgccgattgccagcagtctcgcacctcagattccgccctcctactttcccccatcttcatccaatattgcagcaccagtcgaacagcttttggttcggactcggtccgtgggtgtcaatacgtgtgaagttggagtagtgacagagccagagtgtcttgggccctgtgaacctgggaccagtgtcaatttggaagggatcgtgtggcatgaaacagaagaagggtgtcctagtggtcaatgtcacatggaggaacaaaacctacgtggggaccctcctagactgcaccaagcacgactgggcccctccccgaggttttgcgaatcaccgacaagtgacctggaaatgcgagggggccggggcagagggaagagagcgaggtctgccgcggctgccccaggctccgaggtcagcttcaccgagtccagagggctgcagagcaagaacagagggggagccaatgggaaagggaggcgtggcagcctcaacgccagcggacgaaggacacccccaaactgtgctgcagaggacataaaagccagcccttcctcaaccaacaaaaggaagaacaagcccccaatggagttggatctgaactcgagctctgaggacagtaagcccgggaagcgagtgcgcacgaattccagaagcacgcctaccactcctcaggggaagccagagactacttttttggaccaaggctgctcctctccagtgttaattgattgtccccacccaaactgcaacaaaaaatataagcacataaacggcctgaggtaccaccaggcacatgcgcacttagacccggaaaacaaactagagttcgagccggatagcgaggacaagatctcagactgtgaggaagccttgagcaacgtggccctcgaatgcaacgagtcaagcacaagtgtgtcatcatacgatcagacgaaagcacctgggtcccccggggctgggaacccccctgggacacccaagggaaagagagagcacgtgagcaatggcccaggtcctattataggttcgaaaactggcaagaattctggcaagaagaggggccttaacaacgaactgaacaaccttccggtcatctccaacatgacggccgctttagacatttgttcagccacagacagcaatctaacggcggaaatgcccaaattggaagcggaaggactgattgacaagaaaagtttgggggataaagaaaagggcaaaaaagcaaacaattgcaaaatggacaaaaacctctccaaactgaaaagcgcccgccccattgcccccgcccctgcccctacgcccccacagctgattgctataccgactgcagccttcacatccaccaccacagggaccatacctggactgccctccctcacgaccactgtggtccaggctacaccaaagagccctccattgaaacctattcaaccaaagcccacaattatgggggagcccatcaccgtgaacccagctctggtgtcactcaaagacagaaagaaaaaggagaagcgaaagctcaaggacaaagaagggaaagagactggaggtcccaaaatggatgctaagctggggaagctggaggaagccaaggcggctagcaaggatttgtctgggcattttttaaaggaccatctcggtaagagcgaagggctggctaatggattgtcagagtctcaggagagccgcatggccagcatcaaagccgaggccgataaggtttacacattcacggacaatgcccccagcccttccatcgggagtgcctcacgcatggaatgcagtaccttggtgaatgggcaagcacccatggcaccactgcatgtattgacccagaatggggctgagagcgcagcagctaagaccagcagtccagcctattcggacatatcagatgctgcagatgatggcggttctgacagcaggtcagagggcatgaggtcaaaggccagttccccatcggataccttttctaacaaagacggtgttgtgaaagggcatccttcaacttcagcacagccatctcagctgaaagagtcccattctccctattaccatggctatgagccttactattctccgagttacatgcaccctggacaggttggtgccccggcagctgggaatggtgggagcacacagggcatgaagatcaagaaggagtcagaggaagatgcggagaagaaagacaaggcggaacagttggagtccaagaaagtagaccatacttctgcacccctgcagcctcagcaccagtcagtcatcacccagagacaccctgccctggctcagtcactttattacggccagtatgcctacgggctctatatggaccagaaatctctgatggctaccagccctgcctacagacagcagtatgagaagtactatgaggaccagagactggcagagcagaaaatggcccagagtgggagaggagactgtgaaagaaaggctgaactccccttgaaagaactgggcaaggaagacaataagcagaaaaacatgccatcagccactatctcaaaagctccctctaccccggagcctaacaaaaaccattctaaactagggccatcagtgcctaataaaactgaggagacaggtaaatcacagcttctctccagtcaccagcagcagcttcaggccgacagcttcaaagctaagcagatggaaaaccaccagcttattaaggaggctgtagaaatgaagtctgtcatggactctatgaagcagacaggtgtagacccaacctcgagatttaaacaagatccagagtcaaggacatggcaccattatgtataccagcccaagtacctggaccaacaaaagccagaagaacttgacagagaaaagaaattgaaagaggacagtccaaggaagactcctaacaaagagagtggcgtgtccagtctccccgtgtcattaacaaacatcaaagaggagcccaaagagggcaagcgtcctgattcccagtcggtggaggagaacaagctaaagaatgatgatcggaagacaccggtgaactggaaggactctcgggggacacgagtggccgtgtcctcacccatgagtcagcaccagtcctacatacaatacttgcatgcttatccttacccacagatgtatgaccccagccaccctgcataccgggctgtctctcctgtcttaatgcacagttaccctggggcctatctctctccaggatttcattatcctgtttatggaaagatgtctgggagagaagaggcagagaaagtcaatactagtcccagcatcaacacaaaaacagccagcgaagccaaagccctggacctactccaacatcacgccaaccaataccgcagcaagtcccctgctcctgtggagaaggcttccacggagcgagaacgggaagcagagcgggaacgggatcgccactcccccttcagccagcggcacctgcacacacaccaccacacccatgttggcatgggctaccctctcatccctggtcaatacgacccttttcaaggcttgacctctgctgccctagttgcctctcagcaggtggctgcccaggcatctgcttctggaatgtttcctgcacagagaagagaataacagaatcggaagtgtccggtgccatgtgactggatcacatggggaagcgctttatatagacatcagttccatggtgttaatttgaaatgccttaatggcaggcaaaaaaccagtcatttcattttgtaaattacagattttatcacagagtaacaaatgttgctgtaattaaacttctgttttatatatatgtatatatatacgtatacatatctgtatatatacatatatatatatacatatatatatatatattctttacttttttgtaacagtaaccaggctcgcacacacagggtctgctgccaagttgcaaaccactcagtaaaggaaattaaaaaagaaaaaaaaatgtatttgtcatgttgaaagtgttagccacaacaggctgcttacattcttttccttttaaattgtaaataaataatgttctgtatc

SEQ ID NO: 612 - protein, 1085 aa, Mus musculus
MRGGRGRGKRARSAAAAPGSEVSFTESRGLQSKNRGGANGKGRRGSLNASGRRTPPNCAAEDIKASPSSTNKRKNKPPMELDLNSSSEDSKPGKRVRTNSRSTPTTPQGKPETTFLDQGCSSPVLIDCPHPNCNKKYKHINGLRYHQAHAHLDPENKLEFEPDSEDKISDCEEALSNVALECNESSTSVSSYDQTKAPGSPGAGNPPGTPKGKREHVSNGPGPIIGSKTGKNSGKKRGLNNELNNLPVISNMTAALDICSATDSNLTAEMPKLEAEGLIDKKSLGDKEKGKKANNCKMDKNLSKLKSARPIAPAPAPTPPQLIAIPTAAFTSTTTGTIPGLPSLTTTVVQATPKSPPLKPIQPKPTIMGEPITVNPALVSLKDRKKKEKRKLKDKEGKETGGPKMDAKLGKLEEAKAASKDLSGHFLKDHLGKSEGLANGLSESQESRMASIKAEADKVYTFTDNAPSPSIGSASRMECSTLVNGQAPMAPLHVLTQNGAESAAAKTSSPAYSDISDAADDGGSDSRSEGMRSKASSPSDTFSNKDGVVKGHPSTSAQPSQLKESHSPYYHGYEPYYSPSYMHPGQVGAPAAGNGGSTQGMKIKKESEEDAEKKDKAEQLESKKVDHTSAPLQPQHQSVITQRHPALAQSLYYGQYAYGLYMDQKSLMATSPAYRQQYEKYYEDQRLAEQKMAQSGRGDCERKAELPLKELGKEDNKQKNMPSATISKAPSTPEPNKNHSKLGPSVPNKTEETGKSQLLSSHQQQLQADSFKAKQMENHQLIKEAVEMKSVMDSMKQTGVDPTSRFKQDPESRTWHHYVYQPKYLDQQKPEELDREKKLKEDSPRKTPNKESGVSSLPVSLTNIKEEPKEGKRPDSQSVEENKLKNDDRKTPVNWKDSRGTRVAVSSPMSQHQSYIQYLHAYPYPQMYDPSHPAYRAVSPVLMHSYPGAYLSPGFHYPVYGKMSGREEAEKVNTSPSINTKTASEAKALDLLQHHANQYRSKSPAPVEKASTEREREAERERDRHSPFSQRHLHTHHHTHVGMGYPLIPGQYDPFQGLTSAALVASQQVAAQASASGMFPAQRRE

SEQ ID NO: 613 - DNA, 5090 bp, Mus musculus
cctgtgcgtgtgttgtgtttcagttctgattccactgttccagaacaagcttggtgtgtgtatgtgtgcaccggggggatttctgtgttttggttttttttttgctttattttttttatttttataaaaaaatacacgggacggtctgtgacatttgctggtccatctttaataaaaaaaaaattgaagaaattataatttccaaaataaagaggctacaaccaaacacactcaatgcagttagaaggaaaaggtcaactcgctcccatacagaccggagaagctggacctcgagtgaaggaagtgagatccctggacacatttttgggggcaggaaaaagaagaggaaaattgcaaggaaaaaaaaatttttttttctttacgagaaaacccagaggagctaaacgaatgtcccctcatccctcaaagaaagttcatcgggtttttaatctcgagagctcatcttcaggatgtccgtgaacgtttcgactgcaggaaaaggtgtggatccaaatacagttgatacttatgacagtggcgatgattgggaaatcggggttggaaatttaatcattgatttggacgccgatttggaaaaggacagacaaaaatttgagatgaataattccaccaacaccactaccaacaccactaaggattgtggaggtccggcctccaatgggacctgttctacctcagccttagctgatggcctaaaatttgcttctgttcagccctccgctccccaggggaattcacacaaagaaaccagcaaatcaaaagtgaaaagggctaaaacttctaaggatgctaataaatctctgccttctgctgccttgtatggaattcccgagatcagcagcactggcaagaggcaggaagtccaagggcgccctggagaggctactggcatgaattcagcgctgggtcaaagtgtgagcggcggcggcagcagcaacccaaacagcaacggtaccagcaccgggacctcggctgccaccgcgggggcaggctcctgtgggaaaagcaaggaagagaagccagggaaaagccacagcagccgaggcgccaagcgggataaggatgctgcgagatcccggaaagagaaacacgacctgctgcagggccaccagaatggcggcggaggccaggccccctccggtggtcacctctatggctttgggaccaagagcaatggaagtggcgcgagcccctttcactgtgggggcgctgggagtggcagcgttggggctgcaggggaagttagcaaaactgctccggattcaacgctcatgggaaactctatgctggtcaagaaggaagaggaggaggaggagagccacaggcgaatcaagaaactgaaaactgagaagccaggtgtcctagtggtcaatgtcacatggaggaacaaaacctacgtggggaccctcctagactgcaccaagcacgactgggcccctccccggttttgcgaatcaccgacaagtgacctggaaatgcgagggggccggggcagagggaagagagcgaggtctgccgcggctgccccaggctccgaggtcagcttcaccgagtccagagggctgcagagcaagaacagagggggagccaatgggaaagggaggcgtggcagcctcaacgccagcggacgaaggacacccccaaactgtgctgcagaggacataaaagccagcccttcctcaaccaacaaaaggaagaacaagcccccaatggagttggatctgaactcgagctctgaggacagtaagcccgggaagcgagtgcgcacgaattccagaagcacgcctaccactcctcaggggaagccagagactacttttttggaccaaggctgctcctctccagtgttaattgattgtccccacccaaactgcaacaaaaaatataagcacataaacggcctgaggtaccaccaggcacatgcgcacttagacccggaaaacaaactagagttcgagccggatagcgaggacaagatctcagactgtgaggaagccttgagcaacgtggccctcgaatgcaacgagtcaagcacaagtgtgtcatcatacgatcagacgaaagcacctgggtcccccggggctgggaacccccctgggacacccaagggaaagagagagcacgtgagcaatggcccaggtcctattataggttcgaaaactggcaagaattctggcaagaagaggggccttaacaacgaactgaacaaccttccggtcatctccaacatgacggccgctttagacatttgttcagccacagacagcaatctaacggcggaaatgcccaaattggaagcggaaggactgattgacaagaaaagtttgggggataaagaaaagggcaaaaaagcaaacaattgcaaaatggacaaaaacctctccaaactgaaaagcgcccgccccattgcccccgcccctgcccctacgcccccacagctgattgctataccgactgcagccttcacatccaccaccacagggaccatacctggactgccctccctcacgaccactgtggtccaggctacaccaaagagccctccattgaaacctattcaaccaaagcccacaattatgggggagcccatcaccgtgaacccagctctggtgtcactcaaagacagaaagaaaaaggagaagcgaaagctcaaggacaaagaagggaaagagactggaggtcccaaaatggatgctaagctggggaagctggaggaagccaaggcggctagcaaggatttgtctgggcattttttaaaggaccatctcggtaagagcgaagggctggctaatggattgtcagagtctcaggagagccgcatggccagcatcaaagccgaggccgataaggtttacacattcacggacaatgcccccagcccttccatcgggagtgcctcacgcatggaatgcagtaccttggtgaatgggcaagcacccatggcaccactgcatgtattgacccagaatggggctgagagcgcagcagctaagaccagcagtccagcctattcggacatatcagatgctgcagatgatggcggttctgacagcaggtcagagggcatgaggtcaaaggccagttccccatcggataccttttctaacaaagacggtgttgtgaaagggcatccttcaacttcagcacagccatctcagctgaaagagtcccattctccctattaccatggctatgagccttactattctccgagttacatgcaccctggacaggttggtgccccggcagctgggaatggtgggagcacacagggcatgaagatcaagaaggagtcagaggaagatgcggagaagaaagacaaggcggaacagttggagtccaagaaagtagaccatacttctgcacccctgcagcctcagcaccagtcagtcatcacccagagacaccctgccctggctcagtcactttattacggccagtatgcctacgggctctatatggaccagaaatctctgatggctaccagccctgcctacagacagcagtatgagaagtactatgaggaccagagactggcagagcagaaaatggcccagagtgggagaggagactgtgaaagaaaggctgaactccccttgaaagaactgggcaaggaagacaataagcagaaaaacatgccatcagccactatctcaaaagctccctctaccccggagcctaacaaaaaccattctaaactagggccatcagtgcctaataaaactgaggagacaggtaaatcacagcttctctccagtcaccagcagcagcttcaggccgacagcttcaaagctaagcagatggaaaaccaccagcttattaaggaggctgtagaaatgaagtctgtcatggactctatgaagcagacaggtgtagacccaacctcgagatttaaacaagatccagagtcaaggacatggcaccattatgtataccagcccaagtacctggaccaacaaaagccagaagaacttgacagagaaaagaaattgaaagaggacagtccaaggaagactcctaacaaagagagtggcgtgtccagtctccccgtgtcattaacaaacatcaaagaggagcccaaagagggcaagcgtcctgattcccagtcggtggaggagaacaagctaaagaatgatgatcggaagacaccggtgaactggaaggactctcgggggacacgagtggccgtgtcctcacccatgagtcagcaccagtcctacatacaatacttgcatgcttatccttacccacagatgtatgaccccagccaccctgcataccgggctgtctctcctgtcttaatgcacagttaccctggggcctatctctctccaggatttcattatcctgtttatggaaagatgtctgggagagaagaggcagagaaagtcaatactagtcccagcatcaacacaaaaacagccagcgaagccaaagccctggacctactccaacatcacgccaaccaataccgcagcaagtcccctgctcctgtggagaaggcttccacggagcgagaacgggaagcagagcgggaacgggatcgccactcccccttcagccagcggcacctgcacacacaccaccacacccatgttggcatgggctaccctctcatccctggtcaatacgacccttttcaaggcttgacctctgctgccctagttgcctctcagcaggtggctgcccaggcatctgcttctggaatgtttcctgcacagagaagagaataacagaatcggaagtgtccggtgccatgtgactggatcacatggggaagcgctttatatagacatcagttccatggtgttaatttgaaatgccttaatggcaggcaaaaaaccagtcatttcattttgtaaattacagattttatcacagagtaacaaatgttgctgtaattaaacttctgttttatatatatgtatatatatacgtatacatatctgtatatatacatatatatatatacatatatatatatatattctttacttttttgtaacagtaaccaggctcgcacacacagggtctgctgccaagttgcaaaccactcagtaaaggaaatt

SEQ ID NO: 614 - protein, 1427 aa, Mus musculus
MSVNVSTAGKGVDPNTVDTYDSGDDWEIGVGNLIIDLDADLEKDRQKFEMNNSTNTTTNTTKDCGGPASNGTCSTSALADGLKFASVQPSAPQGNSHKETSKSKVKRAKTSKDANKSLPSAALYGIPEISSTGKRQEVQGRPGEATGMNSALGQSVSGGGSSNPNSNGTSTGTSAATAGAGSCGKSKEEKPGKSHSSRGAKRDKDAARSRKEKHDLLQGHQNGGGGQAPSGGHLYGFGTKSNGSGASPFHCGGAGSGSVGAAGEVSKTAPDSTLMGNSMLVKKEEEEEESHRRIKKLKTEKPGVLVVNVTWRNKTYVGTLLDCTKHDWAPPRFCESPTSDLEMRGGRGRGKRARSAAAAPGSEVSFTESRGLQSKNRGGANGKGRRGSLNASGRRTPPNCAAEDIKASPSSTNKRKNKPPMELDLNSSSEDSKPGKRVRTNSRSTPTTPQGKPETTFLDQGCSSPVLIDCPHPNCNKKYKHINGLRYHQAHAHLDPENKLEFEPDSEDKISDCEEALSNVALECNESSTSVSSYDQTKAPGSPGAGNPPGTPKGKREHVSNGPGPIIGSKTGKNSGKKRGLNNELNNLPVISNMTAALDICSATDSNLTAEMPKLEAEGLIDKKSLGDKEKGKKANNCKMDKNLSKLKSARPIAPAPAPTPPQLIAIPTAAFTSTTTGTIPGLPSLTTTVVQATPKSPPLKPIQPKPTIMGEPITVNPALVSLKDRKKKEKRKLKDKEGKETGGPKMDAKLGKLEEAKAASKDLSGHFLKDHLGKSEGLANGLSESQESRMASIKAEADKVYTFTDNAPSPSIGSASRMECSTLVNGQAPMAPLHVLTQNGAESAAAKTSSPAYSDISDAADDGGSDSRSEGMRSKASSPSDTFSNKDGVVKGHPSTSAQPSQLKESHSPYYHGYEPYYSPSYMHPGQVGAPAAGNGGSTQGMKIKKESEEDAEKKDKAEQLESKKVDHTSAPLQPQHQSVITQRHPALAQSLYYGQYAYGLYMDQKSLMATSPAYRQQYEKYYEDQRLAEQKMAQSGRGDCERKAELPLKELGKEDNKQKNMPSATISKAPSTPEPNKNHSKLGPSVPNKTEETGKSQLLSSHQQQLQADSFKAKQMENHQLIKEAVEMKSVMDSMKQTGVDPTSRFKQDPESRTWHHYVYQPKYLDQQKPEELDREKKLKEDSPRKTPNKESGVSSLPVSLTNIKEEPKEGKRPDSQSVEENKLKNDDRKTPVNWKDSRGTRVAVSSPMSQHQSYIQYLHAYPYPQMYDPSHPAYRAVSPVLMHSYPGAYLSPGFHYPVYGKMSGREEAEKVNTSPSINTKTASEAKALDLLQHHANQYRSKSPAPVEKASTEREREAERERDRHSPFSQRHLHTHHHTHVGMGYPLIPGQYDPFQGLTSAALVASQQVAAQASASGMFPAQRRE

SEQ ID NO: 615 - DNA, 564 bp, Mus musculus
aaactagagttcgagccggatagcgaggacaagatctcagactgtgaggaagccttgagcaacgtggccctcgaatgcaacgagtcaagcacaagtgtgtcatcatacgatcagacgaaagcacctgggtcccccggggctgggaacccccctgggacacccaagggaaagagagagcacgtgagcaatggcccaggtcctattataggttcgaaaactggcaagaattctggcaagaagaggggccttaacaacgaactgaacaaccttccggtcatctccaacatgacggccgctttagacatttgttcagccacagacagcaatctaacggcggaaatgcccaaattggaagcggaaggactgattgacaagaaaactattgctataccgactgcagccttcacatccaccaccacagggaccatacctggactgccctccctcacgaccactgtggtccaggctacaccaaagagccctccattgaaacctattcaaccaaagcccacaattatgggggagcccatcaccgtgaacccagctctggtgtcactcaaagac

SEQ ID NO: 616 - protein, 188 aa, Mus musculus
KLEFEPDSEDKISDCEEALSNVALECNESSTSVSSYDQTKAPGSPGAGNPPGTPKGKREHVSNGPGPIIGSKTGKNSGKKRGLNNELNNLPVISNMTAALDICSATDSNLTAEMPKLEAEGLIDKKTIAIPTAAFTSTTTGTIPGLPSLTTTVVQATPKSPPLKPIQPKPTIMGEPITVNPALVSLKD

SEQ ID NO: 617 - DNA, 3335 bp, Mus musculus
ggtatacaggctgagagctcctttggctccactccccctgtgcgtgtgttgtgtttcagttctgattccactgttccagaacaagcttggtgtgtgtatgtgtgcaccggggggatttctgtgttttggttttttttttgctttattttttttatttttataaaaaaatacacgggacggtctgtgacatttgctggtccatctttaataaaaaaaaaattgaagaaattataatttccaaaataaagaggctacaaccaaacacactcaatgcagttagaaggaaaaggtcaactcgctcccatacagaccgagaagctggacctcgagtgaaggaagtgagatccctggacacatttttgggggcaggaaaaagaagaggaaaattgcaaggaaaaaaaaatttttttttctttacgagaaaacccagaggagctaaacgaatgtcccctcatccctcaaagaaagttcatcgggtttttaatctcgagagctcatcttcaggatgtccgtgaacgtttcgactgcaggaaaaggtgtggatccaaatacagttgatacttatgacagtggcgatgattgggaaatcggggttggaaatttaatcattgatttggacgccgatttggaaaaggacagacaaaaatttgagatgaataattccaccaacaccactaccaacaccactaaggattgtggaggtccggcctccaatgggacctgttctacctcagccttagctgatggcctaaaatttgcttctgttcagccctccgctccccaggggaattcacacaaagaaaccagcaaatcaaaagtgaaaagggctaaaacttctaaggatgctaataaatctctgccttctgctgccttgtatggaattcccgagatcagcagcactggcaagaggcaggaagtccaagggcgccctggagaggctactggcatgaattcagcgctgggtcaaagtgtgagcggcggcggcagcagcaacccaaacagcaacggtaccagcaccgggacctcggctgccaccgcgggggcaggctcctgtgggaaaagcaaggaagagaagccagggaaaagccacagcagccgaggcgccaagcgggataaggatgctgcgagatcccggaaagagaaacacgacctgctgcagggccaccagaatggcggcggaggccaggccccctccggtggtcacctctatggctttgggaccaagagcaatggaagtggcgcgagcccctttcactgtgggggcgctgggagtggcagcgttggggctgcaggggaagttagcaaaactgctccggattcaacgctcatgggaaactctatgctggtcaagaaggaagaggaggaggaggagagccacaggcgaatcaagaaactgaaaactgagaaggttgaccccctgtttacagtgccggcaccaccgccgccgattgccagcagtctcgcacctcagattccgccctcctactttcccccatcttcatccaatattgcagcaccagtcgaacagcttttggttcggactcggtccgtgggtgtcaatacgtgtgaagttggagtagtgacagagccagagtgtcttgggccctgtgaacctgggaccagtgtcaatttggaagggatcgtgtggcatgaaacagaagaaggtaaatatgttttatttttatttatctccctctgccctcttctccatgatgtatctctgtccatctgtgaggggaatttattttccttgtggtttgagaggatagaaaggtgatttgtaggttctctgactcttgggttaaataatgatcctgtgttcctggttgcctttaccttaaagatgagccaaagccttaaaagaggcgtcttcatgctgagggctaacatggagagcctgtgagagctggggtcaggagcagctttctcctaaaaggtatcaaggagacatggctcaagttcctttcatttgtggtatgccagccaatttgtctgtctctgtgttgtggggtcttatatttatctacctccttacctccctactgaatcaaacagtgccccttgtgcatagccagggccgttgtcatgatgcagtcgaggctggttggtgctcagagctaataagctaaggttaaaggtttaaagcccagttgagccagccatctcttctgagtctccagacagaacctttcttgccccttaactcagcaagccatttggcaagtgcagcccattagtcaccagggaaacacggcccccgggaaactggatgcatctatcaccgccgttgggaatataagccaagagtaccagtcatgccgatagtccagatcgggtcaccatgtctcatagcacacggcgtacggtatttcaagtggcgtgcatcattaacaggtcagaagatactgaaaagcagctctcagagatggggagcagtctgcacaccgggttgtctcaagaggacccttggaaaatggacgtggggaacctttctcccctttcagctaggttggtcaagggtaaaagagatggatgacagctaccaatgcttgggtatctgtgagaagagttaggacaaagctgagtatgacatgaaggggctgagactccatcactagatgggtttgtctgaattaaggagggaaaaggaggaggcaaacttgaaggaagaagataggatacatgctacagagacctagaggcatccctctgagggctttattgctggaaagaagtagtagctctgactgtttcaagaaaaaaacgaagattggagacatctttgaattccactataacattatatgtatttttgtatgttttgtttcttgataaaaaatttaaaaacaaagattgtagctggtgctagtgatgaagaaaaacatattaactatacagtaaaagggagtgaaaatagctgtaggattagttcttgtttatttaaatagaagtgacacctaaactttgatttttagacttttttttccatcttctctatcgatgcattttagttttggtttgctggcagtctgaaaagccaattaatgcaatactgtgagaaaatagggctggaatgtgattggagagtagagaaatttaaacttttcttatcttgcctgtttgtttaaggcccacttccaagaccaaggggccagttatatggaattctgggagccgcccctcaggttgtccggttttcctccctagagttctcctgtagagcagatggcagagaacggattcaggttgatcctccctcttgtggaaagaaaattaagacacgaaaaacataacactaattaattagctatataaagattttcagcaacagaggg

SEQ ID NO: 618 - protein, 423 aa, Mus musculus
MSVNVSTAGKGVDPNTVDTYDSGDDWEIGVGNLIIDLDADLEKDRQKFEMNNSTNTTTNTTKDCGGPASNGTCSTSALADGLKFASVQPSAPQGNSHKETSKSKVKRAKTSKDANKSLPSAALYGIPEISSTGKRQEVQGRPGEATGMNSALGQSVSGGGSSNPNSNGTSTGTSAATAGAGSCGKSKEEKPGKSHSSRGAKRDKDAARSRKEKHDLLQGHQNGGGGQAPSGGHLYGFGTKSNGSGASPFHCGGAGSGSVGAAGEVSKTAPDSTLMGNSMLVKKEEEEEESHRRIKKLKTEKVDPLFTVPAPPPPIASSLAPQIPPSYFPPSSSNIAAPVEQLLVRTRSVGVNTCEVGVVTEPECLGPCEPGTSVNLEGIVWHETEEGKYVLFLFISLCPLLHDVSLSICEGNLFSLWFERIER

SEQ ID NO: 619 - DNA, 5397 bp, Mus musculus
ccgccgcagcccgagcagccgcctccgcctcaatcagtcagtcagtcagtccccagcaatggcggaaggaggtgagcgagaggagctgctttcgccgccgccgatctctccggccaagaggctgtgctcttggcccagcccgcaagctcaccacccccgcgggactcccggggcagccggcggaggggcggggggcggcggcggcggctgcctggcccccggggcccgcccccacctgcagccggagtccttgctggactgcgccgccaagacggtggcggaaaagtgggcgtacgagcgggtggaggagcgcttcgagcggatcccggagccggtgcagcgccgcatcgtctactggtccttcccgcggaatgagcgggagatctgcatgtactccagcttccagtaccggggcggcccgggagccggcgcggctgccggcgcggcgggggcttcgccggtcgaggaggggccgccgccaccccccggggccgccgctccggccggctccgcccccggggccgccggggcgggctcgtcccccgggctgggcgctgggactggaacggcgagcggcggctgcggcggcggcgaggggctgccgttccgccggggcatccgtctgctggacagcggctccgtggagaacgtgcttcaagtcggcttccatctgagtggcacagtcacggaaccagccatggcttctgagccagcagtgacttacaaggttgccatcagctttgatcgatgcaaaatcacgtctgtgagctgcggctgtgggaataaggacatattctactgtgctcacgtggtagcactctctctctaccggatccggaaaccagaccaggtcaaacttcgtcttcctatctcagaaacccttttccagatgaacagggaccagctacagaagtttattcagtatttaatcacagcacaccacactgaagttcttcctactgcacaaaagctggcagatgagattctgtcctccaactcagaaatcaaccaagtgaatggcgcccctgaccccacagctggggccagcatcgatgatgagaactgttggcacttggatgaagaacaagtgaaagaacaagtgaagctctttctctcccaggggggttactatggctctgggaagcagctcaactcaatgtttgccaaggttcgagagatgcttcgaatgagagattctaatggagccaggatgctgacacttatcactgagcaatttatggctgatccacgcctcacactctggaggcagcaaggaacaagcatgacagacaagtgcaggcagctctgggatgagctaggggctttatgggtgtgcataattttaaatccacactgcaaactagaagaaaaatcttgttggctccagcaactgcagaagtggagcgacctggatatctgtcccctggaggatggaaactatgggcatgagctgcccaacattaccaatgcgctctcccagagtgccagccacagcccagactctttatccagaccaagacgaacagtcttcactagagccattgaaggtcgtgagttgcattggcaggacagccacctacaacgaataatcagcagtgggatctatacagctcctgcctgccagcgggaaaatgagcgactactctttaattcccatggccagccactgtggcttgagcatgtgcctacagcctgtgctcgggttgatgcactgcgatctcatgggtatccaaaagaggctctcagactcacggtggccatcattaatactctgaggttgcagcagcagcggcagctagagatctacaaacatcagaagaaagagttgttgcagagaggaacgacaacaatcacaaacctggagggctgggtgggccatcccctggatcccattggctgcctgtttctcactttgactgaagcctgccgcctgaatgatgacagctacatggagatgtcagatatgaatgaaagcagacttcctgtgtaccagcatgtacctgtggcttcaggctgcccaaacagcaatgagtcgtacctgtcactggccctggaggttgctctgatgggcatgggacaacagagagtgatgcctgaaggcctctatgcacaggacaaggtgtgccgtaatgaggagcaactcctgagccaactccaggaactgcagctggatgatgagctagtccagaccctgcgcaaacagtgcatcttactgctggagggaggccccttcagcggcctcggagaagtcatccaccgggagagtgttcccatgcacacctttgcaaagtatctgttctcagctctgctgcctcatgatccagacctgtcttacaagttagccttacgcgccatgaggttacctgtgctagaaaactcgtcttccgcaggcgacacgtcccacccccatcacatggtgtctgtggtacccagccgctatcctcgctggttcacgctcggacacttagagtcacagcagtgtgaactggcctccaccatgctgactgctgccaaaggagacacgctgaggctacgaactcttctggaagcgatacagaagcacatccattctccctccctcatcttcaaactagctcaagatgcattcaagattgctactcccacggacagcagcacagacggcactctgctcaacgtggccctggagctggggttacaggtgatgcggatgaccttatcaacccttaattggaggcgccgagagatggttcgatggctggttacttgtgctacagaagtgggtgtgcgggccctggtgagcatcttgcagagctggtacacactcttcaccccgactgaggctacaagtattgtggctgccacagccgtatcccacaccactatcctgcgcctcagccttgactacccacagcgggaggaactggctagctgtgctcgcacactggccctacagtgtgctatgaaggatccacagagctgtgccttatcagctcttacactttgtgagaaagaccacattgcctttgaggcagcctaccagattgccattgatgctgctgccggtggcatgactcattcacagctgttcaccattgcccgctacatggagctccgtggctacccgctacgtgccttcaagctggcctcactagccatgagccatcttaacctggcctacaaccaggacacccatccagccatcaatgatgtgctctgggcttgtgctctcagccactctctgggcaagaatgaactggcagctctcatccccctggtggtgaagagtgtgcactgtgccacagtgctttctgatatcctgcgtcggtgcacagtgactgccccaggcctggcaggcatcccaggccgccgcagctccggaaagctcatgtcaacagacaaagccccactgcgccagctactggatgcaaccatcaatgcctacatcaacaccacacactcccgtctgacacacatcagtccccgccactatggagagttcattgagtttctgagcaaagctcgtgagaccttcctactgccccaggatggtcacttgcaatttgcccaattcattgacaacctcaaacagatatacaaaggcaagaagaagctgatgctgttggttcgggagcgctttggctgagaaagtggatcacttgctgctagggcagcctgagcttccaggtcaggacaaggactctgaaacatctgtctaccctgagaggactcagtaccacagacctaaggatgggaagagtctgacattcgccagtattcctgccttggcaagcttctcactccagctctacagttcctgaggagctggaccctgcagaccggtcagaagcccccccacaacatgtcacctcacgcccctatatcctgcgtgtcctggccattggccccactcccttggcaaacacagaacactgttccgtctcagggattgcttaaccagagaaaacagaagcatttatggtactgtaaatactatagtatatgtgtcgtcaagcattgtaaagctgtaactatttataattccgactctgatttgacgggcacttaaagtagctgtgggtgggagaataggcttgttttctgaggagactcacaaccatttctcaggtttcccgtacagagtatatgctgttggcagtggataagtgggggcggcagggagaaaaatggacagttaaaatccaagtcttatatgtcagaaactgtggcctgaagataggacacctagcctaatggtcattgaggggcagaggtcaagagtggcttagatatttgtctcacaacgttgtgaacacagaagctccggcctctgcctcacacactccaggagcctgatgaacacctgaataacaagtgcagggagaagacgaaggtccaggaagccgctgagcttacaagatacatctgctctggtcacctttatgttagagaatctgctctcatctccagtgtgtatgtgtgtatgaacatgtgtctgtgtacaaagatacacgtgtgcatgcctgtgtcagttctgttaattgtgtgacatgtgttagactgggtttcatttgtgagtgataacacatacctaagtgttaagtgtactcatgtcttcatgtttagtgtatgtgtgtatctaggctcacacgggtacctatgtgtaaacatgtttgtctctgaaggtatgcctgctgaccatgatgtgtctttatgcgagtggtctctacgtgtagtctgtcagtgtcttcacacttgaggctctgcatgagtgtgccttccgccaactctctcttgcccatccgtcccttagtctcttgctagctgagcactgttatgcatcctgtgcctcctctgtttaccttctctcagcaaacacgtttctaagcacgtgtccctctgctcttaagactggccacttttgctccatagttctttttttacacaaacgtgttttcttcctccaactctctacctcaaacttcctctgcctactctcatcataatctcattggtagctcactcggaggctgaggctggtattcctttagccttgcccttcctagtttctagttctagcggataagccccatcttagcccatgctgacctccacagtgtatcacgtttgtactacttcatgacccctatgcttagcctggaattataggaggtagcaagggcattcagaagactcagttggatacaggtgtcttcggtgtttactgttttgtcttagttcctgagttgggtggggtttgatagggaaggggtggtgtagttagagaatgaactgaggacctttctgtctgactgactttatttttctctttgaaacctacttgtcatcttttttattccaagctgaccagtaagttgtattcgctgttcgtggctactaataaatgtgttactgtcc

SEQ ID NO: 620 - protein, 1188 aa, Mus musculus
MAEGGEREELLSPPPISPAKRLCSWPSPQAHHPRGTPGAAGGGAGGGGGGCLAPGARPHLQPESLLDCAAKTVAEKWAYERVEERFERIPEPVQRRIVYWSFPRNEREICMYSSFQYRGGPGAGAAAGAAGASPVEEGPPPPPGAAAPAGSAPGAAGAGSSPGLGAGTGTASGGCGGGEGLPFRRGIRLLDSGSVENVLQVGFHLSGTVTEPAMASEPAVTYKVAISFDRCKITSVSCGCGNKDIFYCAHVVALSLYRIRKPDQVKLRLPISETLFQMNRDQLQKFIQYLITAHHTEVLPTAQKLADEILSSNSEINQVNGAPDPTAGASIDDENCWHLDEEQVKEQVKLFLSQGGYYGSGKQLNSMFAKVREMLRMRDSNGARMLTLITEQFMADPRLTLWRQQGTSMTDKCRQLWDELGALWVCIILNPHCKLEEKSCWLQQLQKWSDLDICPLEDGNYGHELPNITNALSQSASHSPDSLSRPRRTVFTRAIEGRELHWQDSHLQRIISSGIYTAPACQRENERLLFNSHGQPLWLEHVPTACARVDALRSHGYPKEALRLTVAIINTLRLQQQRQLEIYKHQKKELLQRGTTTITNLEGWVGHPLDPIGCLFLTLTEACRLNDDSYMEMSDMNESRLPVYQHVPVASGCPNSNESYLSLALEVALMGMGQQRVMPEGLYAQDKVCRNEEQLLSQLQELQLDDELVQTLRKQCILLLEGGPFSGLGEVIHRESVPMHTFAKYLFSALLPHDPDLSYKLALRAMRLPVLENSSSAGDTSHPHHMVSVVPSRYPRWFTLGHLESQQCELASTMLTAAKGDTLRLRTLLEAIQKHIHSPSLIFKLAQDAFKIATPTDSSTDGTLLNVALELGLQVMRMTLSTLNWRRREMVRWLVTCATEVGVRALVSILQSWYTLFTPTEATSIVAATAVSHTTILRLSLDYPQREELASCARTLALQCAMKDPQSCALSALTLCEKDHIAFEAAYQIAIDAAAGGMTHSQLFTIARYMELRGYPLRAFKLASLAMSHLNLAYNQDTHPAINDVLWACALSHSLGKNELAALIPLVVKSVHCATVLSDILRRCTVTAPGLAGIPGRRSSGKLMSTDKAPLRQLLDATINAYINTTHSRLTHISPRHYGEFIEFLSKARETFLLPQDGHLQFAQFIDNLKQIYKGKKKLMLLVRERFG

SEQ ID NO: 621 - DNA, 3131 bp, Mus musculus
gagccttgcaaacaagtgtctctggcagtgtccccgcggccctccggcggccctcgtcgcgctagggttgtcttctccggacagaaggaaccgaggaagccccgggagccgccaccgctaccgccgccaccaccctcggccttagccccgcgttaggggccgcggactcagctcggctgctcggctcgtggatgcggggtcgcagcgcgggcagcgccccggctcctacagagcagctcctgacagaagaacgcgcgtggctgtccccacccctgggaggggttgccggtgtcgcgagctgccgctcagtttgcagctctctctcctgggagaatccgtcaccgggaaagagtagaaaccacctggtcgaggcgcagaagtggctccggagggagccggcgtaaggtctgctgcctcgtgtccgctaagggcgcggcgatccgggatccgccggccggagcccaagcgcagccgggagcttgcgggtggcgaagccaggcgcaccgccttctgggtgtctgctgagcggttccccgcgtcccgcggggtcctgcagccccgaccccccggctggaagccacggagaaccgctgccgaggactgcggaccaacatcgtccctcccgaaagcggattctgctatgacagctgggctctccaaggggttaacctgggtgtcctccgtaaagttgtcgccgagccgggagcccgtttaggggtcgcagcgccgcggctcggggggcggccgagtggccggcggcggccgtggctcggcggaacccgcgcggccggggggcttctgggggtgtgcgcccccagccggctgccctcgtggatgcctcccggcggcggcgggcccatgaaagactgcgagtacagtcagatcagcacccacagctcctctcccatggagtcgccccacaagaagaagaaaatcgcggcccggaggaaatgggaggtgttcccaggaagaaacaagttcttttgcaacgggaggatcatgatggcccggcagaccggcgtcttctacctgactctcattctcatcctggtcactagtggactcttcttcgccttcgactgtcggtacctggcagagaagatcacccctgccatccccgtggtcggtggcatcctgttcttctttgtgatggggacactgcttcggaccagcttcagtgacccgggagtcctccctcgagccactcctgatgaagccgctgatctggaaaggcaaatagatatagccaacggcaccagttcaggggggtatcgcccgcctcccagaaccaaagaagtcgtcatcaatggccagaccgtgaaactaaagtactgttttacctgcaagattttccgcccccctcgagcctcccactgcagcctgtgtgataactgcgtagaacagtttgatcaccactgtccctgggtaggcaactgtgtggggaaaagaaactacagatttttttatatgtttattttatccctgtcctttctgacagtctttatatttgcattcgttatcacacacgtcatccatcgttcacagcaaaagggattcctcgatgcccttaaggacacccacgatccttctgttggtctccttgacttacccactgtgctagaggctgtaatatgcttcttctctgtctggtccatcattggcctttcaggtttccacacgtacctgatcagctccaaccagaccacaaacgaagacatcaaaggctcttggtccaataaaagaggtaaagaaaattacaatccctacagctatggaaacatcttcacaaattgctgtgtcgccctatgtgggcccatctctcccagcctaattgacagaagaggctatgtccagcccgacacaccacagccagcagcaccatcaaatgggatcactatgtatggggccacacagtcgcagagtgacatgtgcgaccaagaccagtgcattcagagcaccaaattcgttttgcaggccgcagccacgcccctgcttcagagcgagcccagcctcaccagcgaagagctgcatatgcctgggaaacccggcctgggcaccccatgtgctagcctgacgctgggccagcccacaccaccctcctccatgcccaaccttgccacggaggccacactctcagacattatgcccctgaaggatgagcatgggggccatcagtttctgaccccagatgaggcaccctcaccgccaaggatgctgggggcaggcagccctctagcacatagccgtaccatgcacatgttgggtctggccagccaggactccctgcacgaagactccgtgaggggcttggtaaagctcagctccgtgtgacctgcatggccagccctggggaccacaggtgacaaacaaaaacaaattactggacatagccaagaggacgttttgtttggaatctgcagagtggaccgggaagaggagactccctcaatgggaggagcctggaattgaaagaggcagcgtggatgcagcgtgcagcgccctctgtcggctgcttttgggacagacacgaggaaaattttcgacactggtggccagactgaaattggacctaatgttacagctactaattgaaatccacccgccgttccatttgttcattaaaacaaaacgaaacaaaagttccaaagggaaaagccggccagacatgggattgcatgccacactatagtctgtgttacagcagtggtattccagaagaaaagatgtctctctgttttccttctttttaatcttgtgatactttccaatgtgacagaccgaacccggtgggtaatgccatccttcgcgacttactggacttagctgtatgaggatgggcgtttcctgatgaagagggttactgggggcatcccctgttgcagacggcacctggggtctatcctgccctggacagacattttaaccctctgtcaatgctcagatggatgtcatattgtgccaccatggggcagtcctcgcctcctgtgtgacaatgaccttcctatggacagccaataaaatgactcctctgttattttcttgatctgtatacagttgtcaacagcttgcatgtagttacttacttgttcacattatctctggtaaggaataattcaaaacagccaaagttg

SEQ ID NO: 622 - protein, 498 aa, Mus musculus
MPPGGGGPMKDCEYSQISTHSSSPMESPHKKKKIAARRKWEVFPGRNKFFCNGRIMMARQTGVFYLTLILILVTSGLFFAFDCRYLAEKITPAIPVVGGILFFFVMGTLLRTSFSDPGVLPRATPDEAADLERQIDIANGTSSGGYRPPPRTKEVVINGQTVKLKYCFTCKIFRPPRASHCSLCDNCVEQFDHHCPWVGNCVGKRNYRFFYMFILSLSFLTVFIFAFVITHVIHRSQQKGFLDALKDTHDPSVGLLDLPTVLEAVICFFSVWSIIGLSGFHTYLISSNQTTNEDIKGSWSNKRGKENYNPYSYGNIFTNCCVALCGPISPSLIDRRGYVQPDTPQPAAPSNGITMYGATQSQSDMCDQDQCIQSTKFVLQAAATPLLQSEPSLTSEELHMPGKPGLGTPCASLTLGQPTPPSSMPNLATEATLSDIMPLKDEHGGHQFLTPDEAPSPPRMLGAGSPLAHSRTMHMLGLASQDSLHEDSVRGLVKLSSV

SEQ ID NO: 623 - DNA, 2196 bp, Mus musculus
acttcaacaagctgatgcgcaggaagtggctgagcagttcagaagctctggatggcatcgtgggcacactcggcgcccaggccctggccctgcgcagaatgcaggatgaaccgccaggttctggtggctgagctgcaccgacgggcgctggtggagtatgtgcggacactgctccgcgggcgcctgcgctgtcgctctgcgaggacccgcagccgtgtggcggggaggctccgcgaggacgcggcgctgcagcggttgtttcggcggctggagtcccaggcttattggcttgaccaagtggtgccacacttggcagagatcctacagttggaggacactccgagcatccaggtggaggtcggggtgctggtgcgggactacccagacatcaggcggaagcatgtggcagccctccttgacatcagaggtcttcgaaacacagctgcccgtcaggagatcctggcggtggcccgggacctggaactatctgaaagtggtgccctaccaccctctagggaccgtgccttctttgccgacatccctgtgccccgcacatctttctgtcttggcctccctctcctcttgggacgcctcccagtgtcccggctggccaggcccaatctggcttgtctgcccctgcggcctcgtcctccatcaccagttagagcccgagccgatcgctgaggcacccggtgcccatgttgctgctgatagaccctcctcccttccacgtgactccctgcctgagacaccgacttctgggataggaggttccttagataacccacccagcccggagcatcccctccagaagggaaactgaggccagaacgagcaaagagttcccccaaggctgccagggtcattccccgcaccctcctcccttgtatcccagcatggcatggcggggagccttctggaaggctttacagaaatatcctagccccacctcctttcccctcacctcaaggtctggccccaatccaacgtattaaggaatggtagatacttagaataaagaggtttctatttaacactaggaagggctgagtcccaagtgcaggggcgggaaaacagggcccagggccaagctctcttgcacacacccaaggccaccagggccggggtccaactcctagggaagccacaaatgaccagatactcctcagttgccgttgataccgagtccttgagctgcggttctgaggcctgcacttgtctgtcctgagccagataacgctgttttatccatcccggtgtctgatgttcttctaggtctgcttggcacagccctccccacccgtgcttagcgagtggggggaaaaccttggcgggagaggaaggagctggggggttgggctggcagcatccagggcgccctcctggattgatgcaggaaaatctcagggtgggaaattttccagcctctcaagccggagcccagccggatccaaatccccacagagtccttgaggtcacctccctgttgacctctgcccctccggcctcagctggacagctcgtgatggatgcttcctggcccgggttatgttttattttattttttccttaagaagtcagaaagaggaggcagccaggggtcagcacaggggccggggttggaacctcacgcaacgtcttgacattggtaacaacatggcggccctaggctctagactctgagcctccgggctgtgtgctgcagaggggaaggtgtcagtctctgtgctctgcttcctgctgtccctgggaagtggcttaacttctctttgcccagaggatgtccctcctccttccttgaccttctgaaagtgacacctctgtcattgatgagcaggagaggggaactgactgtgggcacttgcacaattccacatgtatttaatctcagcgtggccatgctctgtcattgtctgacttgctatccctgtcattcaaaagtcagcttgattgtcgggcttggcgacagcagggctgtgatcccagcagtcaggggctgaggcaaaataacagaagtgttagactagactggactacatctcaagaccccaccctacaaagtgtgtgggatcaggcggggaacggtgcctgccaccaagcctagcagactgagcctggtcccaggacccacatggtggaatcctaaatgtctcctgatctacacacccatgctaaataaaatggaataacaaatgc

SEQ ID NO: 624 - protein, 191 aa, Mus musculus
CSGCFGGWSPRLIGLTKWCHTWQRSYSWRTLRASRWRSGCWCGTTQTSGGSMWQPSLTSEVFETQLPVRRSWRWPGTWNYLKVVPYHPLGTVPSLPTSLCPAHLSVLASLSSWDASQCPGWPGPIWLVCPCGLVLHHQLEPEPIAEAPGAHVAADRPSSLPRDSLPETPTSGIGGSLDNPPSPEHPLQKGN

SEQ ID NO: 625 - DNA, 1377 bp, Mus musculus
agcccagactctaggcggcaggtcctgttctccacgctgtccctggtcatcgccagagccatgaagatgcacttctgcatcccggtgtcccagcagcggccagacgcgctggggggccgctacgtgttgtactccgtgtacctggacgggttcctcttctgcaaagtacgctacagccagctgcaccgctgggatgaacagctgagacgggtgtttggaaactgcctgccccctttcccacccaagtactacctggcaatgactactgctatggctgaagagaggagggaccagttggaacgctacctgcaaaatgtaactgcggatccccgtgtgacaaggagtgatgtcttcactgagtttttaacactggtgcagctgcacacattgaatatcaccatccagaatgtcgagctggctgtattcctgcctgatggaaggagcattaaagtagaaggtctaacatcagatacggctgaaagggtcctggaggtgatggcccacaaactcggattgcagccagatctggtgggctacttcggccttttccttatccagtgtttcccggagggcaagctctctgtggtgaagaagctggccgactttgagctgccttacactagtcttcagagttctgaaatggaaaactgtaagatcgggctcagaaagtggtacctggacccagctctggactccatgttgatggactgcagagcagctggagacttgctgtacatgcaggcagtgcaggacattgaaaaagaatggatgaaacccacacaggctcagagggaggaactaaaggcactgcagaagaaagagaatcaaacaaagtttttggagctgtcgcaggaggtccggcactatgggtatgttcagctggatccctgcacctgcaaccacccggaacctggctgtggggcccagctttccatcggcaataatgagatcagctgctgtataactttgcctaatggccagatccaggacattgctttccagatgagcagagtgaagtgctggcaggtcactttccttggaactctgctggataccgatgggccccagcgaactctcaaccagaacctagagctgagatttcagtatagtgaagatagttgccagcagtggtttgttatttacaccaaacaggcttttttcctgagcagctgcctgaagaagatgatctcagagaggatgacaaagctcactgagcagagcccagagatgcagatcgaggttccagaacaaggcagaagtaaaaagcacccgagccaacctagccaggtcttctattttaattttctgagaaaaggcaagatgaagagatccgaaggtgactatgtttgggataccctgatggaagaaggtctctga

SEQ ID NO: 626 - protein, 438 aa, Mus musculus
MKMHFCIPVSQQRPDALGGRYVLYSVYLDGFLFCKVRYSQLHRWDEQLRRVFGNCLPPFPPKYYLAMTTAMAEERRDQLERYLQNVTADPRVTRSDVFTEFLTLVQLHTLNITIQNVELAVFLPDGRSIKVEGLTSDTAERVLEVMAHKLGLQPDLVGYFGLFLIQCFPEGKLSVVKKLADFELPYTSLQSSEMENCKIGLRKWYLDPALDSMLMDCRAAGDLLYMQAVQDIEKEWMKPTQAQREELKALQKKENQTKFLELSQEVRHYGYVQLDPCTCNHPEPGCGAQLSIGNNEISCCITLPNGQIQDIAFQMSRVKCWQVTFLGTLLDTDGPQRTLNQNLELRFQYSEDSCQQWFVIYTKQAFFLSSCLKKMISERMTKLTEQSPEMQIEVPEQGRSKKHPSQPSQVFYFNFLRKGKMKRSEGDYVWDTLMEEGL

SEQ ID NO: 627 - DNA, 2311 bp, Mus musculus
aagagctcccaattgcaggcaactgcagtgtccagcacccaccatgaggcctctggtcctgctatggggctgcctggtgctcccaggttatgaagccctgaagggtccaaaggagatcagtggatttgaaggtgacaccgtgtccctgcggtgtacctacgtggagaagatgaaggagcacaggaagtattggtgccggcagggtggcatcctggtgtcacgctgcggtgacattgtctacgcaaatcaggaccaggaggtgactcgaggcaggatgtccatccgagacagtccccaagagctctcgatgaccgtgatcatgagggaccttaccctgaaggattcagggaagtactggtgtgggattgacagactgggccgcgatgagtcttttgaggttacactcattgtctttccagggagctcccgtccagtcgtctggctgccccttaccacgccacaggactccagggctgtagccagcagtgtctccaagcccagtgtgtccatcccgatggtccgcatgatggccccagtcctgatactcttgtccctgctgttggctgcaggactaattgcctttggcagccacatgctccggtggagaaagaaagcttggctggccacagagacacagaagaacgagaaggtctaccttgaaacctcgctgccagggaacggctggaccactgaagactcgacgatagaccttgcagtgactcctgaatgtctcagaaacctcaacccttctgctgtgccctctcctgagacacagaacctcagtcagtctacagaggaggaagaggcagctcgttccctggacgacgacaaggaggacgtgatggcaccccctcccttgcagatgtctgcggaggaactggccttctctgagttcatctctgtgtaattgcagaatgccccgtggtcggccagggattgtgaagctgaacagctgagttctcatgaattcttgggttctactcacagtccacggctctgtccaccttccttccggctctctttcatgccccagatggagaagtgtcttggtccctgaagcccggatggtacttaacaagtccagccagaggctggaacctcccgcatattctaatccctgggaagagttaatgggtgtgtgggccttcatcggggcctggccaggctccatggataaaggctgagtttgtgtgcgttccaggaaattccctgggcatggatgcccagcaacagtcccacctcccatcctcggaagatcccaccttcacctccctctaattcttctgcatcaattgctatggaggagacaacatatgtgtgtctatgaaacacctgcatcctggcctcttagaaaataattaaaacaaaattctgcagacccatcaagactcaccaaaccatctctagggcagggcctgggactccacagttctgacaagtgaccctgccattcctacccttgggtctgatgaatcctcagcccattttagctagaatcttccttccttccttccttccttccttccttccttccttcctttccttcctttccttcctttccttcctttccttactttccttcctttcttcgttccttccttccttccctgtggggtttcctatatgcttcctagacctagatcatgacagtacggtcccagtaggcacttcctgatgcctctctggtcaggcacactatggtgacagccagcccaaggcagccagggatcagctgtctctccatcctccttccccaaggccctgtgtcccttgctttggtaggacactggaggaagtctcgatatcattcctgtccagagtggttactcctccatggggtctggaggctgagggagaggaggaggaggaggataccagagtgggaaggggggcggggaaacagaagacactagactctagttactagaggagaatactaaatccagtactgttgagtgagggaaagatggactggctcaactattttttttcctttttctattttgttttgaaaagtaagatgttgggaagggaggtgttcagaatataaaacagaaatgtagggagaatacaaaagaagtgctgtttctaggatcatatataacctcaccaaaccttgttgacggctctgcctgagcttgcaggacccccctcctttcccctccccttccagtatttgcagatgctccgtttacagaggggtcctctcaccatgcacagcccactacgcatcacacgctgtctcgtcataagcatccctccgtgttctacgaactttgtacaataaactttctcagctgtgtagtatttc

SEQ ID NO: 628 - protein, 287 aa, Mus musculus
MRPLVLLWGCLVLPGYEALKGPKEISGFEGDTVSLRCTYVEKMKEHRKYWCRQGGILVSRCGDIVYANQDQEVTRGRMSIRDSPQELSMTVIMRDLTLKDSGKYWCGIDRLGRDESFEVTLIVFPGSSRPVVWLPLTTPQDSRAVASSVSKPSVSIPMVRMMAPVLILLSLLLAAGLIAFGSHMLRWRKKAWLATETQKNEKVYLETSLPGNGWTTEDSTIDLAVTPECLRNLNPSAVPSPETQNLSQSTEEEEAARSLDDDKEDVMAPPPLQMSAEELAFSEFISV

SEQ ID NO: 629 - DNA, 3753 bp, Mus musculus
ggggtgacgtagctcagttgcaacgtgctttaagtctgggtctgcactccggtcccatgtacggtgtgacactgaccgctgtgttccgtgtagtcgaaccttctgtgctttcgggagcgggacgcggaggtggggtcccgtgggaactgctcggggcgcggagggaagagcgacaggagcgcatgacggcaggactgcgcggctgaaaaaggctgctctcggggactgtgagccgggacgtagcccggcatcccgtggaaccctgtccggtctcgccatgctcggggcccggcgcctgctcggcgcgctgcgcctctgttcctccgtttcctgccccaggccccgcgcgtctgccaaaatgcgcgtgcgggacgccctcagggtccaggacgcgagaggggagtgcgtaacggtgcagggatggatccggtccgtcagatcccagaaggaagttttgttcctgcatgtaaatgacggatcttctttggaaagccttcagattgttgcggattcaagcttcgacagtagagaattgacttttgggagttctgtgcaagtccaagggcagctggtcaaaagtcagtccaagaggcaaaatgtggaactgaaggcagaaaagattgaggttattggagactgtgaagccaaggcattccctataaagtataaggagcgacaccctctggagtacctgagacagtatcctcacctgaggtgcaggactaatgctctgggttctatattgagggtccgcagtgaagccacagctgctattcattcctactttaaggacaatggctttgtgcacattcataccccagtactcacatccaacgactgtgagggggccggagagctttttcaagtggagccttcaagcaaaataaagggacccaaggagagtttctttgatgttcctgctttcttaactgtctcaggacaacttcacctagaagtgatgtcaggagcttttacccaagtatttacctttggtccaacattccgagctgagaattctcagagccggagacacctggctgaattttatatggttgaagcggagatttcttttgttgaaagccttcaggatctcatgcaggtcatggaggaactcttcaaggcgaccacggagatggttctctcacactgtcctgaagatgttgaattgtgtcaccagttcatagctgctggccagaagggcagactagaacatatgctaaaaaacaacttcctaatcatttcttatacggaggcaattgagatcttaaagcaagcatcccagaacttcgcctttacacccaagtggggtgttgatctacaaacggaacatgagaagtacctggtgagacactgtggcaacataccagtctttgtcattaattatccatcagaactcaagcccttctacatgagggagaatgaagatggtcctcagaatacagttgctgctgtagatcttctggttcctggagttggggagctctttggaggtagcctcagggaggaacggtaccacgtcctagagcagcgactagcaagatcaggacttacgaaagcctaccagtggtacctggatcttcgcaagtttggatctgtgccccatggaggcttcgggatgggatttgaacgctacttacagtgcatcctaggagttgacaatatcaaagatgttatcccttttccaaggtttactcattcgtgtcttttgtagctgaaagactgtttaatggaaagtgctccatcacctcatctacacatgagtatgtgtagaaaagactgggtgtttgcagtctggaaatgtggatttcagtgcacaattcttgtgctttgagatgtactatatgaaaaatagaaatggtcttgatcatcttaagtcaaaggcttttcatggacagataaactcccccaaggagaaatactaagagcaagtggactttcaaatctgttacctcaattaggactgggcatgttgtccagctagtggagaagccggttcaggagagtaacttgagcccggataacatctcaagaaagaggaaaggaagatatggaagtgtaggatctcagcgttcctcagggactctgacttgatagccatgtctcaccctgctttgcctttcattggtagctcatttccccttgttgtttgttttttaacaactagtgactaaaaataaggtgatgttgacccttttcttccttgccatttaaacttacatgacaccaatcttattctctgtgctttactcaactttatagaagaaaatattccttttcagagtctaaattgactaatgaagtggctattctgaattgaaccattcatcattgggtggtgaaaaaaaatcacatttaataactgttgatctttagttttaaaagttaaagagctaaaattaaccatttaaacttgtcaatcattgttctagttcatttatattagatgtttgtaaatattctaatagtcattaaaattcttttaagttaaaacctatgaaagaagttatttttaaattcctcttgatcctttcccagtggaatttggaagaaaggtatctttaatggaaggtggtgttggaaatgtggccaaacctacgcaatgggtaattttagaatatggtgtggcctgatagaatgtgaccagtgccccttagagtgctcaagacctgacattccagcaccttggacaaaagcaattactttgtataaactaaaacatcatttccacagaggtcttacagcgccgggacacgcctgtatttgcgtgtgtatttaaaaccacacttgaactagaaatgcagttcagaggtaagagcatttggctagcacacttggggctctgggtttgatccttatgtgggtaggaggggggtgtcacacttttaaaaactcttgacttgttttagtctttttaccaggcttcatttatggagaactattgttggttgtttattcagttgaatttatatgtatcaaataattataaaatgtcatgcatacctaaaataattttcaaagtttcattagatactcttgcaggttaattactttttaatttaattttatgtatctggttgttttctctacatacatgtatgtacaccagttacatgcctggcaccacccacagagactgaaagggggcatccgatcccctggaatttgtagttagagatggttgtgagctgctgtgtgtttgctgggaatagaacctggctcctctggaagaccagccagtcctcttaactgctgaaccatctccccagccctcttaggttaattctgtatagccctgactgtcctggaactttctaagtagaccaaactgcccttgacctcagttgggcacaaccaggcctggccctccctttggttagtttttaaccagtttaggttgtgtttcttagcctaattcaaagttaacatctgaagagtaaacttcagaacctcagggttaaaagacacctaagaggttgactgggttgtcctgcctaatgcagagagcacctcctgcctgggccatgtgtttggggattttttggttgttgttattgttttttgtttgaaaagatttttttcttgaaaagattttcattccactgctgaatctttataatcaggataattgctaaggtaaagtcccagccccagtctactttcccttgcatgctaagtttagggaccaatgagagggataatgggctttcatcggactcactgcagccgtgattaaagaagtccatttgtgtattc

SEQ ID NO: 630 - protein, 477 aa, Mus musculus
MLGARRLLGALRLCSSVSCPRPRASAKMRVRDALRVQDARGECVTVQGWIRSVRSQKEVLFLHVNDGSSLESLQIVADSSFDSRELTFGSSVQVQGQLVKSQSKRQNVELKAEKIEVIGDCEAKAFPIKYKERHPLEYLRQYPHLRCRTNALGSILRVRSEATAAIHSYFKDNGFVHIHTPVLTSNDCEGAGELFQVEPSSKIKGPKESFFDVPAFLTVSGQLHLEVMSGAFTQVFTFGPTFRAENSQSRRHLAEFYMVEAEISFVESLQDLMQVMEELFKATTEMVLSHCPEDVELCHQFIAAGQKGRLEHMLKNNFLIISYTEAIEILKQASQNFAFTPKWGVDLQTEHEKYLVRHCGNIPVFVINYPSELKPFYMRENEDGPQNTVAAVDLLVPGVGELFGGSLREERYHVLEQRLARSGLTKAYQWYLDLRKFGSVPHGGFGMGFERYLQCILGVDNIKDVIPFPRFTHSCLL

SEQ ID NO: 631 - DNA, 2807 bp, Mus musculus
gcgcttccctccctccggggctgggcctgtcccggccgtcccggagtctctgtcccgccgcgccgttagctgtctgtgtcttggccaccgcctccaggcagtccgcagcaagccagcttcttggtccgacgagctcagcgccctctcaccgcgatgctgtgcttcctcaggggaatggctttcgtccccttcctcctggtgacttggtcgtccgcagccttcatcatctcctacgtggtcgcggtgctctctgggcacgtcaacccctttctcccctatatcagtgacacaggaacaactcctccagagagtggtatttttggattcatgataaacttctctgcatttcttggcgcagctacgatgtacacaagatacaagatagtggagaagcagaatgagacctgctacttcagcactcccgtttttaacttggtgtccttggcgcttggattggtgggatgcatcggaatgggcatcgtagccaacttccaggagttagccgtgcctgtggtccatgatggcggtgcgcttctggctttcgtctgcggggtggtgtacacgctcctgcaatcgatcatctcctacaaatcctgtccccagtggaacagtctcaccacgtgccatgtcaggatggccatctccgctgtttcgtgcgcagctgtcgtccccatgattgcctgtgcttcactcatttctataaccaagctggaatggaatccaaaagaaaaggattatatatatcacgtggtgagcgccatctgtgagtggaccgtggcttttggttttattttctatttcctaacattcatccaagatttccagagtgtcactctaaggatatccacagaaatcaatgacgacttttgaaagatcgagaatcctgtctcattcagggagtgtcgcagacagtttctggaagtggacagaggacggacgggcttggatgtcaccctgatggggactttatctgtggcacatccgggacttgaatttcattaagagttcctagtagttcaatttacaaaggtatgtttccctggaggatggatagcaccaacgacactgtagcaatatttttatattttctaaaacaatcttttatgaacaaattcatatgcaaagaagacgaggcattgcagaaaggggaggattattcttgtatagattctttagactttttatgtaataatgatttatgaaaatacactaagagaaaaaaatgttaagtttagtactttttattaaagaagccaaatcagggcatattcactttaaaatttcattttttaaatacagtgacctgcatacattttcatcacaagagcacttatacaattcaattcatagtgattatataccctaatggtatagatttaggtaataaacgaacactttaaagcactctgaattttcagtgcattaaacaaatgcttttatagtgaaggactcaaaaccatttacagtgcacattaaccagcgaatgtggaagacctcggttcgaaaatttagccccctcatttacttctccaagggacccacagctttactgccgctgttaatggtgggcccgggaactaattccaggtaggatgggctcatcaggccagcttagaaatgatcaaactgcccttctctgtgaccgggcagcacaagttcaattcacttctcagtttccctgtaagccaaagagaatgcagatccaagtcagggagaaaggagagcgctcatagaaacttccagatgtgggctgctgtttatctgctcctatcaatgcctgtgggccactataagggagtcaggccctttccgaagcaaggcctggagactctacctttcatgcagttcaccaatggcaaagaaacgccagctgttgtggaggaagaagtggataacaagaccccccagtctgggccagtaggagctgccccaagggcacgttccaaggacagagaccatttggacagccttagtgaaagggtacctggcgatgaaggggcacacagcagtgcctcctttggctgctaagtgaagggtgctgctcagcaggcacttctgccatgacatcctgtgtcttcttcctcagtgtgcagtggtggcaaccaacgtccatttctgagtcccctgtaacttttcacagtaccgaacatgcccattgtaacactggaacagaaagacagtggctgtcattctgatgagtgagagaggagtcgatacatttcctgtggaagctggggcggactgaatgcatgctgttctttgctttgagcgggagccttggttgatgccttcccagaatgcacttggctctcttcgcttccactggagacccgaccacgtgcctttacccatagtggaacacagtgccttgtggcatgcaataggtgcttaataaatactcattgaatgtatgcacgcataaatggatgaacaagtaacgactagggatgtttgaggtgctaagggttttttttactctagttcacgggtattctaaggtcaacagctagtctgtgccaattagtaatgttgtctgttttgctttgtgaactattctcgtttccacctgttccagctgtgtgagcttcatgattgtgtgacaactctctcctggacagatagcacagaaattgttacatgggctaaacctgtcttggcaaaccgaggaggcccccaaatcacactctgcagattccatgcgacttctagttttatccctgttttggtgttatttttaatttctacaaatatgtatttccttggactttgtacccgagaaagtaaaataaaatatttctttattttag

SEQ ID NO: 632 - protein, 266 aa, Mus musculus
LSVSWPPPPGSPQQASFLVRRAQRPLTAMLCFLRGMAFVPFLLVTWSSAAFIISYVVAVLSGHVNPFLPYISDTGTTPPESGIFGFMINFSAFLGAATMYTRYKIVEKQNETCYFSTPVFNLVSLALGLVGCIGMGIVANFQELAVPVVHDGGALLAFVCGVVYTLLQSIISYKSCPQWNSLTTCHVRMAISAVSCAAVVPMIACASLISITKLEWNPKEKDYIYHVVSAICEWTVAFGFIFYFLTFIQDFQSVTLRISTEINDDF

SEQ ID NO: 633 - DNA, 4532 bp, Mus musculus
aaactacatccagcagcaggatcagagggcagctcatttttttttcccagcatggacccatctgcgtgggccatctgctgcctcctggggagccttctgttccatgtgggcatccccagccctggtcccagccccagtgtgcctcgtctgcggctctcctacagagatctcctgtctaccaaccgctctgccatctttctgggcccacggggttccctagacctccaagtcatgtacctggatgagtatcgagatcgcctctttctgggaagccgagatgccctttactctctgagactggatcaggcatggccagacccccgggaggtcttgtggctgccacagccaggacagaaggtggaatgtgtccgcaagggaaaagaccctttgacggagtgtgccaacttcgtgcgggtcttacaaccccataaccggacccatctgctggcctgtggcacaggagccttccaacccatctgcaccttcatcacagtggggcatcgaggggagcatgtgctccgcttggatgctagcagcgtcgagaatggaagggggcgttgcccacatgagcccagccgacccttcgccagcacctttgtaggtggggagctatacacaggtctcactgccgatttcctgggacgtgaggccatgattttccggagtgggggtccccgaccagccctgcgttctgactctgaccagagcctcctacatgaaccccggtttgtgatggctgctcggatcccagataactctgaccgggacgacgacaaggtgtacttcttcttctccgagactgtcccgtcaccagatggtggcccaggtcatgtcaccatcagccgagtgggccgcgtctgtgtgaatgatgctggtggccagcgggtgctggtgaacaaatggagcactttcctcaaggcccggctggtgtgctctgtgcctggcccgggtggggctgagactcactttgaccagctagaggatgtgttcctgctgtggcccaaggccgggaagagcctcgaggtgtatgcgctgttcagcactgtcagtgctgtgttccagggctttgctgtctgtgtgtaccacatggtagacatctgggaggtcttcaatgggccctttgcccaccgagatggccctcagcatcagtggggaccctatgggggcaaggtgcccttccctcgccccggtgtgtgtcctagcaagatgaccgcacagccaggccgaccctttggcagcaccaaggactacccagacgaggtgttgcagtttgtccgagaccacccactcatgttccagcctgtgaggcctcggcgtggccgccctgtcctggtcaaaactcacttggctcagcgactgcgccagattgtggtggatcgagtggaggctgaggatgggacctatgatgtcatcttcctagggactgattcgggttctgtgctcaaagtcattgccctccagggtggtggcttgactgaacctgaagaggtggttttggaggagctccaggtgtttaaggtgccaacgcccatcactgagatggagatctctgtcaaaaggcaaacgctgtatgtgggctctccactgggtgtggcccggctgcagctgcaccagtgtgagacttacggcagtgcctgtgctgagtgctgcctggcccgggacccatactgtgcttgggatggcactgcctgtgcccgctaccgccccagctctggcaagcgcaggttccgtcggcaggacatacgccatggcaaccctgctgtgcagtgtctgggccagggccagagccaaaacacttcggggctcatgaccagagtctttggcacagagcacaacagcaccttccttgagtgcctgcccaagtctcctcaggctgcagtgcgctggttcttacaaaggccaggggataaggggactgaccaggtgaagacagatgagagagttgtgcagacggcccaagggctgctgttccgaaggctcagccgccatgacgcaggaaactacacttgcaccactctggaacatggcttctcccagaccgtggtccgttttgccctggaggtgattgcagctgtgcaactggacagcctgttccttcgggagtcaaggctagaggagccctcagcctggggaagcctggcctctgcctcccccaagacttggtataaggacatccttcagctcacgggcttcgccaacctgccccgtgtggatgagtactgtgaacgtgtatggtgcaggggtgtcggggagcgctcaggctccttccgcggaaagggaaagcaagcgaagggcaagagctgggcagggctggaactgggcaagaagatgaagagcagggtgctggctgagcacaatcggacaccccgggaggtagaagccacatagaagatgactgaggagcaggtggtcgggctgggctgggggactcaacggtatctctctcccacccagctaggaaagaggagtccagaactcctgattgattacctcttagaggaaatctccaccacctacaggaaagactaggggttggtgggaggagccttgcacctcagcctacccctgcctttctccgagttctcagtcccgggctggaactggcacctccagaccacttgtagtcccaaggggcctgctatttgttctcagagatggtgtggcttccggagcacatttccggttgtgcccagaggcaaggcgggtggttctttcccagcttgctgaacaatggccattctgagtgaccctctgagtgggtgtatgggtggctctaagggagtatatattgtcagtccaccagaggaggggaaagtagattcctaaggtagaacctgataagaaacacttgccccacagaggtgtgagagaaggtggaggcgctgaggaggtggggttgtgctgtttatctgtctccatgctttggaatctagatgattccctgcctcagctccctcccatctcctactcacagaggcaggaactgctgggacctggaggttgcctgggcctggcccttgccccctttttaaacttggaagagttgtctcacaatatgataccctttcccaggtcccacattgtcaggccaggcttgctggggtgctcacacctcaccatcagagtgtcttcctgggaccaggggaaggttctgtggaccagaaagaggaagtggggagctggagggtaggagtgcctcgaaggatgggctacctttccgagggtgaggcgggcatgctcaggccggtgaggttagcaacggacactctgaaaaccagcagccagtggtgaggatcggcctcctgggctttgtctagggccacgaggaactagagagaggtgagaccatgggtccatgggtccatgagcaggtgtcctcaagagccaaggtgacattagttggttcaggagcccctgggcaggccagatacttccaatgctagagtctctactgagggtggtcatgacagttcgtttacaagactcccatggttttttgtggtacttgggattgaatctagggtctcatgcatgctggataaatgctctaccactgagtgaaagcccagctctctctctatgggagaacagaaagctggtatggtaaatcctgctgttctgggggtgggggtggggctgagtgacaagggctggggagaagcttggccatcagcagtttctgcagctggggagcagagagggggaggaggacaattaaatgaaaagttattcccagcccgagggtgaagaagttagtgacgcacgggacagacaagagggcatgtctgagttccctcctttgaatagggaaaaaaaagggtggaggagggatgggggttggagagggagggagatgaaaaaacaagaaagagcttttgctgtactgaacttcaaacccgaagactttgggtttatttcctctaccctggcacccccagggtgctgagatctgaacttgcaccatttgcttatctggaggacagaagccctgaactctacctgcccaaacccagcttccttctgtttgtgggcatggtcccttgggatactggtagataaaagaagacgagagaggagtgggtaaaagctggaggagagttggggagacagaggagaggaaaggggtggaggaaaccctgagaattcagaaagtggcaacctagcccccccagtggcatttggacagagtctaggtttggcaagctctgggcagggtcctctggggaaatggccctggaaaacacaggaaaaaggaactcggtatcctaaacagtgcacccctatacctggaaacataggacagctcttgcccactgccaccttgcccacggtactgtactacgaacaccctgaaaacgcccacatgtgtgaactgtgtctgttttcaaatgggccttgtggcttctccgtcttccaagcatacttattgaattgttgttgatatttttattgtcatgttgccttgagttctgatgagaaaaagcagagcctataaagaaaggaatgaagaactatttatatcacgtagccct

SEQ ID NO: 634 - protein, 778 aa, Mus musculus
MDPSAWAICCLLGSLLFHVGIPSPGPSPSVPRLRLSYRDLLSTNRSAIFLGPRGSLDLQVMYLDEYRDRLFLGSRDALYSLRLDQAWPDPREVLWLPQPGQKVECVRKGKDPLTECANFVRVLQPHNRTHLLACGTGAFQPICTFITVGHRGEHVLRLDASSVENGRGRCPHEPSRPFASTFVGGELYTGLTADFLGREAMIFRSGGPRPALRSDSDQSLLHEPRFVMAARIPDNSDRDDDKVYFFFSETVPSPDGGPGHVTISRVGRVCVNDAGGQRVLVNKWSTFLKARLVCSVPGPGGAETHFDQLEDVFLLWPKAGKSLEVYALFSTVSAVFQGFAVCVYHMVDIWEVFNGPFAHRDGPQHQWGPYGGKVPFPRPGVCPSKMTAQPGRPFGSTKDYPDEVLQFVRDHPLMFQPVRPRRGRPVLVKTHLAQRLRQIVVDRVEAEDGTYDVIFLGTDSGSVLKVIALQGGGLTEPEEVVLEELQVFKVPTPITEMEISVKRQTLYVGSPLGVARLQLHQCETYGSACAECCLARDPYCAWDGTACARYRPSSGKRRFRRQDIRHGNPAVQCLGQGQSQNTSGLMTRVFGTEHNSTFLECLPKSPQAAVRWFLQRPGDKGTDQVKTDERVVQTAQGLLFRRLSRHDAGNYTCTTLEHGFSQTVVRFALEVIAAVQLDSLFLRESRLEEPSAWGSLASASPKTWYKDILQLTGFANLPRVDEYCERVWCRGVGERSGSFRGKGKQAKGKSWAGLELGKKMKSRVLAEHNRTPREVEAT

SEQ ID NO: 635 - DNA, 2301 bp, Mus musculus
atctgctgcctcctggggagccttctgttccatgtgggcatccccagccctggtcccagccccagtgtgcctcgtctgcggctctcctacagagatctcctgtctaccaaccgctctgccatctttctgggcccacggggttccctagacctccaagtcatgtacctggatgagtatcgagatcgcctctttctgggaagccgagatgccctttactctctgagactggatcaggcatggccagacccccgggaggtcttgtggctgccacagccaggacagaaggtggaatgtgtccgcaagggaaaagaccctttgacggagtgtgccaacttcgtgcgggtcttacaaccccataaccggacccatctgctggcctgtggcacaggagccttccaacccatctgcaccttcatcacagtggggcatcgaggggagcatgtgctccgcttggatgctagcagcgtcgagaatggaagggggcgttgcccacatgagcccagccgacccttcgccagcacctttgtaggtggggagctatacacaggtctcactgccgatttcctgggacgtgaggccatgattttccggagtgggggtccccgaccagccctgcgttctgactctgaccagagcctcctacatgaaccccggtttgtgatggctgctcggatcccagataactctgaccgggacgacgacaaggtgtacttcttcttctccgagactgtcccgtcaccagatggtggcccaggtcatgtcaccatcagccgagtgggccgcgtctgtgtgaatgatgctggtggccagcgggtgctggtgaacaaatggagcactttcctcaaggcccggctggtgtgctctgtgcctggcccgggtggggctgagactcactttgaccagctagaggatgtgttcctgctgtggcccaaggccgggaagagcctcgaggtgtatgcgctgttcagcactgtcagtgctgtgttccagggctttgctgtctgtgtgtaccacatggtagacatctgggaggtcttcaatgggccctttgcccaccgagatggccctcagcatcagtggggaccctatgggggcaaggtgcccttccctcgccccggtgtgtgtcctagcaagatgaccgcacagccaggccgaccctttggcagcaccaaggactacccagacgaggtgttgcagtttgtccgagaccacccactcatgttccagcctgtgaggcctcggcgtggccgccctgtcctggtcaaaactcacttggctcagcgactgcgccagattgtggtggatcgagtggaggctgaggatgggacctatgatgtcatcttcctagggactgattcgggttctgtgctcaaagtcattgccctccagggtggtggcttgactgaacctgaagaggtggttttggaggagctccaggtgtttaagctcactggggctctgcttgtgtttcttccccagcaaacgctgtatgtgggctctccactgggtgtggcccggctgcagctgcaccagtgtgagacttacggcagtgcctgtgctgagtgctgcctggcccgggacccatactgtgcttgggatggcactgcctgtgcccgctaccgccccagctctggcaagcgcaggttccgtcggcaggacatacgccatggcaaccctgctgtgcagtgtctgggccagggccagagccaaaacaaagcagcttcggggctcatgaccagagtctttggcacagagcacaacagcaccttccttgagtgcctgcccaagtctcctcaggctgcagtgcgctggttcttacaaaggccaggggataaggggactgaccaggtgaagacagatgagagagttgtgcagacggcccaagggctgctgttccgaaggctcagccgccatgacgcaggaaactacacttgcaccactctggaacatggcttctcccagaccgtggtccgttttgccctggaggtgattgcagctgtgcaactggacagcctgttccttcgggagtcaaggctagaggagccctcagcctggggaagcctggcctctgcctcccccaagacttggtataaggacatccttcagctcacgggcttcgccaacctgccccgtgtggatgagtactgtgaacgtgtatggtgcaggggtgtcggggagcgctcaggctccttccgcggaaagggaaagcaagcgaagggcaagagctgggcagggctggaactgggcaagaagatgaagagcagggtgctggctgagcacaatcggacaccccgggaggta

SEQ ID NO: 636 - protein, 767 aa, Mus musculus
ICCLLGSLLFHVGIPSPGPSPSVPRLRLSYRDLLSTNRSAIFLGPRGSLDLQVMYLDEYRDRLFLGSRDALYSLRLDQAWPDPREVLWLPQPGQKVECVRKGKDPLTECANFVRVLQPHNRTHLLACGTGAFQPICTFITVGHRGEHVLRLDASSVENGRGRCPHEPSRPFASTFVGGELYTGLTADFLGREAMIFRSGGPRPALRSDSDQSLLHEPRFVMAARIPDNSDRDDDKVYFFFSETVPSPDGGPGHVTISRVGRVCVNDAGGQRVLVNKWSTFLKARLVCSVPGPGGAETHFDQLEDVFLLWPKAGKSLEVYALFSTVSAVFQGFAVCVYHMVDIWEVFNGPFAHRDGPQHQWGPYGGKVPFPRPGVCPSKMTAQPGRPFGSTKDYPDEVLQFVRDHPLMFQPVRPRRGRPVLVKTHLAQRLRQIVVDRVEAEDGTYDVIFLGTDSGSVLKVIALQGGGLTEPEEVVLEELQVFKLTGALLVFLPQQTLYVGSPLGVARLQLHQCETYGSACAECCLARDPYCAWDGTACARYRPSSGKRRFRRQDIRHGNPAVQCLGQGQSQNKAASGLMTRVFGTEHNSTFLECLPKSPQAAVRWFLQRPGDKGTDQVKTDERVVQTAQGLLFRRLSRHDAGNYTCTTLEHGFSQTVVRFALEVIAAVQLDSLFLRESRLEEPSAWGSLASASPKTWYKDILQLTGFANLPRVDEYCERVWCRGVGERSGSFRGKGKQAKGKSWAGLELGKKMKSRVLAEHNRTPREV

SEQ ID NO: 637 - DNA, 5895 bp, Mus musculus
gttttccaagatcacagctaaaatacttaagttttggttttggtttatcctggggcagcttgatctttaaatatataaaatctttggaaatttcgactccttggacttgtacgtgaatgtgcatgtctgtttgtatgtggatggtggctcaatggcacctatggtcaatgtatcatcagcaactcctctcacgccagccttaagaggctgggcttctcaagtagaatcaggaatgaattaaggaagcactggccaagacacagcataaaaggcagggagggagcccggcaagctttagagcacaggggttgtcgtctgtcagcttggattctcttgggccccgtcatcgtcggctggagatgcagccctttgcggtgggcagcatctgaagagaggaaagggaaagccaaggtcttccttcgagaatccttggagcagaaactggaaaagaggcgggaagaggagattgaccgtgcggccatggtgatccgagctcacatcttaggctacttggcacgaaagcaatatagaaaggtcctctgtggtgtggtgaccatacagaagaattacagagctttccttgcgaggaagaaatttttgcacctgaaaaaggcagccatcgtgttccagaagcaactgcgaggacagctggcacgcagggtttacaggcagctcactgccgaaggaggagagctggtgaagattggtgtcaaggttgttgattttcaccagctgcttttctttccctttcttagagaaagagagcgagcgcaaagagaagctgacctcctccgtgcccatcaggaggcagagacaaggaggcagcaagaactggaagccttgcagaagagccagagggaagcggacttgaccagggagctggaaaagcaaagggagaacaagcaggtggaggagatcctccgcctggagaaggaaatcgaggatctgcagcgcatgaaggagcggcaggagctgtcgttgaccgaggcctccctgcagaagctgcagcagctgcgggatgaggagttgcgcaggctggaggatgaggcctgccgcgccgcccaggagttcttggagtcgctcaacttcgacgagatcgacgagtgcgtccgcaacatcgagcgctccctgtcggtagggagcgagatttcgggcgaagagctcagtgagcttgccgagagtgccagcggagagaagccaaacttcaacttcagccagccctaccccgcggaggaggaggtggacgagggcttcgaggcggatgacgacgccttcaaggactcgcccaaccccagcgagcacggccactccgaccagcgaacgagtggcatccggacgagcgacgactcatccgaggaggacccttacatgaactacacggtggtgcccaccagccccagtgccgacagtacggtgcttcttgctgcgtccatgcaggactccgctagcctgcacaactcctcgagtggggagtccacctactgcatgccgcagaacaacggcgacctgccctcccccgacggcgactatgactatgaccaggacgattacgaggatggcgccatcacgtcaggcagcagcgtgactttctccaactcctatggaagccagtggtcccccgactacaggtattccgtgggaacctacaacagttccggagcgtaccggttcagctcagaaggggcgcagtcctcctttgaagacagcgaggaggacttcgactccaggtttgatacagatgatgaactttcctaccggcgagactctgtgtatagctgcgtcacactgccctatttccacagttttctgtacatgaaaggtggcttaatgaactcctggaagcgccgctggtgtgtcctgaaggacgagaccttcctgtggttccgctccaagcaggaagccctcaagcaaggctggctgcacaagaaaggcgggggctcctccacgctgtcccggaggaactggaagaagcgctggtttgtccttcgccagtcgaagctgatgtactttgaaaacgatagcgaggagaagctcaagggcaccgtggaagtccgcaccgccaaggagatcatagacaacacaagcaaagagaacgggatcgacatcatcctggccgacaggaccttccatctcatcgcggagtcccccgaagatgccagccaatggttcagcgtgctgagtcaggtccactcgtccacagaccaggagatcagagaaatgcatgatgagcaggcaaacccccagaatgctgtgggcacactggatgtcgggctgattgattctgtatgcgcctctgacagccctgatagacccaactcatttgtgatcatcacagccaaccgggtgctgcactgtaacgcggacaccccagaggagatgcaccactggataaccctgctgcagagatccaagggggacaccagggtcttccagctgacgcttggcccttcctttccagggtggctgcataaggaagtgaagaacagtccgaagatgtcctccctgaaactgaagaaacggtggttcgtgctgacgcacaattccctggactactacaagagctcagagaagaacgctctgaaactgggcactctggtcctcaacagcctgtgctccgttgtgcccccagacgagaagatattcaaagagacaggctactggaatgtcaccgtgtatgggcgcaaacactgttaccgactctacacgaaactactgaacgaggcgactaggtggtccagcgccatccagaatgtgactgacaccaaggctccaatcgacacgcccacccagcagctgatccaagatattaaggagaactgcctcaactctgacgtggtggagcagatttacaagcggaacccgatccttcgctacacgcatcacccgctgcactccccgctcctgcctcttccctatggggacataaatctcaacctgctgaaagacaaaggctacacgacccttcaggacgaagccatcaagatattcaattctctccaacaactggagtccatgtccgaccccatccctatcatccagggcatcctgcagaccgggcacgacctgcggcctctgcgggatgaactgtattgtcagctcatcaaacagaccaacaaggtgccccatcccggcagcgtgggcaacctttacagctggcagatcctgacctgcctcagctgcaccttcctgccgagccgcgggatcctcaaatacctcaagttccacctgaaaaggatacgggaacagttcccaggaaccgagatggagaagtacgccctctttatctacgaatcccttaagaaaaccaaatgcagagagtttgtgccttcccgagatgaaatcgaagctctgatccaccggcaggaaatgacgtccacagtgtattgccatggcggaggctcctgcaagatcaccatcaactcccacaccacagccggggaggtggtggagaagctgatccgagggctcgccatggaggacagcaggaacatgtttgccttgtttgagtacaacggacaggtggacaaggccatcgaaagccggaccatcgtagctgacgtcctggcaaagtttgaaaagctagctgccacgtcagaagccggggacgcgccatggaaattctacttcaaactttattgcttcctggacaccgacagcatgccaaaagacagcgtggagtttgcgtttatgtttgaacaggcccacgaagccgtcatccatggccaccacccagcccctgaggaaagcctccaagtgctggctgccctgagactgcagtatctgcagggcgactataccccgcacacctccatcccacccctcgaggaggtttactctgtgcagagactcagagctcgcattagtcagtcgaccaaaaccttcaccccgtacgagcgcctcgagaagagacggaccagcttcctggagggcacgctgcggcggagcttccggaccgggtcggtggttcggcagaaggcggaggaggagcagatgctggacatgtggatcaaggaggaagtctgctcggctcgcaccagcatcattgacaagtggaagaaactgcaggggatgaaccaggaacaagccatggccaagtatatggccctgatcaaggagtggcctggttatggatcaacactctttgatgtggagtgcaaagaaggcggcttcccccaggagctctggctgggcgtcagcgcagacgccgtgtctgtctacaagcgtggagagggcaaaccgttagaagtcttccagtatgagcacatcctctcgttcggggcaccgctggccaacacgtacaagatcgtagttgacgagcgggagctgctctttgagacgagtgaggtggtggatgtggccaagctcatgaaagcgtatatcagcatgattgtgaagaagcgctatagcaccacacgctctgtgagcagccagggcagctccaggtgaagacgagccaagcccacgtgtcttgccgatgtgaacgtgccactctttgcctgggccagcgcctggtcctgacccagctttggaaactcagctgtccaggcttctgataaccggtcgtcagagggaggagtcccgggggctcccttcacccgatcagcctcagagatcacgtattaagctgtcaacctttaacagtctgcacaatctcttaagctttagttaaaaatcctagatgagaacttgccttaaagaaaaaaagaaaggggagaaaaccacacggccaccaaagcagccagaagtgccttaaacttgcagagtggaccctaatcgaccttaactgtgctactgagggggagcgctttcacctcccggtggggtttgcagagcttggaggcggggcatggatccactgattgtgcactaacctccccagcctgatttcctgcaaatgaggggagctgagggggcggggcgaggcagggagacagcagagggggacagtgtgttgtcggagtgctgctggcagccttccttacgaacatgtattaacgtttttggggtttttttgtttttttgttttttgtttttttggttttttttttgctttgtttcaactgtctgtgcttgcccgcgcatgcatgtgttcacacactcaacactttaatcattgtcctgtgagcattaaacacaaagggaaagaggatgtgcaatgttgtaaacagtctgtatattttcctagttcagagttctagtctcgaggtggctttattaacagacccggatcctggacgttcctgtctttgctgtattttttggaaagaaacattttttttggactcggtttcgttttacatgtagctagggcggcgacctgtgactgctgtattactaacaggtctacagcccagagagataactgtatttataaaccactcttaaactgctggctccagtgtttttagaatgatatgaagtcattttggagtctttttttcattctaaaagttaagttaaaaaattttttttgttttgttttggtcttctttgaagggtaacttgtgttatcactctggctagattgcagatataaccatgtcgaatgtgggggaggggggagctgctgcattcccaaactctgtacccctcaagcaaacctctaagggacctccaacacaaacgctgaggctttaatggaattcacacgttgttttgtccctggttcctacaggtggcctgaacacagcacctgtaagtaacagcggttgtaaccagaagaaaaaagaatctggacttggacttttatttttatatgggaaaaaaatatataaaggtgggccaaacgagtctgctcacaaagcaaagttactttggccttatcccttacggacagttacgtggaagcagtgtctcttggctcacaaagtctgacaataaaagatattaatatgc

SEQ ID NO: 638 - protein, 1455 aa, Mus musculus
NLWKFRLLGLVRECACLFVCGWWLNGTYGQCIISNSSHASLKRLGFSSRIRNELRKHWPRHSIKGREGARQALEHRGCRLSAWILLGPVIVGWRCSPLRWAASEERKGKAKVFLRESLEQKLEKRREEEIDRAAMVIRAHILGYLARKQYRKVLCGVVTIQKNYRAFLARKKFLHLKKAAIVFQKQLRGQLARRVYRQLTAEGGELVKIGVKVVDFHQLLFFPFLRERERAQREADLLRAHQEAETRRQQELEALQKSQREADLTRELEKQRENKQVEEILRLEKEIEDLQRMKERQELSLTEASLQKLQQLRDEELRRLEDEACRAAQEFLESLNFDEIDECVRNIERSLSVGSEISGEELSELAESASGEKPNFNFSQPYPAEEEVDEGFEADDDAFKDSPNPSEHGHSDQRTSGIRTSDDSSEEDPYMNYTVVPTSPSADSTVLLAASMQDSASLHNSSSGESTYCMPQNNGDLPSPDGDYDYDQDDYEDGAITSGSSVTFSNSYGSQWSPDYRYSVGTYNSSGAYRFSSEGAQSSFEDSEEDFDSRFDTDDELSYRRDSVYSCVTLPYFHSFLYMKGGLMNSWKRRWCVLKDETFLWFRSKQEALKQGWLHKKGGGSSTLSRRNWKKRWFVLRQSKLMYFENDSEEKLKGTVEVRTAKEIIDNTSKENGIDIILADRTFHLIAESPEDASQWFSVLSQVHSSTDQEIREMHDEQANPQNAVGTLDVGLIDSVCASDSPDRPNSFVIITANRVLHCNADTPEEMHHWITLLQRSKGDTRVFQLTLGPSFPGWLHKEVKNSPKMSSLKLKKRWFVLTHNSLDYYKSSEKNALKLGTLVLNSLCSVVPPDEKIFKETGYWNVTVYGRKHCYRLYTKLLNEATRWSSAIQNVTDTKAPIDTPTQQLIQDIKENCLNSDVVEQIYKRNPILRYTHHPLHSPLLPLPYGDINLNLLKDKGYTTLQDEAIKIFNSLQQLESMSDPIPIIQGILQTGHDLRPLRDELYCQLIKQTNKVPHPGSVGNLYSWQILTCLSCTFLPSRGILKYLKFHLKRIREQFPGTEMEKYALFIYESLKKTKCREFVPSRDEIEALIHRQEMTSTVYCHGGGSCKITINSHTTAGEVVEKLIRGLAMEDSRNMFALFEYNGQVDKAIESRTIVADVLAKFEKLAATSEAGDAPWKFYFKLYCFLDTDSMPKDSVEFAFMFEQAHEAVIHGHHPAPEESLQVLAALRLQYLQGDYTPHTSIPPLEEVYSVQRLRARISQSTKTFTPYERLEKRRTSFLEGTLRRSFRTGSVVRQKAEEEQMLDMWIKEEVCSARTSIIDKWKKLQGMNQEQAMAKYMALIKEWPGYGSTLFDVECKEGGFPQELWLGVSADAVSVYKRGEGKPLEVFQYEHILSFGAPLANTYKIVVDERELLFETSEVVDVAKLMKAYISMIVKKRYSTTRSVSSQGSSR

SEQ ID NO: 639 - DNA, 1872 bp, Mus musculus
gggtggctgcataaggaagtgaagaacagtccgaagatgtcctccctgaaactgaagaaacggtggttcgtgctgacgcacaattccctggactactacaagagctcagagaagaacgctctgaaactgggcactctggtcctcaacagcctgtgctccgttgtgcccccagacgagaagatattcaaagagacaggctactggaatgtcaccgtgtatgggcgcaaacactgttaccgactctacacgaaactactgaacgaggcgactaggtggtccagcgccatccagaatgtgactgacaccaaggctccaatcgacacgcccacccagcagctgatccaagatattaaggagaactgcctcaactctgacgtggtggagcagatttacaagcggaacccgatccttcgctacacgcatcacccgctgcactccccgctcctgcctcttccctatggggacataaatctcaaccacaaaggctacacgacccttcaggacgaagccatcaagatattcaattctctccaacaactggagtccatgtccgaccccatccctatcatccagggcatcctgcagaccgggcacgacctgcggcctctgcgggatgaactgtattgtcagctcatcaaacagaccaacaaggtgccccatcccggcagcgtgggcaacctttacagctggcagatcctgacctgcctcagctgcaccttcctgccgagccgcgggatcctcaaatacctcaagttccacctgaaaaggatacgggaacagttcccaggaaccgagatggagaagtacgccctctttatctacgaatcccttaagaaaaccaaatgcagagagtttgtgccttcccgagatgaaatcgaagctctgatccaccggcaggaaatgacgtccacagtgtattgccatggcggaggctcctgcaagatcaccatcaactcccacaccacagccggggaggtggtggagaagctgatccgagggctcgccatggaggacagcaggaacatgtttgccttgtttgagtacaacggacaggtggacaaggccatcgaaagccggaccatcgtagctgacgtcctggcaaagtttgaaaagctagctgccacgtcagaagccggggacgcgccatggaaattctacttcaaactttattgcttcctggacaccgacagcatgccaaaagacagcgtggagtttgcgtttatgtttgaacaggcccacgaagccgtcatccatggccaccacccagcccctgaggaaagcctccaagtgctggctgccctgagactgcagtatctgcagggcgactataccccgcacacctccatcccacccctcgaggaggtttactctgtgcagagactcagagctcgcgtcagtcgaccaaaaccttcaccccgtacgagcgcctcgagaagagacggaccagcttcctggagggcacgctgcggcggagcttcccgggtcggtggttcggcagaaggcggaggaggagcagatgctggacatgtggatcaaggaggaagtctgctcggctcgaccagcatcattgacaagtggaagaaactgcaggggatgaaccaggaacaagccatggccaagtatatggccctgatcaaggagtggcctggttatggatcaacactctttgatgtggagtgcaaagaaggcggcttcccccaggagctctggctgggcgtcagcgcagacgccgtgtctgtctacaagcgtggagagggcaaaccgttagaagtcttccagtatgagcacatcctctcgttcggggcaccgctggccaacacgtacaagatcgtagttgacgagcgggagctgctctttgagacgagtgaggta

SEQ ID NO: 640 - protein, 624 aa, Mus musculus
GWLHKEVKNSPKMSSLKLKKRWFVLTHNSLDYYKSSEKNALKLGTLVLNSLCSVVPPDEKIFKETGYWNVTVYGRKHCYRLYTKLLNEATRWSSAIQNVTDTKAPIDTPTQQLIQDIKENCLNSDVVEQIYKRNPILRYTHHPLHSPLLPLPYGDINLNHKGYTTLQDEAIKIFNSLQQLESMSDPIPIIQGILQTGHDLRPLRDELYCQLIKQTNKVPHPGSVGNLYSWQILTCLSCTFLPSRGILKYLKFHLKRIREQFPGTEMEKYALFIYESLKKTKCREFVPSRDEIEALIHRQEMTSTVYCHGGGSCKITINSHTTAGEVVEKLIRGLAMEDSRNMFALFEYNGQVDKAIESRTIVADVLAKFEKLAATSEAGDAPWKFYFKLYCFLDTDSMPKDSVEFAFMFEQAHEAVIHGHHPAPEESLQVLAALRLQYLQGDYTPHTSIPPLEEVYSVQRLRARVSRPKPSPRTSASRRDGPASWRARCGGASRVGGSAEGGGGADAGHVDQGGSLLGSTSIIDKWKKLQGMNQEQAMAKYMALIKEWPGYGSTLFDVECKEGGFPQELWLGVSADAVSVYKRGEGKPLEVFQYEHILSFGAPLANTYKIVVDERELLFETSEV

SEQ ID NO: 641 - DNA, 1792 bp, Mus musculus
gtggcaggcgttctgcttttcaggacctgccatttgtggcagagataccaagacgggatacatagcagagaggtggccaaacccacactgcgtccacaaccctgttcctccatcagactggctcccacagcccgttctgaggcgcgtaacctggctgattcccacgctgtgcctgcctcccgagttgctgtccattttccactgctgtaggcaagaggcactgtggacacagcctccctggcctctgttccaaagaagacgacccacttacaactctggattctcgctggtgcagccagtgccccagatttctccctggaatgggtcttggggagaccagcttcagcacaggcttgtccctgctccaggctcaagaggcaggctaagacagggctgtgagtagctctcttggacccgtcccatgggcgacatcctcctgtgccgggctggagctgccgcatagcttcccaaggatgagtgctgatgtcctctagccacccctagcagcatcttggctttctctggatgcacagcggctgactgggacttggaactctccgagatagacagtcctggaagtcagagatgactctccagaagcttgtggccaccgctgtgctggtggccctggtctccctcatcctcaacaacgcagcagccttcacccccaattgggtgtaccagacgctggaggacggacgcaagcggagtgtggggctgtggaagtcttgctggctggtggacaggggtaagggagtcacaagccctgggactcgaactgggcaggtggacacccatgactgtgaggttctaggatggggctcggaatcagcaggtttccaggagtcccgaggcaccgtcaaactacagtttgacatgatgcgtgcctgcaacctggtggccacagctgcacttgttgtgggtcagatcaccttcatccttgggctaacgggcctgcccctgatgtcaccagagtcccagtgctgggaggaggcaatggctgctgcattccagctggcaagcttcgtgctggtcatcggactggtgaccttctacagaattggcccttacaccaacttatcttggtcttgctacctgaacattggtgcctgccttctggccaccctggcggctgcaatgctcatctggaacattcttcaccggagggaggactgcatggcaccccgggtgatcgtcatcagccgttctctcactgcacggtttcgccgtggcttagataatgactatgtggagtctccatgctgagagcacccttatagggactttctctatgaataaccactataacgctgtagtctagaaatcggtagactgctccaggccctgcttgtgcagaggtgtggggtgagtccgggctacctatatatacatatgtatgatactcatgtacatttattacgttacatatgaatatattatatgtctctgtgtcattgtgtcatcctacttctgacacgatcttccttggccaggcagagcatggcttcacgtcatgtgagtttcaaaggtggagactagaagccgagacagggaatgaggcagtatgggcaccttgctctccacctccatttggggttaatttattctgcatctactaggatggtatccccagtgacttttacgaagcaggacatccaggaatcttttcatgaagggtctgacaaccagaccttaccaggtggtaccggtttcatgccagagtcaggttaagagcgtacgttttactcctgattgtttgtctaatttaaaataaacacgagcctctgaactg

SEQ ID NO: 642 - protein, 226 aa, Mus musculus
MTLQKLVATAVLVALVSLILNNAAAFTPNWVYQTLEDGRKRSVGLWKSCWLVDRGKGVTSPGTRTGQVDTHDCEVLGWGSESAGFQESRGTVKLQFDMMRACNLVATAALVVGQITFILGLTGLPLMSPESQCWEEAMAAAFQLASFVLVIGLVTFYRIGPYTNLSWSCYLNIGACLLATLAAAMLIWNILHRREDCMAPRVIVISRSLTARFRRGLDNDYVESPC

SEQ ID NO: 643 - DNA, 2989 bp, Mus musculus
gagggaagattcagccagcacactgctcgcgagcaagtgtcactctgctaactggcagagccaggagacctagatgtccacacccacagacccagcagcaatgccccatcctgggccctccccggggcctggaccctctcctggaccaattctggggcctagtccaggaccaggaccatccccaggttctgtgcacagcatgatgggtcctagtcccggacctcccagcgtctcacatcctctgtcaacgatgggctctgcagacttcccacaggaaggcatgcaccaattacataagcccatggatgggatacatgacaaagggattgtagaagatgtccactgtggatccatgaagggcaccagcatgcgccccccacacccaggaatgggccctccacagagccccatggaccagcacagccaaggttatatgtcaccacatccgtctcctctgggagccccggagcacgtctctagccctatatctggaggaggcccaaccccaccccagatgccaccgagccagccaggggcactcatcccaggagatccgcaggccatgaaccagcctaacagaggtccctcgcctttcagtcctgtgcagctgcatcagcttcgagctcagattttagcttacaaaatgttggccaggggccagcctctccctgaaactctgcagctggcagtccagggaaaaaggaccttgcctggcatgcagcagcagcagcagcaacaacaacaacagcagcagcagcagcagcagcagcagcagcaacagcagcaacaacagcagccccagcagcctcagcagcaggctcaggcacagccccagcagcagcagcaacagcagcagcagccagctcttgttagctataatcgaccatctggccccgggcaggagctgctactgagtggccagagcgctccgcagaagctgtcagcaccagcaccaagcggccgaccttcaccggcaccccaggccgccgtccagcccacggccacagcggtgcccgggccctccgtgcagcagcccgccccagggcagccgtctccggtcctacagctgcaacagaagcagagccgcatcagccccatccagaaaccgcaaggcctggacccggtggagatcctgcaggaacgagagtacagacttcaagctcgcatcgctcataggatacaagaactggaaagtctgcctggttccttgccaccagatttacgcaccaaagcaaccgtggaactgaaagcacttcgcttactcaacttccaacgtcagctgagacaggaggtggtggcctgcatgcggagggacaccaccctggagacggccctcaactccaaagcatataagcggagcaagcgccagaccctgcgtgaggcacgcatgacagagaaactggagaagcagcagaagatagaacaggagaggaaacgccggcagaaacaccaggaatacctgaacagtattttgcaacatgcaaaagattttaaggaatatcaccggtctgtggccgggaagatccagaagctctccaaagcagtggcgacttggcatgctaacacagaaagggagcagaagaaggagacggagcggatcgagaaggagagaatgcggaggctgatggccgaagatgaagagggctacaggaagcttattgaccaaaagaaagacagacgtctcgcctacctattgcagcagaccgatgagtatgtcgccaatctgaccaacctggtgtgggagcacaagcaggcccaagcagccaaagagaagaagaagaggaggaggaggaagaagaaggctgaagagaatgcagagggaggggaacctgccctgggaccagatggagagccaatagatgaaagcagccagatgagtgacctgcctgtcaaagtgacacacacagaaactggcaaggtcctctttggaccagaagcacccaaagcaagtcagctggatgcctggctggagatgaatcctggttacgaagttgcacccagatctgacagtgaagagagtgaatcggactacgaggaggaggatgaagaagaagagtccagtaggcaggaaaccgaggagaagatactgctggatcccaacagtgaagaagtttccgaaaaggatgccaagcagatcattgagactgcgaagcaggacgtggacgacgaatacagcatgcagtacagtgccagaggctctcagtcctactacacggtggctcacgctatctctgagagggtggagaagcagtctgccctcctcattaacggcaccctaaagcattaccagctccagggcctggaatggatggtttccctgtataataacaatctgaacggaatcttagctgatgaaatggggctaggcaagaccatccagaccattgcactcatcacgtatctgatggagcacaaaaggctcaatggtccctacctcatcatcgtccccctctcgactctgtctaactggacatatgaatttgacaaatgggctccttctgtggtgaaaatttcttacaagggtacccctgccatgcgacgctccctcgttccccagctacggagtggcaaattcaatgtcctcctgactacttacgagtacattataaaagacaagcacattcttgcaaagattcggtggaagtacatgatcgtggacgaaggccaccggatgaagaatcaccactgcaagctaacccaggtcctgaacacacactatgtggcccccaggcggatccttctgactgggaccccactgcagaataagcttccggaactctgggccctcctcaacttcctcctccctacaatcttcaagagttgcagcacatttgagcagtggtttaatgctccatttgccatgaccggtgaaagggtggacctgaacgaagaagaaacgattttgatcatcaggcgtctacacaaggtgctgagaccctttttactgaggaggctgaagaaagaggttgagtctcagcttccggaaaag

SEQ ID NO: 644 - protein, 600 aa, Mus musculus
ESLPGSLPPDLRTKATVELKALRLLNFQRQLRQEVVACMRRDTTLETALNSKAYKRSKRQTLREARMTEKLEKQQKIEQERKRRQKHQEYLNSILQHAKDFKEYHRSVAGKIQKLSKAVATWHANTEREQKKETERIEKERMRRLMAEDEEGYRKLIDQKKDRRLAYLLQQTDEYVANLTNLVWEHKQAQAAKEKKKRRRRKKKAEENAEGGEPALGPDGEPIDESSQMSDLPVKVTHTETGKVLFGPEAPKASQLDAWLEMNPGYEVAPRSDSEESESDYEEEDEEEESSRQETEEKILLDPNSEEVSEKDAKQIIETAKQDVDDEYSMQYSARGSQSYYTVAHAISERVEKQSALLINGTLKHYQLQGLEWMVSLYNNNLNGILADEMGLGKTIQTIALITYLMEHKRLNGPYLIIVPLSTLSNWTYEFDKWAPSVVKISYKGTPAMRRSLVPQLRSGKFNVLLTTYEYIIKDKHILAKIRWKYMIVDEGHRMKNHHCKLTQVLNTHYVAPRRILLTGTPLQNKLPELWALLNFLLPTIFKSCSTFEQWFNAPFAMTGERVDLNEEETILIIRRLHKVLRPFLLRRLKKEVESQLPEK

SEQ ID NO: 645 - DNA, 3846 bp, Mus musculus
ctgcctgtcaaagtgacacacacagaaactggcaaggtcctctttggaccagaagcacccaaagcaagtcagctggatgcctggctggagatgaatcctggttacgaagttgcacccagatctgacagtgaagagagtgaatcggactacgaggaggaggatgaagaagaagagtccagtaggcaggaaaccgaggagaagatactgctggatcccaacagtgaagaagtttccgaaaaggatgccaagcagatcattgagactgcgaagcaggacgtggacgacgaatacagcatgcagtacagtgccagaggctctcagtcctactacacggtggctcacgctatctctgagagggtggagaagcagtctgccctcctcattaacggcaccctaaagcattaccagctccagggcctggaatggatggtttccctgtataataacaatctgaacggaatcttagctgatgaaatggggctaggcaagaccatccagaccattgcactcatcacgtatctgatggagcacaaaaggctcaatggtccctacctcatcatcgtccccctctcgactctgtctaactggacatatgaatttgacaaatgggctccttctgtggtgaaaatttcttacaagggtacccctgccatgcgacgctccctcgttccccagctacggagtggcaaattcaatgtcctcctgactacttacgagtacattataaaagacaagcacattcttgcaaagattcggtggaagtacatgatcgtggacgaaggccaccggatgaagaatcaccactgcaagctaacccaggtcctgaacacacactatgtggcccccaggcggatccttctgactgggaccccactgcagaataagcttccggaactctgggccctcctcaacttcctcctccctacaatcttcaagagttgcagcacatttgagcagtggtttaatgctccatttgccatgaccggtgaaagggtggacctgaacgaagaagaaacgattttgatcatcaggcgtctacacaaggtgctgagaccctttttactgaggaggctgaagaaagaggttgagtctcagcttccggaaaaggttgagtatgtgatcaagtgtgacatgtcagctctgcagaagattctgtaccgtcacatgcaagccaaggggatcctcctcacggacgggtctgagaaagataagaaggggaaaggaggtgccaagacacttatgaacaccatcatgcagctgagaaaaatatgcaaccacccatatatgtttcagcacattgaggaatcctttgctgaacacctgggctattcgaatggggtcatcaatggggctgagctgtatcgggcctcgggaaagtttgagctgcttgatcgtattctgcccaaattgagagcgactaaccaccgcgtgctgcttttctgccagatgacgtcactcatgaccattatggaggattactttgcttttcggaacttcctgtacctgcgccttgacggcaccaccaagtctgaagatcgtgctgctttgctaaagaaattcaatgaacctgggtcccagtatttcattttcttgctgagcacaagagcagggggcctgggcttaaatcttcaggcggcagacacggtggtcatatttgacagcgactggaatcctcaccaggatctgcaggcccaagaccgagctcaccgcattggccaacaaaacgaggtccgggtgctgaggctttgcaccgtcaacagtgtggaggaaaagattctcgcggctgccaagtacaagctgaacgtggatcagaaggttatccaagcaggcatgtttgaccagaagtcatccagccacgagcggagggccttcctgcaggccattctggagcacgaggaggagaatgaggaagaagatgaggtaccagacgacgagaccctgaaccagatgattgctcgccgggaggaagaatttgatctttttatgcgcatggacatggaccggcggagggaggatgcccggaacccgaagcgcaaaccccgcttgatggaggaagatgagctgccctcctggattatcaaggatgacgccgaagtggaaaggctcacctgtgaagaagaggaggagaagatatttgggaggggctctcgccagcgccgggatgtggactacagtgatgccctcaccgagaagcaatggctcagggccatcgaagacggcaatttggaagaaatggaagaggaggtacggcttaagaagagaaaaagacgaagaaatgtggataaagaccccgtgaaggaagatgtggaaaaagcgaagaaaagaagaggccgccctccggctgagaagttgtcaccaaatcccccaaaactaacgaagcagatgaacgccatcattgatactgtgataaactacaaagacagttcagggcgacagctcagtgaagtcttcattcagttaccttccaggaaagacttaccagaatactatgaattaattaggaagccagtggatttcaaaaagataaaggagcgaatccgtaatcataagtatcggagcctgggagacctggagaaagacgtcatgcttctctgtcacaacgcacagacattcaacttggaaggatcccagatctacgaagactccattgtcctacagtcagtgtttaagagtgctcggcagaaaattgccaaagaagaagagagtgaggaagaaagcaatgaagaagaggaagaagatgatgaagaggagtcggagtcagaggcgaaatctgtgaaggtgaaaatcaagctgaataaaaaggaagagaaaggccgggacacagggaagggcaagaagcggccaaaccgaggcaaagccaaacccgtcgtgagcgattttgacagtgacgaggaacaggaagagaacgaacagtcagaagcaagtggaactgataacgagtgaccatcctggacgtgagcttcccgcggtggcagaaccgaatgctttcttccccctctccttcctccccagtgagttcacttgccattcgggcacactgggttatttctccgtcctcattgtcatctagaactagctttagggtagtgccagacaaacatatgatatcatggtgtaaaaaaagaaacacatgcgtgcagacacactacacacacacacacacacacacacacacacacacacacatatttgtaacatattgtgaccaaatgggcctcaaagattcaaagattaaaaacaaaaagcttttgatggaaaagatgtgggtggatagtatatttctacaggtgggtcaggtttggtagcagtttgatgtgctgggttctgtcatctgttctgatgagaagatttttatcttctgcagtgctgatggccgggaggaaccattcaaagccactggttattttgtttttcatcaggcgattttcaagattttcatttgtttcagtattgttggttttctcttttctcttttttacactgtggtacatataagcaacttgactagtgacaaatgtacagtagttagatatcacctacatatacatttttccattttatgctctatgatctgaagaacaaaaaaaaaagctttttgacttgtataagatttatgtctactgtaaacattgcggaatttttttttgttcttgttttattgacaatgctattgagtattacagtgtctagaataccctggatggcttctcttgtccacccgatctcccgtgttaccaatgtgtatggtctccttctcccgaaagtgtacttaatctttgctttctttgcacaatgtctttggttgcaagtcataagcctgaggcaaataaaattccagtaatttcc

SEQ ID NO: 646 - protein, 979 aa, Mus musculus
PVKVTHTETGKVLFGPEAPKASQLDAWLEMNPGYEVAPRSDSEESESDYEEEDEEEESSRQETEEKILLDPNSEEVSEKDAKQIIETAKQDVDDEYSMQYSARGSQSYYTVAHAISERVEKQSALLINGTLKHYQLQGLEWMVSLYNNNLNGILADEMGLGKTIQTIALITYLMEHKRLNGPYLIIVPLSTLSNWTYEFDKWAPSVVKISYKGTPAMRRSLVPQLRSGKFNVLLTTYEYIIKDKHILAKIRWKYMIVDEGHRMKNHHCKLTQVLNTHYVAPRRILLTGTPLQNKLPELWALLNFLLPTIFKSCSTFEQWFNAPFAMTGERVDLNEEETILIIRRLHKVLRPFLLRRLKKEVESQLPEKVEYVIKCDMSALQKILYRHMQAKGILLTDGSEKDKKGKGGAKTLMNTIMQLRKICNHPYMFQHIEESFAEHLGYSNGVINGAELYRASGKFELLDRILPKLRATNHRVLLFCQMTSLMTIMEDYFAFRNFLYLRLDGTTKSEDRAALLKKFNEPGSQYFIFLLSTRAGGLGLNLQAADTVVIFDSDWNPHQDLQAQDRAHRIGQQNEVRVLRLCTVNSVEEKILAAAKYKLNVDQKVIQAGMFDQKSSSHERRAFLQAILEHEEENEEEDEVPDDETLNQMIARREEEFDLFMRMDMDRRREDARNPKRKPRLMEEDELPSWIIKDDAEVERLTCEEEEEKIFGRGSRQRRDVDYSDALTEKQWLRAIEDGNLEEMEEEVRLKKRKRRRNVDKDPVKEDVEKAKKRRGRPPAEKLSPNPPKLTKQMNAIIDTVINYKDSSGRQLSEVFIQLPSRKDLPEYYELIRKPVDFKKIKERIRNHKYRSLGDLEKDVMLLCHNAQTFNLEGSQIYEDSIVLQSVFKSARQKIAKEEESEEESNEEEEEDDEEESESEAKSVKVKIKLNKKEEKGRDTGKGKKRPNRGKAKPVVSDFDSDEEQEENEQSEASGTDNE

SEQ ID NO: 647 - DNA, 1484 bp, Mus musculus
acaaagatgatcatggcagctcggaccagtcagagggccctggcgagggtggcatcggggtgccatccgaagtcgaccaccgtgacggaagccccggcgcgggggtctgcgcgcgacgtcaggtactcaatgcaagaaatgtatgacgtagtatcaggaatggaggactatcagcatttcgttccctggtgtaaaaagtcagatataatatcaaggcgatctggatactgtaaaaccagattagaagttgggttcccccccgttctggagagatacacatcaatagtaaccttggtaaaaccgcacttggtaaaggcatcttgtactgatgggaaacttttcaatcatttggagactatttggcgttttagcccaggtcttcctggctatccaagaacttgtaccttggatttttcaatttcttttgaattccgctcccttctgcactctcagctcgctactctgttcttcgatgaagttgtgaaacaaatggtagcagcctttgaaagaagagcctgtaaactgtatggtccagagacaaacatacctcgggaattaatgcttcatgaaattcaccacacctaagaggaaaatattagctgcctccacctactcttggctagtttgttcacttctaggaagtccttttaccatctgttgagaagtcagaaagcatttgttaaacctgccttgattctaagcccgtgctgttgaaaatttgcacattgaacatggacccacttgtacatagaattatttcttcaatcaagtgtgactctaagtatcatgtacatttgcaggctccgaccacctttgtaataacggatgtcatcactgttgctaggataccacattcctcgtttgagtgtacagatgaacaagtcttttaattctcaccttacatgaaaaggttagctgagatacaatgtgtgttatattaaccatatcatgtttaagttattaggttcagagtatttgtaacttattgttattcggcatgccatatggcttagggtatttgaataatcatatatttaccattaaaactgtgatttaaagtattgctaatgaagtcttagcactttgggtattttaattgttcttatgggtagcagtagatgattcagtgttgttgggaagttgtttcccagatgtactgagtggggtttttgttctggtcttttgttttttgttttttgttttatttggtgagtggtccagagctctgagctacttttctagacatttgaaacttccttcccaggtgctttgtgctgattgtgtgtcaaaattttatctgccactgtaggcaacagataagtaagtagttaatttgtctccagcaccacacaaggcattttctatttattgtgcatattcactttcaataatattctgaactgatttttttttaaaaaccacaaatcagtagaaaggctgaagtcatgacttaataaagttaaattgtttatttttgtatagtg

SEQ ID NO: 648 - protein, 192 aa, Mus musculus
MIMAARTSQRALARVASGCHPKSTTVTEAPARGSARDVRYSMQEMYDVVSGMEDYQHFVPWCKKSDIISRRSGYCKTRLEVGFPPVLERYTSIVTLVKPHLVKASCTDGKLFNHLETIWRFSPGLPGYPRTCTLDFSISFEFRSLLHSQLATLFFDEVVKQMVAAFERRACKLYGPETNIPRELMLHEIHHT

SEQ ID NO: 649 - DNA, 6339 bp, Mus musculus
atgtactgggccgtggaccgatgctacaccggctcccggagagtagcagccggctgcttcaaagccattgccaacgtgttccagaacagggattaccagtgtgacacagtgatgctcctaaacctgatactgtttaaagcagctgactcttctagaagtatctatgaagttgctatgcaactcttgcagatcctggagccgaagatgtttcgctatgctcacaaactggaggttcagagaacggatggagtcctcagtcagctgtccccgctgccacatctctattctgtgtcttattaccagttgtctgaggagctagcccgagcatatccagagctcactctcgccatattctcagagatcagccagcggatccagacggcacaccccgcggggcggcaggccatgcttcattacctactgccctggatgaacaacatcgagctggtcgacctcaaacctctgccttcagggaggcggcaggatgaagatgaagatgactccttgaaagaccgagagctcatggtgaccagcaggcgctggctgagaggagaaggctggggctccccacaggccaccgccatggtgttgaacaatctcatgtacatgacagcgaagtacggcgatgagctggcctggtcggaggtggagaatgtgtggaccacccttgcagacggctggccaaagaacctgaaaattattttgcactttctgatcagcatctgcggagtgaatagcgaaccaagcctcttgccttacgtgaagaaagtcatcgtctacctgggtcgagacaaaaccatgcagctgctggaagagctggtgagcgagctgcagctcacggaccccgtcagttccggcgtcacgcacatggataacccgccctactaccgcatcacttccagctgtaaaatcccttccgtcacctcaggaactacttccagtagcaatacaatggtcgctcccacagatggcaaccctgacagtaaggccctaaaggagaactttgaagagagctatgtgcacctggacatctacgggggactgaacagtcatttaaaccggcaacaccacagactggagtcccgatacagtagcagctccggagggtcttacgaagaggagaaaagtgactcaatgccactttattctaattggcgcctgaaagtgatggagcacaaccaaggagagccactgcccttcccgccagctggaggctgctggtcgccactggtggattacgtgcctgaaacagcatctcctggattgcctctacacaggtgtaacatagccgtgatcctgctgacagatctgatcattgaccacagcgtgaaggtggaatggggaagttacctccacctgctgcttcatgcaatttttatagggtttgatcactgccaccctgaggtgtacgagcactgcaagcgcctgctgctgcacttactgatagtgatgggacccaacagtgacatccggactgtcgcctctgtcctcctcagggacaaggaattcaatgagcccagggtgttgacagtcaagcagacggcacactcagattacacgttcacaggcattaacgattttacacccgattaccagccgtcccctatgaccgactcagggcttagctccagttctacctcctctagtatcagcttaggaaacaacagcgctgccatttcacacctccacaccaccctcctcggcgaggtggacctctcagtggagcaggatggaaaagtcaaaaccctcatggagttcattacctcaagaaaacgagggcccctttggaaccatgaggacgtttcttccaagaaccctagcatcaagagtgctgatcagctcgccacgttcctgaagcacgtggtttccgtcttcaagcagtcaaatgcagaaggaatacacttggagcgtcatctcagcgaggtggccctgcagacggccctttcgtgttcttcccgacactatgctgggcgatccttccagattttcagggcactgaagcagcccctgtctgcagacacactctccgatgtcctctcccggctggtggagactgtaggggaccccggagaggatgcacagggatttgtgattgaactgcttctcaccttggaatctgcaattgataccttggctgaaaccatgaagcactatgacctgctgtctgccctctctcaatcctcataccacgatcctgtcatgggaaacaagtatgcagctaacaggaaaagcactggccagctcaatctaagcacaagtcccattaacagcagcggccatttgggatgcaacggggacacaagaagtaactctttgaggttaagtctagttggtgaccgcagaggtgaccggcggcggagtaacacactggacataacggatggacggataaaccacggtggtagcttggcgaggactcgaagcctttcctcgctgagagagaaaggtgtgtacgacacgcagcccccgacggagccgagcaacctgatggccaccatcttttggatagcaacatctctgttagaatccgactatgaatatgaatacctcctggctctcaggcttctgagcaaactgctcacccacttgcctctggataagtcagagagccgggagaagatcgagaacgtacagagcaagttgaaatggagtaacttccccggccttcagcagctcttccttaagggctttacctcagtgtctacccaagagatgaccgtgcacctcctcagtcagctcatttccgtctccaaacacacactggtggatccgtcccaggtgtcaggctttcctcttaacatcctctgcttactgcctcacctaatccagcattttgacagcccaactcagttttgcaaagagacagctagccggatagcaaaggtctgtgcggaagagaagtgcccgacgctggtgaacctggctcacatgatgagtttgtacagcacacatacctactccagagactgttccaactggatcaacgtggtgtgccggtacctgcacgactctttctcagaggcgaccttcagtcttgtgacttacctggcagagctgttagaaaagggactgtccagcatgcagcagtcgttgctacagatcatctacagtctgttgagtcacatcgacttgtctgcggccccggtcaagcagtttaatctggagatcataaagatcattggcaaatacgtacagagcccgtactggaaggaagccctcaacatcctgaagctggtggtgtctcgctctgcaagtcttgtcgtccccaatgacatccccaaggcctacggagtggacgtaggctctcccgaaatctccttcgctaaaattttcaataacgtctcgaaggagctgcccggcaagaccttagattttcactttgacatctctgagacacctatcattgggaacaagtatggaggccaacacagtgccgcgggaaggaatgggaaggcaaaggtgatcgcagtcaccaggagcacgtcctccacctcctctggctccacatccaacgccctagttcctgtcagctggaaaaggccacagttatcacagcggagaacgagagagaagctgatgagcgtgctttccctctgtggccccgaatctggcctccccaagaatccctccgttgtgttttcttcaaatgaggatttggaagtcggggaccaacagaccagcttgatctccaccaccgaggacataattcaagaagaagaagttgccgtcgaagacaacagcagtgagcagcagtttggcgtcttcaaggacttcgacttcttggatgttgaattggaggatgcagagggggagagcatggacaatttcaactggggagtccgccggcgctcgctggacagcattgacaaaggagacacaccatccctccaggagtacccgtgttccagcagcacccccagcctgaccctgacgaaccaggaggataccgacgagtcctcagaggaagaagccgccctcaccgcaagccagatcctgtcacgcacccagatgctgaacagtgactgtgtgacggaggacatgatgcccgagcaccaggacctgctgcagtctcaggattctgctagcagcaacacgacagaagacgtactgcagatcagagacgagacccccagtttggaggcctgtctagataatgctagcagccagctgcctgagggtacaagttcagtattaaaggaggaacacgttacagcctttgaagacgaagggtcatacgttattccagaccaacaggacccgctagtatgtcgagggattcttgatttagaggaaactgacatgccagagcctctggcccctgaaagctaccccgagtccatctgtgaagaggatgtcaccttggctttgaaagagctggatgaacggtgtgaggaggaagaggctgacttctcagggttgtccagtcaagaggaagatgaacaagacggctttccagaagtgcaaacctcgcctctcccgaccccctttctgtctgccataatagcagctttccagccaatggcttacgaggacgaggaagaagcgtggcgttgccatgtcaatcagacgctgtcggacacagacgggtcctgtgcggtgtttactttccacgtgttttcaagactgtttcagacaattcaaaggaagtttggagagataacgaaggaggctgtgggctttcttggtgagagtctacagcgcattggtacctagtttaaaagctcattggaagtgatgatggcctgttctgaatgccccactgtctttgtggatgccgaaacgctgatggcgtgtggcttgctggaaacactcaagtttggcgtcttggagctgcaggaacatctggatacttacaccaccaagagagaagcagccgagcagtggctagacaactgcaagaggacattcggtgccaacgaagacatatacaggatgaacaccaacgcgcatgagctggagctctgcagaaggttgtaccggctgcactttcagctgctgcttctgttccaggcctactgcaaactcatcaaccaagtaaataccatcaagaatgaagcagaggtcatcaacatgtcagaagaacttgcccagctggaaggcatccttaaggaagctgaggccgcttcggaaaatgaagaaattgatatctccaaagcggcccagaccacgatagaaactgccattcactctctgatcgaaaccttgaagaacaaggaatttgtatcagctgtggcacaagtcaaagctttcagaaccctctggcccaatgacatcttcggcagctgtgatgacgaccctgtgcagactctcttacacatctatttccatcaccagacactaggccagacaggcagcttcgcggtcatcagctcaaacctggacatgtcagaagctaactgcaaactgatggaacttaacctggagatcagagagtctctccgcacagtgcagtcatatccgctcctagcacagaccaaaccagttggaaatatgacgagcactggattctgagcaacttgcaaccctcaagagggagtaagctgaagatgatcaagactgctagccaagcaccttttaggaacccttgtgcttcattgataactttgggggcagcacttttaactgtagtctactaacttcaaaaacaaacaaacaaaactgaagaaaaatatctaactgcttaactgctgccgagacctccacagcaactgtatgaagaaggaatttttttttatttttattaacctatgtgaataagaataagggctaaaagtgacacgtacaaactacattactctggagaaaagaagaaattccaaggatgtttgcaataatggccccaagatgttgcagggcagggtgaagtgaggctgggatgggaccaactccttttagctgaagacctgcgcctgcagagccacttggatttccagccaccatcaacacagagttgacacttaatgatcaacttgaccacccagtcagacagataacacagactttttgcaaaaaacaattgggtctggggtttttgttttttgcgactgacgggataagggtttggggtgtttgggtttttgattgttttgtttttgctttttggtttattttggtctgtataaggaattatgtgtgtgtgagttggagtgtgtgtgtatgtgtgtgacagtcctattttcaaggtgtggatgtctggtgacagcttctcagagcatgcctaaaagagcactgcaagattatttttgaagaaattttattttattagatctaactcttcatagtgtgtaaatgttagaacactttaataatattttaaaactgggtttttcccagtgtctc

SEQ ID NO: 650 - protein, 1414 aa, Mus musculus
MYWAVDRCYTGSRRVAAGCFKAIANVFQNRDYQCDTVMLLNLILFKAADSSRSIYEVAMQLLQILEPKMFRYAHKLEVQRTDGVLSQLSPLPHLYSVSYYQLSEELARAYPELTLAIFSEISQRIQTAHPAGRQAMLHYLLPWMNNIELVDLKPLPSGRRQDEDEDDSLKDRELMVTSRRWLRGEGWGSPQATAMVLNNLMYMTAKYGDELAWSEVENVWTTLADGWPKNLKIILHFLISICGVNSEPSLLPYVKKVIVYLGRDKTMQLLEELVSELQLTDPVSSGVTHMDNPPYYRITSSCKIPSVTSGTTSSSNTMVAPTDGNPDSKALKENFEESYVHLDIYGGLNSHLNRQHHRLESRYSSSSGGSYEEEKSDSMPLYSNWRLKVMEHNQGEPLPFPPAGGCWSPLVDYVPETASPGLPLHRCNIAVILLTDLIIDHSVKVEWGSYLHLLLHAIFIGFDHCHPEVYEHCKRLLLHLLIVMGPNSDIRTVASVLLRDKEFNEPRVLTVKQTAHSDYTFTGINDFTPDYQPSPMTDSGLSSSSTSSSISLGNNSAAISHLHTTLLGEVDLSVEQDGKVKTLMEFITSRKRGPLWNHEDVSSKNPSIKSADQLATFLKHVVSVFKQSNAEGIHLERHLSEVALQTALSCSSRHYAGRSFQIFRALKQPLSADTLSDVLSRLVETVGDPGEDAQGFVIELLLTLESAIDTLAETMKHYDLLSALSQSSYHDPVMGNKYAANRKSTGQLNLSTSPINSSGHLGCNGDTRSNSLRLSLVGDRRGDRRRSNTLDITDGRINHGGSLARTRSLSSLREKGVYDTQPPTEPSNLMATIFWIATSLLESDYEYEYLLALRLLSKLLTHLPLDKSESREKIENVQSKLKWSNFPGLQQLFLKGFTSVSTQEMTVHLLSQLISVSKHTLVDPSQVSGFPLNILCLLPHLIQHFDSPTQFCKETASRIAKVCAEEKCPTLVNLAHMMSLYSTHTYSRDCSNWINVVCRYLHDSFSEATFSLVTYLAELLEKGLSSMQQSLLQIIYSLLSHIDLSAAPVKQFNLEIIKIIGKYVQSPYWKEALNILKLVVSRSASLVVPNDIPKAYGVDVGSPEISFAKIFNNVSKELPGKTLDFHFDISETPIIGNKYGGQHSAAGRNGKAKVIAVTRSTSSTSSGSTSNALVPVSWKRPQLSQRRTREKLMSVLSLCGPESGLPKNPSVVFSSNEDLEVGDQQTSLISTTEDIIQEEEVAVEDNSSEQQFGVFKDFDFLDVELEDAEGESMDNFNWGVRRRSLDSIDKGDTPSLQEYPCSSSTPSLTLTNQEDTDESSEEEAALTASQILSRTQMLNSDCVTEDMMPEHQDLLQSQDSASSNTTEDVLQIRDETPSLEACLDNASSQLPEGTSSVLKEEHVTAFEDEGSYVI

SEQ ID NO: 651 - DNA, 1109 bp, Mus musculus
aagagcctgggcagcaccgctggccgcgccacatcccggcgctgttgtgtccgcgcgtatccaggcggctctcgtgcaacgcggtctcgggacgcgcccatgcggccgctcaccatgtctgggcactttctgctggcccccatcccggagtcctcctctgactacctcctgcccaaggacatcaagctggccgtgctgggagcgggttgtgtgggcaagagcgcaatgattgtgcgcttcttgaccaagagattcatcggcgactacgaacccaacacaggcaagaatgtttccgtgcttcctggctcttgcaaactgtattcgagactcgtctatgtggagggggaccagctatccctacagatccaggacactccgggaggcattcaggcccaagacagcctcagtcaaatggtggattctctgaccaaaagtgtgcactgggcagagggctttctgctggtttattccataacagactatgagagctaccaatccatccggcccctttaccagcacatccggaaggtccaccctgatggaaaagcccccatcttcatcgtgggaaacaaaggagaccttttgcatgcccggcaggtgcagacacacgaaggccttcagctagctaatgagctgggcagtctcttccttgaaatttctactagtgagaactacgaagacgtctgtgatgtgttccaacatctctgcaaagaagtgatcaaggtgcacagactcggtggggaacggaggagggcatccgtcattccccggcctcgatcccccaacatgcaggacctgaagaggcgcttcaggcaggccctgtcctccaaagcgaaagcgtcctccgccctggggtgatccagctcagatagactggcgggttgctattattactactagacatttgtgcagccacaaagactggccctttccccctttaaaacatattcagagtttatttttataatgactttattggctttcaagtgtatgtatatttctgaaaattcaaacaatggattttttttaaatgtgtttttttttttttgtttttttgtttttactgtaactgttagccactcttccattaaaggcaaaatggcaatact

SEQ ID NO: 652 - protein, 252 aa, Mus musculus
MRPLTMSGHFLLAPIPESSSDYLLPKDIKLAVLGAGCVGKSAMIVRFLTKRFIGDYEPNTGKNVSVLPGSCKLYSRLVYVEGDQLSLQIQDTPGGIQAQDSLSQMVDSLTKSVHWAEGFLLVYSITDYESYQSIRPLYQHIRKVHPDGKAPIFIVGNKGDLLHARQVQTHEGLQLANELGSLFLEISTSENYEDVCDVFQHLCKEVIKVHRLGGERRRASVIPRPRSPNMQDLKRRFRQALSSKAKASSALG

SEQ ID NO: 653 - DNA, 447 bp, Mus musculus
tcagcaatgattgtgcgcttcttgaccaagagattcatcggcgactacgaacccaacacaggcaagaatgtttccgtgcttcctggctcttcttctttgaccagattccattttgttttttcccaggcccaagacagcctcagtcaaatggtggattctctgaccaaaagtgtgcactgggcagagggctttctgctggtttattccataacagactatgagagctaccaatccatccggcccctttaccagcacatccggaaggtccaccctgatggaaaagcccccatcttcatcgtgggaaacaaaggagaccttttgcatgcccggcaggtgcagacacacgaaggccttcagctagctaatgagctgggcagtctcttccttgaaatttctactagtgagaactacgaagacgtctgtgatgtgttccaacatctctgcaaa

SEQ ID NO: 654 - protein, 149 aa, Mus musculus
SAMIVRFLTKRFIGDYEPNTGKNVSVLPGSSSLTRFHFVFSQAQDSLSQMVDSLTKSVHWAEGFLLVYSITDYESYQSIRPLYQHIRKVHPDGKAPIFIVGNKGDLLHARQVQTHEGLQLANELGSLFLEISTSENYEDVCDVFQHLCK

SEQ ID NO: 655 - DNA, 5525 bp, Mus musculus
aacacgaggaaattctgcaaccctctctgtgggttgtttatatcctcaccttcctctaccatttctgggcagagaagactgctagactgcttctcactctaattccttttctccttgtccaggtggcctgtgatgtgactgtctcggcttccatgaggaacaaagccataggtgctgaaacaactggcactccagacactacagtcaccaggaccactcttaactctcccaattgcccagtgctaagtgagctggaacggataaattgcatccctgaccagtcatctaacaagggcacatgtgatgagcgaggctgctgctgggatcctcagggatccatcagtgttccttgctattactccaggaatcatggctacaaaatggagagtgacgttgtaaacacaaatgcaggattcacagccacactgaaaaacttaccttctgcacccgtgtttggaaacagcatcgaaaacatcctgcttacagcagagtaccagacatcaaatcgcttccactttaagttgactgaccaaaccaagaagaggtacgaagtgccccacgagcacgtgcaacccttcagtggaaatgccccttcttccttgaactacaaagttgaggtttccaaggagccatttagcatcaaagtcaccagaaaaagcaataaccgtgtgctgtttgactcaagtattgggcccctcctcttctctgaccagttcctgcagttctctacccacctgccaagtgctaatgtatatggtctgggtgaacatgtgcaccagcagtaccgacacaatatgaattggaagacctggcccatgttttccagagacacaaccccgaatgaggatggaactaacttgtatggtgtgcagacgttcttcctgtgccttgaagataacagtggattgtccttcggggtgtttctgatgaacagcaatgccatggaggttactcttcagcctaccccagcaatcacataccgcaccactgggggaattctggacttctatgtgttcttggggaacacacctgagcaagttgttcaagaatatctagagctcattggacggccagctctgccttcatactggacacttgggtttcagctcagccggtatgattataaaagcctagataatatgaaagcagttgtggagagaaaccgtgcagcacaactcccttatgatgttcagcatgctgatattgattatatggatcagaagaaggacttcacttatgacccagtgaattttaaaggcttcccagagtttgttaaggagctacacaataatgggcagaaacttgttatcattttggatccagcaatttccaacaactctttctcaagtaatccttatggcccatatgacaggggttcagcaatgaaaatctgggtgaatagttctgatggcatcagtccagtcattggaaaggtctggcctggaacaactgtgtttcctgattacaccagtcccaactgtgctgtttggtggacaaaagaatttgagcttttccacaaagaagtggagtttgatggaatttggattgatatgaacgaagtctccaactttattgatggttcattttctggatgttcccaaaacaacttgaattatcccccattcacaccaaaagtcctggatgggtacttgttctctaagactctctgcatggatgccgttcagcactgggggaagcagtatgatgtccacaatctatatggctactccatggccattgccacagcaaaagccgtgaaggacgtgttcccagacaagagaagcttcatcataacccgctctacctttgctggttctggcaaatttgcagcccactggttaggagataacaccgccacctggaaggaccttcagtggtccatcccaggcatgcttgagttcaacctcttcggtatcccaatggtaggggccgatatatgtggctttgcccaagacacatacgaggagctctgcaggcgctggatgcagctgggggcattttatccattttctcggaatcacaatggccaaggttacaaggaccaggatcctgcctcttttgggaataactccctgctgttgaattcgtctaggcactaccttaacatccgctacactttgctgccttacctctacactcttttctacagagcacacagccggggagacactgtagctaggcctcttctgcatgagttctatgacgacaacaatacttggggcatagaccggcaatttctttggggaccaggtcttctcatcactcctgttctggatcaggcaaagaaagtgaaagcatatgtgcctaatgccacctggtacgactatgaaaccggagaggaactggggtggagaaagcaaagcattgagatgcaacttcctggagacaagattggacttcaccttcgagggggctacatctttcccacacaacagcctgccacaaccacagaagccagccggaagaatcctcttggtcttattgtcgccctggatgagaacaaagaagcaagaggagagctgttctgggatgatggggagtcgaaggacactgtggccaaaaacatttaccttttcagcgaattttctgttacccaaaaccatttggatgtgacaatttcaagtccaaactacaaggatcccaataacctagaattccaggaaattaaaatctttggaacacaggaattcagcaatgttagagtgaaacagaatgggaatctccttcaaatgtctcctcaagtcacttacaatccaaacctgaaggttgccaccatcacaaatatccatctcaggctgggagaagcgtacacggttgagtggggcttcttcacaagggaggaggaaaggatagattgctatccagatgagcatggtgcttctgaggcaaactgcagtgcccgtggctgcatctgggaggaatccaacactattggggtccctacttgctactttgctcatgagctgtactcagtcagcaatgttcagtatgactcacatggggccacagctgacatctccttgaaggcttctacttatagcaatgccttcccctctacacctgtgaataaactgaaactgcaagtgacctaccacaagaatgaaatgctgcagtttaagatttatgatcccaacaacagtcggtatgaagtcccagtccctctgaatatccccagtgctccatccagcaccaacgaaggccgtctgtatgatgtcctcatcaaggagaatccatttggaattcaagttcgccgaaagagcacaggcactgtaatctgggactctcagctcctcggcttcaccttcaatgacatgttcatccgcatctccacccgcctgccctccacatacatctatggctttggggaaactgagcatacaaccttcaagatagacatgaactggcacacatggggcatgttttccagggatgagcccccggggtacaagaagaattcctatggtgtccacccttactacatgggtctggaggaggatggcaatgcccatggagtcctcctgatgaacagcaatgccatggatgtgacgttccagcctatgcctgctttgacataccgaaccacagggggtattttggatttctatgtgctcttgggcccaacaccagagattgtcactcagcaatacacagagttgattggtcggcctgtgatggtaccttactggtccctgggattccagctgtgtcgctatggatatgagaatgattctgaaatcgccagcttatatgatgagatggtggataagcagatcccctatgatgtgcagtactcagacattgactacatggagaggcagctggacttcaagctcagccccaagttctctgggtttccagccctgatcaatcgcatgaaggccaatgggatgagggtcatcctcattctggatccagccatttctggcaatgagacacagccctatcctgccttcacccggggcgtggagaatgacgtcttcatcagatatcccaataatggaagcattgtctggggaaaggtctggcctgattaccctaatatcactgtggacccttctttaggctgggaccatcaagtggagcaataccgagcctatgtggccttcccagactttttccgtaattcaactgccacgtggtggaaaaaggagattgaagaactctacacgaacacagaggaaccagaaaagagcttgaagtttgatggcctgtggattgatatgaatgaaccttccagctttgtgaacggggcagttccttcaggctgcagtgatgctactctgaaccatccaccctacatgccacacgttgaaggcagagacaggggcctgagcagcaagacgctgtgcatggagagtgagcacatccttccagatggctcccgagtgcagcactatgatgtgcacagcctgtacgggtggtcccagaccagacccacctacgaagctgtgcaggaggtgaccggagagagagggatcgtcatcacacgctccacattcccctcttctggacgctggggaggacactggctgggagacaacacagctgcctgggaccagctggggaaatccatcattggcatgatggatttcagcctctttggcatatcctataccgggtcagacatctgtgggttctttcaagatgctgagtatgagatgtgtgttcgctggatgcagctgggcgccttttaccccttctccaggaaccacaacaccattgggaccaagagacaagaccctgtatcctggaataaaacctttgaggatatttccagaagtgtgttggaaaccagatacaccctgttgccatatctctacaccttgatgtacaaggcccacacggagggcagcacagttgtgaggcctcttctccatgagtttgtgtcagaccgggagacctggaatatagacaaacagttcctgttgggcccagccttcctagtcagccctgtgcttgagcctaatgccagaaaggttgaagcatattttcccagggcccgctggtatgactactacaagggtgtagatatcaatgcaacgggagagtggaagaccttggaagcccctcttgagtacattaatcttcatattcgtgggggttatattctgccctggcaggaacctgccatgaacacccatttaagccggcagaagttcatgggcctcagggctgcgttgaatgctgagggacgtgctgagggctggctcttctgggatgatgggaaaaggatcaaaacatatgaaaaaggaaactatttcttggctacctttagagcagaaaagaacagcttgaaaatccagatcccacataataagtttctgagtgacacaaatccactgagaattggatacattagaatctggggtttaaacaatacttatgtggtacaggtcttttgtacctacaacaaccagcaattctcccaggatgattttacaagtgagccccacaatcagaaattaacaattcgattgactggaaagaatatgaacctagagaagttgactgaagttacttgggtt

SEQ ID NO: 656 - protein, 1730 aa, Mus musculus
SISVPCYYSRNHGYKMESDVVNTNAGFTATLKNLPSAPVFGNSIENILLTAEYQTSNRFHFKLTDQTKKRYEVPHEHVQPFSGNAPSSLNYKVEVSKEPFSIKVTRKSNNRVLFDSSIGPLLFSDQFLQFSTHLPSANVYGLGEHVHQQYRHNMNWKTWPMFSRDTTPNEDGTNLYGVQTFFLCLEDNSGLSFGVFLMNSNAMEVTLQPTPAITYRTTGGILDFYVFLGNTPEQVVQEYLELIGRPALPSYWTLGFQLSRYDYKSLDNMKAVVERNRAAQLPYDVQHADIDYMDQKKDFTYDPVNFKGFPEFVKELHNNGQKLVIILDPAISNNSFSSNPYGPYDRGSAMKIWVNSSDGISPVIGKVWPGTTVFPDYTSPNCAVWWTKEFELFHKEVEFDGIWIDMNEVSNFIDGSFSGCSQNNLNYPPFTPKVLDGYLFSKTLCMDAVQHWGKQYDVHNLYGYSMAIATAKAVKDVFPDKRSFIITRSTFAGSGKFAAHWLGDNTATWKDLQWSIPGMLEFNLFGIPMVGADICGFAQDTYEELCRRWMQLGAFYPFSRNHNGQGYKDQDPASFGNNSLLLNSSRHYLNIRYTLLPYLYTLFYRAHSRGDTVARPLLHEFYDDNNTWGIDRQFLWGPGLLITPVLDQAKKVKAYVPNATWYDYETGEELGWRKQSIEMQLPGDKIGLHLRGGYIFPTQQPATTTEASRKNPLGLIVALDENKEARGELFWDDGESKDTVAKNIYLFSEFSVTQNHLDVTISSPNYKDPNNLEFQEIKIFGTQEFSNVRVKQNGNLLQMSPQVTYNPNLKVATITNIHLRLGEAYTVEWGFFTREEERIDCYPDEHGASEANCSARGCIWEESNTIGVPTCYFAHELYSVSNVQYDSHGATADISLKASTYSNAFPSTPVNKLKLQVTYHKNEMLQFKIYDPNNSRYEVPVPLNIPSAPSSTNEGRLYDVLIKENPFGIQVRRKSTGTVIWDSQLLGFTFNDMFIRISTRLPSTYIYGFGETEHTTFKIDMNWHTWGMFSRDEPPGYKKNSYGVHPYYMGLEEDGNAHGVLLMNSNAMDVTFQPMPALTYRTTGGILDFYVLLGPTPEIVTQQYTELIGRPVMVPYWSLGFQLCRYGYENDSEIASLYDEMVDKQIPYDVQYSDIDYMERQLDFKLSPKFSGFPALINRMKANGMRVILILDPAISGNETQPYPAFTRGVENDVFIRYPNNGSIVWGKVWPDYPNITVDPSLGWDHQVEQYRAYVAFPDFFRNSTATWWKKEIEELYTNTEEPEKSLKFDGLWIDMNEPSSFVNGAVPSGCSDATLNHPPYMPHVEGRDRGLSSKTLCMESEHILPDGSRVQHYDVHSLYGWSQTRPTYEAVQEVTGERGIVITRSTFPSSGRWGGHWLGDNTAAWDQLGKSIIGMMDFSLFGISYTGSDICGFFQDAEYEMCVRWMQLGAFYPFSRNHNTIGTKRQDPVSWNKTFEDISRSVLETRYTLLPYLYTLMYKAHTEGSTVVRPLLHEFVSDRETWNIDKQFLLGPAFLVSPVLEPNARKVEAYFPRARWYDYYKGVDINATGEWKTLEAPLEYINLHIRGGYILPWQEPAMNTHLSRQKFMGLRAALNAEGRAEGWLFWDDGKRIKTYEKGNYFLATFRAEKNSLKIQIPHNKFLSDTNPLRIGYIRIWGLNNTYVVQVFCTYNNQQFSQDDFTSEPHNQKLTIRLTGKNMNLEKLTEVTWV

SEQ ID NO: 657 - DNA, 5556 bp, Mus musculus
aacacgaggaaattctgcaaccctctctgtgggttgtttatatcctcaccttcctctaccatttctgggcagagaagactgctagactgcttctcactctaattccttttctccttgtccaggtggcctgtgatgtgactgtctcggcttccatgaggaacaaagatggcgggacggaggtttaagaagttcagcaagctggagcttgttctcattgttctgctgcttgtcctgttcatcatcgcggtggttctaattgtgctcttagccaactcgactccagaaaatgacactacagtcaccaggaccactcttaactctcccaattgcccagtgctaagtgagctggaacggataaattgcatccctgaccagtcatctaacaagggcacatgtgatgagcgaggctgctgctgggatcctcagggatccatcagtgttccttgctattactccaggaatcatggctacaaaatggagagtgacgttgtaaacacaaatgcaggattcacagccacactgaaaaacttaccttctgcacccgtgtttggaaacagcatcgaaaacatcctgcttacagcagagtaccagacatcaaatcgcttccactttaagttgactgaccaaaccaagaagaggtacgaagtgccccacgagcacgtgcaacccttcagtggaaatgccccttcttccttgaactacaaagttgaggtttccaaggagccatttagcatcaaagtcaccagaaaaagcaataaccgtgtgctgtttgactcaagtattgggcccctcctcttctctgaccagttcctgcagttctctacccacctgccaagtgctaatgtatatggtctgggtgaacatgtgcaccagcagtaccgacacaatatgaattggaagacctggcccatgttttccagagacacaaccccgaatgaggatggaactaacttgtatggtgtgcagacgttcttcctgtgccttgaagataacagtggattgtccttcggggtgtttctgatgaacagcaatgccatggaggttactcttcagcctaccccagcaatcacataccgcaccactgggggaattctggacttctatgtgttcttggggaacacacctgagcaagttgttcaagaatatctagagctcattggacggccagctctgccttcatactggacacttgggtttcagctcagccggtatgattataaaagcctagataatatgaaagcagttgtggagagaaaccgtgcagcacaactcccttatgatgttcagcatgctgatattgattatatggatcagaagaaggacttcacttatgacccagtgaattttaaaggcttcccagagtttgttaaggagctacacaataatgggcagaaacttgttatcattttggatccagcaatttccaacaactctttctcaagtaatccttatggcccatatgacaggggttcagcaatgaaaatctgggtgaatagttctgatggcatcagtccagtcattggaaaggtctggcctggaacaactgtgtttcctgattacaccagtcccaactgtgctgtttggtggacaaaagaatttgagcttttccacaaagaagtggagtttgatggaatttggattgatatgaacgaagtctccaactttattgatggttcattttctggatgttcccaaaacaacttgaattatcccccattcacaccaaaagtcctggatgggtacttgttctctaagactctctgcatggatgccgttcagcactgggggaagcagtatgatgtccacaatctatatggctactccatggccattgccacagcaaaagccgtgaaggacgtgttcccagacaagagaagcttcatcataacccgctctacctttgctggttctggcaaatttgcagcccactggttaggagataacaccgccacctggaaggaccttcagtggtccatcccaggcatgcttgagttcaacctcttcggtatcccaatggtaggggccgatatatgtggctttgcccaagacacatacgaggagctctgcaggcgctggatgcagctgggggcattttatccattttctcggaatcacaatggccaaggttacaaggaccaggatcctgcctcttttgggaataactccctgctgttgaattcgtctaggcactaccttaacatccgctacactttgctgccttacctctacactcttttctacagagcacacagccggggagacactgtagctaggcctcttctgcatgagttctatgacgacaacaatacttggggcatagaccggcaatttctttggggaccaggtcttctcatcactcctgttctggatcaggcaaagaaagtgaaagcatatgtgcctaatgccacctggtacgactatgaaaccggagaggaactggggtggagaaagcaaagcattgagatgcaacttcctggagacaagattggacttcaccttcgagggggctacatctttcccacacaacagcctgccacaaccacagaagccagccggaagaatcctcttggtcttattgtcgccctggatgagaacaaagaagcaagaggagagctgttctgggatgatggggagtcgaaggggaatctatgtgttcataatttattcataactatgcgtggtatgtttcagaaccatttggatgtgacaatttcaagtccaaactacaaggatcccaataacctagaattccaggaaattaaaatctttggaacacgggaattccgcaatgttagagtgaaacagaatgggaatctccttcaaatgtctcctcaagtcacttacaatccaaacctgaaggttgccaccatcacaaatatccatctcaggctgggagaagcgtacacggttgagtgggacttcttcacaagggaggaggaaaggatagattgctatccagatgagcatggtgcttctgaggcaaactgcagtgcccgtggctgcatctgggaggcatccaacactactaggggccctccttgctactttgctcatgagctgtactcagtcagcaatgttcagtacgactcacatggggccacagctgacatctccttgaaggcttctacttatagcaatgccttcccctctacacctgtgaataaactgaaactgcaagtgacctatcacaagaacgaaatgctgcagtttaagatttatgatcccaacaacagtcggtatgaagtcccagtccctctgaatatccccagtgctccatccagcaccaacgaaggccgtctgtatgatgtcctcatcaaggagaatccatttggaattcaagttcgccgaaagagcacaggcactgtaatctgggactctcagctcctcggcttcaccttcaatgacatgttcatccgcatctccacccgcctgccctccacatacatctatggctttggggaaactgagcatacaaccttcaagatagacatgaactggcacacatggggcatgttttccagggatgagcccccggggtacaagaagaattcctatggtgtccacccttactacatgggtctggaggaggatggcaatgcccatggagtcctcctgatgaacagcaatgccatggatgtgacgttccagcctatgcctgctttgacataccgaaccacagggggtattttggatttctatgtgctcttgggcccaacaccagagattgtcactcagcaatacacagagttgattggtcggcctgtgatggtaccttactggtccctgggattccagctgtgtcgctatggatatgagaatgattctgaaatcgccagcttatatgatgagatggtggataagcagatcccctatgatgtgcagtactcagacattgactacatggagaggcagctggacttcaagctcagccccaagttctctgggtttccagccctgatcaatcgcatgaaggccaatgggatgagggtcatcctcattctggatccagccatttctggcaatgagacacagccctatcctgccttcacccggggcgtggagaatgacgtcttcatcagatatcccaataatggaagcattgtctggggaaaggtctggcctgattaccctaatatcactgtggacccttctttaggctgggaccatcaagtggagcaataccgagcttatgtggccttcccagactttttccgtaattcaactgctacatggtggaagaaggagattaaagaactccacagcaacacacaggatcctgccaagagcttgaagtttgatggcctgtggattgatatgaatgaaccttccagctttgtgaatggggcagttccttctggctgcagcgatgctactctgaaccaccctccctacatgccatatttggaagccagggacaggggcctgagcagtaagaccctgtgcatggagagtgagcagatccttccagatggctcccgggtacggcactatgatgtacacaacctgtatgggtggtcccagaccagacctacctacgaagctgtgcaggaggtgacaggagagagagggatcgtcatcacacgctccacattcccctcttctggacgctggggaggacactggctgggagacaacacagctgcctgggaccagctggggaaatccatcattggcatgatggatttcagcctcttcggcatatcctataccgggtcagacatctgtgggttctttcaagatgctgagtatgagatgtgtgttcgctggatgcagctgggcgccttttaccccttctccaggaaccacaacaccatcgggacccggagacaagaccctgtatcctggaataaaacctttgaggatatttccagaagtgtgttggaaaccagatacaccctgttgccatatctctacaccttgatgtacaaggcccacacggagggcagcacagttgtgaggcctcttctccatgagtttgtgtcagaccgggagacctggaatatagacaaacagttcctgttgggcccagccttcctagtcagccctgtgcttgagcctaatgccagaaaggttgaagcatattttcccagggcccgctggtatgactactacaagggtgtagatatcaatgcaacgggagagtggaagaccttggaagcccctcttgagtacattaatcttcatattcgtgggggttatattctgccctggcaggaacctgccatgaacacccatttaagtcgacaaaatttgatgggattgacggttgctttggataatgatgggaaggctgaaggccaattgttttgggatgatggacaaagcattgaaacatatgaaaaaggaaactatttcttggctacctttagagcagaaaagaacagcttgaaaatccagatcccacataataagtttctgagtgacacaaatccactgagaattggatacattagaatctggggtttaaacaatacttatgtggtacaggtcttttgtacctacaacaaccagcaattctcccaggatgattttacaagtgagccccacaatcaggta

SEQ ID NO: 658 - protein, 1791 aa, Mus musculus
KKFSKLELVLIVLLLVLFIIAVVLIVLLANSTPENDTTVTRTTLNSPNCPVLSELERINCIPDQSSNKGTCDERGCCWDPQGSISVPCYYSRNHGYKMESDVVNTNAGFTATLKNLPSAPVFGNSIENILLTAEYQTSNRFHFKLTDQTKKRYEVPHEHVQPFSGNAPSSLNYKVEVSKEPFSIKVTRKSNNRVLFDSSIGPLLFSDQFLQFSTHLPSANVYGLGEHVHQQYRHNMNWKTWPMFSRDTTPNEDGTNLYGVQTFFLCLEDNSGLSFGVFLMNSNAMEVTLQPTPAITYRTTGGILDFYVFLGNTPEQVVQEYLELIGRPALPSYWTLGFQLSRYDYKSLDNMKAVVERNRAAQLPYDVQHADIDYMDQKKDFTYDPVNFKGFPEFVKELHNNGQKLVIILDPAISNNSFSSNPYGPYDRGSAMKIWVNSSDGISPVIGKVWPGTTVFPDYTSPNCAVWWTKEFELFHKEVEFDGIWIDMNEVSNFIDGSFSGCSQNNLNYPPFTPKVLDGYLFSKTLCMDAVQHWGKQYDVHNLYGYSMAIATAKAVKDVFPDKRSFIITRSTFAGSGKFAAHWLGDNTATWKDLQWSIPGMLEFNLFGIPMVGADICGFAQDTYEELCRRWMQLGAFYPFSRNHNGQGYKDQDPASFGNNSLLLNSSRHYLNIRYTLLPYLYTLFYRAHSRGDTVARPLLHEFYDDNNTWGIDRQFLWGPGLLITPVLDQAKKVKAYVPNATWYDYETGEELGWRKQSIEMQLPGDKIGLHLRGGYIFPTQQPATTTEASRKNPLGLIVALDENKEARGELFWDDGESKGNLCVHNLFITMRGMFQNHLDVTISSPNYKDPNNLEFQEIKIFGTREFRNVRVKQNGNLLQMSPQVTYNPNLKVATITNIHLRLGEAYTVEWDFFTREEERIDCYPDEHGASEANCSARGCIWEASNTTRGPPCYFAHELYSVSNVQYDSHGATADISLKASTYSNAFPSTPVNKLKLQVTYHKNEMLQFKIYDPNNSRYEVPVPLNIPSAPSSTNEGRLYDVLIKENPFGIQVRRKSTGTVIWDSQLLGFTFNDMFIRISTRLPSTYIYGFGETEHTTFKIDMNWHTWGMFSRDEPPGYKKNSYGVHPYYMGLEEDGNAHGVLLMNSNAMDVTFQPMPALTYRTTGGILDFYVLLGPTPEIVTQQYTELIGRPVMVPYWSLGFQLCRYGYENDSEIASLYDEMVDKQIPYDVQYSDIDYMERQLDFKLSPKFSGFPALINRMKANGMRVILILDPAISGNETQPYPAFTRGVENDVFIRYPNNGSIVWGKVWPDYPNITVDPSLGWDHQVEQYRAYVAFPDFFRNSTATWWKKEIKELHSNTQDPAKSLKFDGLWIDMNEPSSFVNGAVPSGCSDATLNHPPYMPYLEARDRGLSSKTLCMESEQILPDGSRVRHYDVHNLYGWSQTRPTYEAVQEVTGERGIVITRSTFPSSGRWGGHWLGDNTAAWDQLGKSIIGMMDFSLFGISYTGSDICGFFQDAEYEMCVRWMQLGAFYPFSRNHNTIGTRRQDPVSWNKTFEDISRSVLETRYTLLPYLYTLMYKAHTEGSTVVRPLLHEFVSDRETWNIDKQFLLGPAFLVSPVLEPNARKVEAYFPRARWYDYYKGVDINATGEWKTLEAPLEYINLHIRGGYILPWQEPAMNTHLSRQNLMGLTVALDNDGKAEGQLFWDDGQSIETYEKGNYFLATFRAEKNSLKIQIPHNKFLSDTNPLRIGYIRIWGLNNTYVVQVFCTYNNQQFSQDDFTSEPHNQV

SEQ ID NO: 659 - DNA, 5526 bp, Mus musculus
gcgggacggaggtttaagaagttcagcaagctggagcttgttctcattgttctgctgcttgtcctgttcatcatcgcggtggttctaattgtgctcttagccaactcgactccagaaaatggtacaagtcactctgagtctctcccatgccagagcaaactcaccacccatggtgctgaaacaactggcactccagacactacagtcaccaggaccactcttaactctcccaattgcccagtgctaagtgagctggaacggataaattgcatccctgaccagtcatctaacaagggcacatgtgatgagcgaggctgctgctgggatcctcagggatccatcagtgttccttgctattactccaggaatcatggctacaaaatggagagtgacgttgtaaacacaaatgcaggattcacagccacactgaaaaacttaccttctgcacccgtgtttggaaacagcatcgaaaacatcctgcttacagcagagtaccagacatcaaatcgcttccactttaagttgactgaccaaaccaagaagaggtacgaagtgccccacgagcacgtgcaacccttcagtggaaatgccccttcttccttgaactacaaagttgaggtttccaaggagccatttagcatcaaagtcaccagaaaaagcaataaccgtgtgctgtttgactcaagtattgggcccctcctcttctctgaccagttcctgcagttctctacccacctgccaagtgctaatgtatatggtctgggtgaacatgtgcaccagcagtaccgacacaatatgaattggaagacctggcccatgttttccagagacacaaccccgaatgaggatggaactaacttgtatggtgtgcagacgttcttcctgtgccttgaagataacagtggattgtccttcggggtgtttctgatgaacagcaatgccatggaggttactcttcagcctaccccagcaatcacataccgcaccactgggggaattctggacttctatgtgttcttggggaacacacctgagcaagttgttcaagaatatctagagctcattggacggccagctctgccttcatactggacacttgggtttcagctcagccggtatgattataaaagcctagataatatgaaagcagttgtggagagaaaccgtgcagcacaactcccttatgatgttcagcatgctgatattgattatatggatcagaagaaggacttcacttatgacccagtgaattttaaaggcttcccagagtttgttaaggagctacacaataatgggcagaaacttgttatcattttggatccagcaatttccaacaactctttctcaagtaatccttatggcccatatgacaggggttcagcaatgaaaatctgggtgaatagttctgatggcatcagtccagtcattggaaaggtctggcctggaacaactgtgtttcctgattacaccagtcccaactgtgctgtttggtggacaaaagaatttgagcttttccacaaagaagtggagtttgatggaatttggattgatatgaacgaagtctccaactttattgatggttcattttctggatgttcccaaaacaacttgaattatcccccattcacaccaaaagtcctggatgggtacttgttctctaagactctctgcatggatgccgttcagcactgggggaagcagtatgatgtccacaatctatatggctactccatggccattgccacagcaaaagccgtgaaggacgtgttcccagacaagagaagcttcatcataacccgctctacctttgctggttctggcaaatttgcagcccactggttaggagataacaccgccacctggaaggaccttcagtggtccatcccaggcatgcttgagttcaacctcttcggtatcccaatggtaggggccgatatatgtggctttgcccaagacacatacgaggagctctgcaggcgctggatgcagctgggggcattttatccattttctcggaatcacaatggccaaggttacaaggaccaggatcctgcctcttttgggaataactccctgctgttgaattcgtctaggcactaccttaacatccgctacactttgctgccttacctctacactcttttctacagagcacacagccggggagacactgtagctaggcctcttctgcatgagttctatgacgacaacaatacttggggcatagaccggcaatttctttggggaccaggtcttctcatcactcctgttctggatcaggcaaagaaagtgaaagcatatgtgcctaatgccacctggtacgactatgaaaccggagaggaactggggtggagaaagcaaagcattgagatgcaacttcctggagacaagattggacttcaccttcgagggggctacatctttcccacacaacagcctgccacaaccacagaagccagccggaagaatcctcttggtcttattgtcgccctggatgagaacaaagaagcaagaggagagctgttctgggatgatggggagtcgaaggatactgtggcccaaaacatttaccttttcagtgaattttctgtcactcaaaaccatttggatgtgacaatttcaagtccaaactacaaggatcccaataacctagaattccaggaaattaaaatctttggaacacaggaattcagcaatgttagagtgaaacagaatgggaatctccttcaaatgtctcctcaagtcacttacaatccaaacctgaaggttgccaccatcacaaatatccatctcaggctgggagaagcgtacacggttgagtggggcttcttcacaagggaggaggaaaggatagattgctatccagatgagcatggtgcttctgaggcaaactgcagtgcccgtggctgcatctgggaggaatccaacactattggggtccctacttgctactttgctcatgagctgtactcagtcagcaatgttcagtatgactcacatggggccacagctgacatctccttgaaggcttctacttatagcaatgccttcccctctacacctgtgaataaactgaaactgcaagtgacctaccacaagaatgaaatgctgcagtttaagatttatgatcccaacaacagtcggtatgaagtcccagtccctctgaatatccccagtgctccatccagcaccaacgaaggccgtctgtatgatgtcctcatcaaggagaatccatttggaattcaagttcgccgaaagagcacaggcactgtaatctgggactctcagctcctcggcttcaccttcaatgacatgttcatccgcatctccacccgcctgccctccacatacatctatggctttggggaaactgagcatacaaccttcaagatagacatgaactggcacacatggggcatgttttccagggatgagcccccggggtacaagaagaattcctatggtgtccacccttactacatgggtctggaggaggatggcaatgcccatggagtcctcctgatgaacagcaatgccatggatgtgacgttccagcctatgcctgctttgacataccgaaccacagggggtattttggatttctatgtgctcttgggcccaacaccagagattgtcactcagcaatacacagagttgattggtcggcctgtgatggtaccttactggtccctgggattccagctgtgtcgctatggatatgagaatgattctgaaatcgccagcttatatgatgagatggtggataagcagatcccctatgatgtgcagtactcagacattgactacatggagaggcagctggacttcaagctcagccccaagttctctgggtttccagccctgatcaatcgcatgaaggccaatgggatgagggtcatcctcattctggatccagccatttctggcaatgagacacagccctatcctgccttcacccggggcgtggagaatgacgtcttcatcagatatcccaataatggaagcattgtctggggaaaggtctggcctgattaccctaatatcactgtggacccttctttaggctgggaccatcaagtggagcaataccgagcctatgtggccttcccagactttttccgtaattcaactgccacgtggtggaaaaaggagattgaagaactctacacgaacacagaggaaccagaaaagagcttgaagtttgatggcctgtggattgatatgaatgaaccttccagctttgtgaacggggcagttccttcaggctgcagtgatgctactctgaaccatccaccctacatgccacacgttgaaggcagagacaggggcctgagcagcaagacgctgtgcatggagagtgagcacatccttccagatggctcccgagtgcagcactatgatgtgcacagcctgtacgggtggtcccagaccagacccacctacgaagctgtgcaggaggtgaccggagagagagggatcgtcatcacacgctccacattcccctcttctggacgctggggaggacactggctgggagacaacacagctgcctgggaccagctggggaaatccatcattggcatgatggatttcagcctctttggcatatcctataccgggtcagacatctgtgggttctttcaagatgctgagtatgagatgtgtgttcgctggatgcagctgggcgccttttaccccttctccaggaaccacaacaccattgggaccaagagacaagaccctgtatcctggaataaaacctttgaggatatttccagaagtgtgttggaaaccagatacaccctgttgccatatctctacaccttgatgtacaaggcccacacggagggcagcacagttgtgaggcctcttctccatgagtttgtgtcagaccgggagacctggaatatagacaaacagttcctgttgggcccagccttcctagtcagccctgtgcttgagcctaatgccagaaaggttgaagcatattttcccagggcccgctggtatgactactacaagggtgtagatatcaatgcaacgggagagtggaagaccttggaagcccctcttgagtacattaatcttcatattcgtgggggttatattctgccctggcaggaacctgccatgaacacccatttaagccggcagaagttcatgggcctcagggctgcgttgaatgctgagggacgtgctgagggctggctcttctgggatgatgggaaaaggatcaaaacatatgaaaaaggaaactatttcttggctacctttagagcagaaaagaacagcttgaaaatccagatcccacataataagtttctgagtgacacaaatccactgagaattggatacattagaatctggggtttaaacaatacttatgtggtacaggtcttttgtacctacaacaaccagcaattctcccaggatgattttacaagtgagccccacaatcagaaattaacaattcgattgactggaaagaatatgaacctagagaagttgactgaagttacttgggtt

SEQ ID NO: 660 - protein, 1842 aa, Mus musculus
AGRRFKKFSKLELVLIVLLLVLFIIAVVLIVLLANSTPENGTSHSESLPCQSKLTTHGAETTGTPDTTVTRTTLNSPNCPVLSELERINCIPDQSSNKGTCDERGCCWDPQGSISVPCYYSRNHGYKMESDVVNTNAGFTATLKNLPSAPVFGNSIENILLTAEYQTSNRFHFKLTDQTKKRYEVPHEHVQPFSGNAPSSLNYKVEVSKEPFSIKVTRKSNNRVLFDSSIGPLLFSDQFLQFSTHLPSANVYGLGEHVHQQYRHNMNWKTWPMFSRDTTPNEDGTNLYGVQTFFLCLEDNSGLSFGVFLMNSNAMEVTLQPTPAITYRTTGGILDFYVFLGNTPEQVVQEYLELIGRPALPSYWTLGFQLSRYDYKSLDNMKAVVERNRAAQLPYDVQHADIDYMDQKKDFTYDPVNFKGFPEFVKELHNNGQKLVIILDPAISNNSFSSNPYGPYDRGSAMKIWVNSSDGISPVIGKVWPGTTVFPDYTSPNCAVWWTKEFELFHKEVEFDGIWIDMNEVSNFIDGSFSGCSQNNLNYPPFTPKVLDGYLFSKTLCMDAVQHWGKQYDVHNLYGYSMAIATAKAVKDVFPDKRSFIITRSTFAGSGKFAAHWLGDNTATWKDLQWSIPGMLEFNLFGIPMVGADICGFAQDTYEELCRRWMQLGAFYPFSRNHNGQGYKDQDPASFGNNSLLLNSSRHYLNIRYTLLPYLYTLFYRAHSRGDTVARPLLHEFYDDNNTWGIDRQFLWGPGLLITPVLDQAKKVKAYVPNATWYDYETGEELGWRKQSIEMQLPGDKIGLHLRGGYIFPTQQPATTTEASRKNPLGLIVALDENKEARGELFWDDGESKDTVAQNIYLFSEFSVTQNHLDVTISSPNYKDPNNLEFQEIKIFGTQEFSNVRVKQNGNLLQMSPQVTYNPNLKVATITNIHLRLGEAYTVEWGFFTREEERIDCYPDEHGASEANCSARGCIWEESNTIGVPTCYFAHELYSVSNVQYDSHGATADISLKASTYSNAFPSTPVNKLKLQVTYHKNEMLQFKIYDPNNSRYEVPVPLNIPSAPSSTNEGRLYDVLIKENPFGIQVRRKSTGTVIWDSQLLGFTFNDMFIRISTRLPSTYIYGFGETEHTTFKIDMNWHTWGMFSRDEPPGYKKNSYGVHPYYMGLEEDGNAHGVLLMNSNAMDVTFQPMPALTYRTTGGILDFYVLLGPTPEIVTQQYTELIGRPVMVPYWSLGFQLCRYGYENDSEIASLYDEMVDKQIPYDVQYSDIDYMERQLDFKLSPKFSGFPALINRMKANGMRVILILDPAISGNETQPYPAFTRGVENDVFIRYPNNGSIVWGKVWPDYPNITVDPSLGWDHQVEQYRAYVAFPDFFRNSTATWWKKEIEELYTNTEEPEKSLKFDGLWIDMNEPSSFVNGAVPSGCSDATLNHPPYMPHVEGRDRGLSSKTLCMESEHILPDGSRVQHYDVHSLYGWSQTRPTYEAVQEVTGERGIVITRSTFPSSGRWGGHWLGDNTAAWDQLGKSIIGMMDFSLFGISYTGSDICGFFQDAEYEMCVRWMQLGAFYPFSRNHNTIGTKRQDPVSWNKTFEDISRSVLETRYTLLPYLYTLMYKAHTEGSTVVRPLLHEFVSDRETWNIDKQFLLGPAFLVSPVLEPNARKVEAYFPRARWYDYYKGVDINATGEWKTLEAPLEYINLHIRGGYILPWQEPAMNTHLSRQKFMGLRAALNAEGRAEGWLFWDDGKRIKTYEKGNYFLATFRAEKNSLKIQIPHNKFLSDTNPLRIGYIRIWGLNNTYVVQVFCTYNNQQFSQDDFTSEPHNQKLTIRLTGKNMNLEKLTEVTWV

SEQ ID NO: 661 - DNA, 5199 bp, Mus musculus
aagaagttcagcaagctggagcttgttctcattgttctgctgcttgtcctgttcatcatcgcggtggttctaattgtgctcttagccaactcgactccagaaaatggtgctgaaacaactggcactccagacactacagtcaccaggaccactcttaactctcccaattgcccagtgctaagtgagctggaacggataaattgcatccctgaccagtcatctaacaagggcacatgtgatgagcgaggctgctgctgggatcctcagggatccatcagtgttccttgctattactccaggaatcatggctacaaaatggagagtgacgttgtaaacacaaatgcaggattcacagccacactgaaaaacttaccttctgcacccgtgtttggaaacagcatcgaaaacatcctgcttacagcagagtaccagacatcaaatcgcttccactttaagttgactgaccaaaccaagaagaggtacgaagtgccccacgagcacgtgcaacccttcagtggaaatgccccttcttccttgaactacaaagttgaggtttccaaggagccatttagcatcaaagtcaccagaaaaagcaataaccgtgtgctgtttgactcaagtattgggcccctcctcttctctgaccagttcctgcagttctctacccacctgccaagtgctaatgtatatggtctgggtgaacatgtgcaccagcagtaccgacacaatatgaattggaagacctggcccatgttttccagagacacaaccccgaatgaggatggaactaacttgtatggtgtgcagacgttcttcctgtgccttgaagataacagtggattgtccttcggggtgtttctgatgaacagcaatgccatggaggttactcttcagcctaccccagcaatcacataccgcaccactgggggaattctggacttctatgtgttcttggggaacacacctgagcaagttgttcaagaatatctagagctcattggacggccagctctgccttcatactggacacttgggtttcagctcagccggtatgattataaaagcctagataatatgaaagcagttgtggagagaaaccgtgcagcacaactcccttatgatgttcagcatgctgatattgattatatggatcagaagaaggacttcacttatgacccagtgaattttaaaggcttcccagagtttgttaaggagctacacaataatgggcagaaacttgttatcattttggatccagcaatttccaacaactctttctcaagtaatccttatggcccatatgacaggggttcagcaatgaaaatctgggtgaatagttctgatggcatcagtccagtcattggaaaggtctggcctggaacaactgtgtttcctgattacaccagtcccaactgtgctgtttggtggacaaaagaatttgagcttttccacaaagaagtggagtttgatggaatttggattgatatgaacgaagtctccaactttattgatggttcattttctggatgttcccaaaacaacttgaattatcccccattcacaccaaaagtcctggatgggtacttgttctctaagactctctgcatggatgccgttcagcactgggggaagcagtatgatgtccacaatctatatggctactccatggccattgccacagcaaaagccgtgaaggacgtgttcccagacaagagaagcttcatcataacccgctctacctttgctggttctggcaaatttgcagcccactggttaggagataacaccgccacctggaaggaccttcagtggtccatcccaggcatgcttgagttcaacctcttcggtatcccaatggtaggggccgatatatgtggctttgcccaagacacatacgaggagctctgcaggcgctggatgcagctgggggcattttatccattttctcggaatcacaatggccaaggttacaaggaccaggatcctgcctcttttgggaataactccctgctgttgaattcgtctaggcactaccttaacatccgctacactttgctgccttacctctacactcttttctacagagcacacagccggggagacactgtagctaggcctcttctgcatgagttctatgacgacaacaatacttggggcatagaccggcaatttctttggggaccaggtcttctcatcactcctgttctggatcaggcaaagaaagtgaaagcatatgtgcctaatgccacctggtacgactatgaaaccggagaggaactggggtggagaaagcaaagcattgagatgcaacttcctggagacaagattggacttcaccttcgagggggctacatctttcccacacaacagcctgccacaaccacagaagccagccggaagaatcctcttggtcttattgtcgccctggatgagaacaaagaagcaagaggagagctgttctgggatgatggggagtcgaaggacactgtggccaaaaacatttaccttttcagcgaattttctgttacccaaaaccgtttggatgtgagcactttacaatcaacctacatgaaccctgataacttagcatttcaggagattaaaatttttggaacacggccgctttacaatgttacagtgaaacataatggtatggtaaatcagatggctcctcaagtcagttacgatccaagcatgaaggttgcagttattacaggcctccaacttctcctgaatgaatcctatacggtagagtgggatgacagcattagagatgaggaaaagatagactgctatccagatcaacatggggcttctgaaacaagctgcactgcccgaggctgtgtctgggaggaatccaactctgatgtggtccctttttgctactttgtcaatgagctgtactcagtcagcaatgttcagtatggctcacatggggccacagccaacatctccttaaaggcttcaccttatagcggtgccttcccctctacacctgtgaaggagctgcaactgcaagtgacctaccacaagaatgaaatgctgcagtttaagatctatgatcccaaccacagtcggtatgaagttccagtccctttgaacattcccagtgctccatcaagcaccccggagagtcgcctctatgatgtgctcatcaaggagaacccatttgggattgaaattcgtcggaagggtacaggcactgtagtctgggactctcaactccttggcttcaccttcagtgacatgttcatccgcatctccacccgcctgccctccacatacatctatggctttggggaaactgagcacacaaccttcaagatagacatgaactggaacaaatggggcatgttttccagggatgagcccccggggtacaggaagaattcctatggtgtccacccttactacatgggtctggaggaggatggcaatgctcatggagtcctcctgatgaacagcaatgccatggatgtgacattccagcccatgcctgctctgacataccgcactacagggggaattttggatttttatgtatttttggggccaactcctgagtttgtcactcagcagtacacagagttgattggtcgacctgtgatggtaccttactggtccctgggattccagctgtgtcgctatggatatgagaatgattctgaaatcgccagcttatatgatgagatggtggataagaagatcccctatgatgtgcagtactcagacattgactacatggagaggcagctggacttcaagctcagccccaagttctctgggtttccagccctgatcaatcgcatgaaggccaatgggatgagggtcatcctcattctggatccagccatttctggcaacgagacagagccctacccggccttcacccggggtgtggagaatgacgtcttcatcagatatcccaataatggaagcattgtctggggaaaggtctggcctgattaccctaatatcactgtggacccttctttaggctgggaccatcaagtggagcaataccgagcttatgtggccttcccagactttttccgtaattcaactgctacatggtggaagaaggagattaaagaactccacagcaacacacaggatcctgccaagagcttgaagtttgatggcctgtggattgatatgaatgaaccttccagctttgtgaatggggcagttccttctggctgcagcgatgctactctgaaccaccctccctacatgccatgtaagaaccctgagttttctctaccagctcggcaatggggcctgagcagtaagaccctgtgcatggagagtgagcagatccttccagatggctcccgggtacggcactatgatgtacacaacctgtatgggtggtcccagaccagacctacctacgaagctgtgcaggaggtgacaggagagagagggatcgtcatcacacgctccacattcccctcttctggacgctggggaggacactggctgggagacaacacagctgcctgggaccagctggggaaatccatcattggcatgatggatttcagcctcttcggcatatcctataccgggtcagacatctgtgggttctttcaagatgctgagtatgagatgtgtgttcgctggatgcagctgggcgccttttaccccttctccaggaaccacaacaccatcgggacccggagacaagaccctgtatcctggaataaaacctttgaggatatttccagaagtgtgttggaaaccagatacaccctgttgccatatctctacaccttgatgtacaaggcccacacggagggcagcacagttgtgaggcctcttctccatgagtttgtgtcagaccgggagacctggaatatagacaaacagttcctgttgggcccagccttcctagtcagccctgtgcttgagcctaatgccagaaaggttgaagcatattttcccagggcccgctggtatgactactacaagggtgtagatatcaatgcaacgggagagtggaagaccttggaagcccctcttgagtacattaatcttcatattcgtgggggttatattctgccctggcaggaacctgccatgaacacccatttaagtcgacaaaatttgatgggattgacggttgctttggataatgatgggaaggctgaaggccaattgttttgggatgatggacaaagcattggtgagtatgaa

SEQ ID NO: 662 - protein, 1733 aa, Mus musculus
KKFSKLELVLIVLLLVLFIIAVVLIVLLANSTPENGAETTGTPDTTVTRTTLNSPNCPVLSELERINCIPDQSSNKGTCDERGCCWDPQGSISVPCYYSRNHGYKMESDVVNTNAGFTATLKNLPSAPVFGNSIENILLTAEYQTSNRFHFKLTDQTKKRYEVPHEHVQPFSGNAPSSLNYKVEVSKEPFSIKVTRKSNNRVLFDSSIGPLLFSDQFLQFSTHLPSANVYGLGEHVHQQYRHNMNWKTWPMFSRDTTPNEDGTNLYGVQTFFLCLEDNSGLSFGVFLMNSNAMEVTLQPTPAITYRTTGGILDFYVFLGNTPEQVVQEYLELIGRPALPSYWTLGFQLSRYDYKSLDNMKAVVERNRAAQLPYDVQHADIDYMDQKKDFTYDPVNFKGFPEFVKELHNNGQKLVIILDPAISNNSFSSNPYGPYDRGSAMKIWVNSSDGISPVIGKVWPGTTVFPDYTSPNCAVWWTKEFELFHKEVEFDGIWIDMNEVSNFIDGSFSGCSQNNLNYPPFTPKVLDGYLFSKTLCMDAVQHWGKQYDVHNLYGYSMAIATAKAVKDVFPDKRSFIITRSTFAGSGKFAAHWLGDNTATWKDLQWSIPGMLEFNLFGIPMVGADICGFAQDTYEELCRRWMQLGAFYPFSRNHNGQGYKDQDPASFGNNSLLLNSSRHYLNIRYTLLPYLYTLFYRAHSRGDTVARPLLHEFYDDNNTWGIDRQFLWGPGLLITPVLDQAKKVKAYVPNATWYDYETGEELGWRKQSIEMQLPGDKIGLHLRGGYIFPTQQPATTTEASRKNPLGLIVALDENKEARGELFWDDGESKDTVAKNIYLFSEFSVTQNRLDVSTLQSTYMNPDNLAFQEIKIFGTRPLYNVTVKHNGMVNQMAPQVSYDPSMKVAVITGLQLLLNESYTVEWDDSIRDEEKIDCYPDQHGASETSCTARGCVWEESNSDVVPFCYFVNELYSVSNVQYGSHGATANISLKASPYSGAFPSTPVKELQLQVTYHKNEMLQFKIYDPNHSRYEVPVPLNIPSAPSSTPESRLYDVLIKENPFGIEIRRKGTGTVVWDSQLLGFTFSDMFIRISTRLPSTYIYGFGETEHTTFKIDMNWNKWGMFSRDEPPGYRKNSYGVHPYYMGLEEDGNAHGVLLMNSNAMDVTFQPMPALTYRTTGGILDFYVFLGPTPEFVTQQYTELIGRPVMVPYWSLGFQLCRYGYENDSEIASLYDEMVDKKIPYDVQYSDIDYMERQLDFKLSPKFSGFPALINRMKANGMRVILILDPAISGNETEPYPAFTRGVENDVFIRYPNNGSIVWGKVWPDYPNITVDPSLGWDHQVEQYRAYVAFPDFFRNSTATWWKKEIKELHSNTQDPAKSLKFDGLWIDMNEPSSFVNGAVPSGCSDATLNHPPYMPCKNPEFSLPARQWGLSSKTLCMESEQILPDGSRVRHYDVHNLYGWSQTRPTYEAVQEVTGERGIVITRSTFPSSGRWGGHWLGDNTAAWDQLGKSIIGMMDFSLFGISYTGSDICGFFQDAEYEMCVRWMQLGAFYPFSRNHNTIGTRRQDPVSWNKTFEDISRSVLETRYTLLPYLYTLMYKAHTEGSTVVRPLLHEFVSDRETWNIDKQFLLGPAFLVSPVLEPNARKVEAYFPRARWYDYYKGVDINATGEWKTLEAPLEYINLHIRGGYILPWQEPAMNTHLSRQNLMGLTVALDNDGKAEGQLFWDDGQSIGEYE

SEQ ID NO: 663 - DNA, 5181 bp, Mus musculus
aagaagttcagcaagctggagcttgttctcattgttctgctgcttgtcctgttcatcatcgcggtggttctaattgtgctcttagccaactcgactccagaaaatggtgctgaaacaactggcactccagacactacagtcaccaggaccactcttaactctcccaattgcccagtgctaagtgagctggaacggataaattgcatccctgaccagtcatctaacaagggcacatgtgatgagcgaggctgctgctgggatcctcagggatccatcagtgttccttgctattactccaggaatcatggctacaaaatggagagtgacgttgtaaacacaaatgcaggattcacagccacactgaaaaacttaccttctgcacccgtgtttggaaacagcatcgaaaacatcctgcttacagcagagtaccagacatcaaatcgcttccactttaagttgactgaccaaaccaagaagaggtacgaagtgccccacgagcacgtgcaacccttcagtggaaatgccccttcttccttgaactacaaagttgaggtttccaaggagccatttagcatcaaagtcaccagaaaaagcaataaccgtgtgctgtttgactcaagtattgggcccctcctcttctctgaccagttcctgcagttctctacccacctgccaagtgctaatgtatatggtctgggtgaacatgtgcaccagcagtaccgacacaatatgaattggaagacctggcccatgttttccagagacacaaccccgaatgaggatggaactaacttgtatggtgtgcagacgttcttcctgtgccttgaagataacagtggattgtccttcggggtgtttctgatgaacagcaatgccatggaggttactcttcagcctaccccagcaatcacataccgcaccactgggggaattctggacttctatgtgttcttggggaacacacctgagcaagttgttcaagaatatctagagctcattggacggccagctctgccttcatactggacacttgggtttcagctcagccggtatgattataaaagcctagataatatgaaagcagttgtggagagaaaccgtgcagcacaactcccttatgatgttcagcatgctgatattgattatatggatcagaagaaggacttcacttatgacccagtgaattttaaaggcttcccagagtttgttaaggagctacacaataatgggcagaaacttgttatcattttggatccagcaatttccaacaactctttctcaagtaatccttatggcccatatgacaggggttcagcaatgaaaatctgggtgaatagttctgatggcatcagtccagtcattggaaaggtctggcctggaacaactgtgtttcctgattacaccagtcccaactgtgctgtttggtggacaaaagaatttgagcttttccacaaagaagtggagtttgatggaatttggattgatatgaacgaagtctccaactttattgatggttcattttctggatgttcccaaaacaacttgaattatcccccattcacaccaaaagtcctggatgggtacttgttctctaagactctctgcatggatgccgttcagcactgggggaagcagtatgatgtccacaatctatatggctactccatggccattgccacagcaaaagccgtgaaggacgtgttcccagacaagagaagcttcatcataacccgctctacctttgctggttctggcaaatttgcagcccactggttaggagataacaccgccacctggaaggaccttcagtggtccatcccaggcatgcttgagttcaacctcttcggtatcccaatggtaggggccgatatatgtggctttgcccaagacacatacgaggagctctgcaggcgctggatgcagctgggggcattttatccattttctcggaatcacaatggccaaggttacaaggaccaggatcctgcctcttttgggaataactccctgctgttgaattcgtctaggcactaccttaacatccgctacactttgctgccttacctctacactcttttctacagagcacacagccggggagacactgtagctaggcctcttctgcatgagttctatgacgacaacaatacttggggcatagaccggcaatttctttggggaccaggtcttctcatcactcctgttctggatcaggcaaagaaagtgaaagcatatgtgcctaatgccacctggtacgactatgaaaccggagaggaactggggtggagaaagcaaagcattgagatgcaacttcctggagacaagattggacttcaccttcgagggggctacatctttcccacacaacagcctgccacaaccacagaagccagccggaagaatcctcttggtcttattgtcgccctggatgagaacaaagaagcaagaggagagctgttctgggatgatggggagtcgaaggggaatctatgtgttcataatttattcataactatgcgtggtatgtttcagaaccatttggatgtgacaatttcaagtccaaactacaaggatcccaataacctagaattccaggaaattaaaatctttggaacacgggaattccgcaatgttagagtgaaacagaatgggaatctccttcaaatgtctcctcaagtcacttacaatccaaacctgaaggttgccaccatcacaaatatccatctcaggctgggagaagcgtacacggttgagtgggacttcttcacaagggaggaggaaaggatagattgctatccagatgagcatggtgcttctgaggcaaactgcagtgcccgtggctgcatctgggaggcatccaacactactaggggccctccttgctactttgctcatgagctgtactcagtcagcaatgttcagtacgactcacatggggccacagctgacatctccttgaaggcttctacttatagcaatgccttcccctctacacctgtgaataaactgaaactgcaagtgacctatcacaagaacgaaatgctgcagtttaagatctatgatcccaaccacagtcggtatgaagtcccagtccctctgaacatccccagtgctccattgagcacccctgaaggccgtctgtatgatgtcctcatcaaggagaatccatttgggattcaaattcgccggaagactacaggcactgtaatctgggactctcagctcctcggcttcaccttcaatgacatgttcatccgcatctccacccgcctgccctccacatacatctatggctttggggaaactgagcatacaaccttcaagatagacatgaactggcacacatggggcatgttttccagggatgagcccccggggtacaagaagaattcctatggtgtccacccttactacatgggtctggaggaggatggcaatgcccatggagtcctcctgatgaacagcaatgccatggatgtgacattccagcccatgcctgctctgacataccgcactacagggggaattttggatttttatgtatttttggggccaactcctgagtttgtcactcagcagtacacagagttgattggtcgacctgtgatggtaccttactggtccctgggattccagctgtgtcgctatggatatgagaatgattctgaaatcgccagcttatatgatgagatggtggataagaagatcccctatgatgtgcagtactcagacattgactacatggagaggcagctggacttcaagctcagccccaagttctctgggtttccagccctgatcaatcgcatgaaggccaatgggatgagggtcatcctcattctggatccagccatttctggcaacgagacagagccctacccggccttcacccggggtgtggagaatgacgtcttcatcagatatcccaataatggaagcattgtctggggaaaggtctggcctgattaccctaatatcactgtggacccttctttaggctgggaccatcaagtggagcaataccgagcttatgtggccttcccagactttttccgtaattcaactgctacatggtggaagaaggagattaaagaactccacagcaacacacaggatcctgccaagagcttgaagtttgatggcctgtggattgatatgaatgaaccttccagctttgtgaatggggcagttccttctggctgcagcgatgctactctgaaccaccctccctacatgccatatttggaagccagggacaggggcctgagcagtaagaccctgtgcatggagagtgagcagatccttccagatggctcccgggtacggcactatgatgtacacaacctgtatgggtggtcccagaccagacctacctacgaagctgtgcaggaggtgacaggagagagagggatcgtcatcacacgctccacattcccctcttctggacgctggggaggacactggctgggagacaacacagctgcctgggaccagctggggaaatccatcattggcatgatggatttcagcctcttcggcatatcctataccgggtcagacatctgtgggttctttcaagatgctgagtatgagatgtgtgttcgctggatgcagctgggcgccttttaccccttctccaggaaccacaacaccatcgggacccggagacaagaccctgtatcctggaataaaacctttgaggatatttccagaagtgtgttggaaaccagatacaccctgttgccatatctctacaccttgatgtacaaggcccacacggagggcagcacagttgtgaggcctcttctccatgagtttgtgtcagaccgggagacctggaatatagacaaacagttcctgttgggcccagccttcctagtcagccctgtgcttgagcctaatgccagaaaggttgaagcatattttcccagggcccgctggtatgactactacaagggtgtagatatcaatgcaacgggagagtggaagaccttggaagcccctcttgagtacattaatcttcatattcgtgggggttatattctgccctggcaggaacctgccatgaacacccatttaagtcgacaaaatttgatgggattgacggttgctttggataatgatgggaaggctgaaggccaattgttttgggatgatggacaaagcattggtgagtatgaa

SEQ ID NO: 664 - protein, 1727 aa, Mus musculus
KKFSKLELVLIVLLLVLFIIAVVLIVLLANSTPENGAETTGTPDTTVTRTTLNSPNCPVLSELERINCIPDQSSNKGTCDERGCCWDPQGSISVPCYYSRNHGYKMESDVVNTNAGFTATLKNLPSAPVFGNSIENILLTAEYQTSNRFHFKLTDQTKKRYEVPHEHVQPFSGNAPSSLNYKVEVSKEPFSIKVTRKSNNRVLFDSSIGPLLFSDQFLQFSTHLPSANVYGLGEHVHQQYRHNMNWKTWPMFSRDTTPNEDGTNLYGVQTFFLCLEDNSGLSFGVFLMNSNAMEVTLQPTPAITYRTTGGILDFYVFLGNTPEQVVQEYLELIGRPALPSYWTLGFQLSRYDYKSLDNMKAVVERNRAAQLPYDVQHADIDYMDQKKDFTYDPVNFKGFPEFVKELHNNGQKLVIILDPAISNNSFSSNPYGPYDRGSAMKIWVNSSDGISPVIGKVWPGTTVFPDYTSPNCAVWWTKEFELFHKEVEFDGIWIDMNEVSNFIDGSFSGCSQNNLNYPPFTPKVLDGYLFSKTLCMDAVQHWGKQYDVHNLYGYSMAIATAKAVKDVFPDKRSFIITRSTFAGSGKFAAHWLGDNTATWKDLQWSIPGMLEFNLFGIPMVGADICGFAQDTYEELCRRWMQLGAFYPFSRNHNGQGYKDQDPASFGNNSLLLNSSRHYLNIRYTLLPYLYTLFYRAHSRGDTVARPLLHEFYDDNNTWGIDRQFLWGPGLLITPVLDQAKKVKAYVPNATWYDYETGEELGWRKQSIEMQLPGDKIGLHLRGGYIFPTQQPATTTEASRKNPLGLIVALDENKEARGELFWDDGESKGNLCVHNLFITMRGMFQNHLDVTISSPNYKDPNNLEFQEIKIFGTREFRNVRVKQNGNLLQMSPQVTYNPNLKVATITNIHLRLGEAYTVEWDFFTREEERIDCYPDEHGASEANCSARGCIWEASNTTRGPPCYFAHELYSVSNVQYDSHGATADISLKASTYSNAFPSTPVNKLKLQVTYHKNEMLQFKIYDPNHSRYEVPVPLNIPSAPLSTPEGRLYDVLIKENPFGIQIRRKTTGTVIWDSQLLGFTFNDMFIRISTRLPSTYIYGFGETEHTTFKIDMNWHTWGMFSRDEPPGYKKNSYGVHPYYMGLEEDGNAHGVLLMNSNAMDVTFQPMPALTYRTTGGILDFYVFLGPTPEFVTQQYTELIGRPVMVPYWSLGFQLCRYGYENDSEIASLYDEMVDKKIPYDVQYSDIDYMERQLDFKLSPKFSGFPALINRMKANGMRVILILDPAISGNETEPYPAFTRGVENDVFIRYPNNGSIVWGKVWPDYPNITVDPSLGWDHQVEQYRAYVAFPDFFRNSTATWWKKEIKELHSNTQDPAKSLKFDGLWIDMNEPSSFVNGAVPSGCSDATLNHPPYMPYLEARDRGLSSKTLCMESEQILPDGSRVRHYDVHNLYGWSQTRPTYEAVQEVTGERGIVITRSTFPSSGRWGGHWLGDNTAAWDQLGKSIIGMMDFSLFGISYTGSDICGFFQDAEYEMCVRWMQLGAFYPFSRNHNTIGTRRQDPVSWNKTFEDISRSVLETRYTLLPYLYTLMYKAHTEGSTVVRPLLHEFVSDRETWNIDKQFLLGPAFLVSPVLEPNARKVEAYFPRARWYDYYKGVDINATGEWKTLEAPLEYINLHIRGGYILPWQEPAMNTHLSRQNLMGLTVALDNDGKAEGQLFWDDGQSIGEYE

SEQ ID NO: 665 - DNA, 5181 bp, Mus musculus
aagaagttcagcaagctggagcttgttctcattgttctgctgcttgtcctgttcatcatcgcggtggttctaattgtgctcttagccaactcgactccagaaaatggtgctgaaacaactggcactccagacactacagtcaccaggaccactcttaactctcccaattgcccagtgctaagtgagctggaacggataaattgcatccctgaccagtcatctaacaagggcacatgtgatgagcgaggctgctgctgggatcctcagggatccatcagtgttccttgctattactccaggaatcatggctacaaaatggagagtgacgttgtaaacacaaatgcaggattcacagccacactgaaaaacttaccttctgcacccgtgtttggaaacagcatcgaaaacatcctgcttacagcagagtaccagacatcaaatcgcttccactttaagttgactgaccaaaccaagaagaggtacgaagtgccccacgagcacgtgcaacccttcagtggaaatgccccttcttccttgaactacaaagttgaggtttccaaggagccatttagcatcaaagtcaccagaaaaagcaataaccgtgtgctgtttgactcaagtattgggcccctcctcttctctgaccagttcctgcagttctctacccacctgccaagtgctaatgtatatggtctgggtgaacatgtgcaccagcagtaccgacacaatatgaattggaagacctggcccatgttttccagagacacaaccccgaatgaggatggaactaacttgtatggtgtgcagacgttcttcctgtgccttgaagataacagtggattgtccttcggggtgtttctgatgaacagcaatgccatggaggttactcttcagcctaccccagcaatcacataccgcaccactgggggaattctggacttctatgtgttcttggggaacacacctgagcaagttgttcaagaatatctagagctcattggacggccagctctgccttcatactggacacttgggtttcagctcagccggtatgattataaaagcctagataatatgaaagcagttgtggagagaaaccgtgcagcacaactcccttatgatgttcagcatgctgatattgattatatggatcagaagaaggacttcacttatgacccagtgaattttaaaggcttcccagagtttgttaaggagctacacaataatgggcagaaacttgttatcattttggatccagcaatttccaacaactctttctcaagtaatccttatggcccatatgacaggggttcagcaatgaaaatctgggtgaatagttctgatggcatcagtccagtcattggaaaggtctggcctggaacaactgtgtttcctgattacaccagtcccaactgtgctgtttggtggacaaaagaatttgagcttttccacaaagaagtggagtttgatggaatttggattgatatgaacgaagtctccaactttattgatggttcattttctggatgttcccaaaacaacttgaattatcccccattcacaccaaaagtcctggatgggtacttgttctctaagactctctgcatggatgccgttcagcactgggggaagcagtatgatgtccacaatctatatggctactccatggccattgccacagcaaaagccgtgaaggacgtgttcccagacaagagaagcttcatcataacccgctctacctttgctggttctggcaaatttgcagcccactggttaggagataacaccgccacctggaaggaccttcagtggtccatcccaggcatgcttgagttcaacctcttcggtatcccaatggtaggggccgatatatgtggctttgcccaagacacatacgaggagctctgcaggcgctggatgcagctgggggcattttatccattttctcggaatcacaatggccaaggttacaaggaccaggatcctgcctcttttgggaataactccctgctgttgaattcgtctaggcactaccttaacatccgctacactttgctgccttacctctacactcttttctacagagcacacagccggggagacactgtagctaggcctcttctgcatgagttctatgacgacaacaatacttggggcatagaccggcaatttctttggggaccaggtcttctcatcactcctgttctggatcaggcaaagaaagtgaaagcatatgtgcctaatgccacctggtacgactatgaaaccggagaggaactggggtggagaaagcaaagcattgagatgcaacttcctggagacaagattggacttcaccttcgagggggctacatctttcccacacaacagcctgccacaaccacagaagccagccggaagaatcctcttggtcttattgtcgccctggatgagaacaaagaagcaagaggagagctgttctgggatgatggggagtcgaaggggaatctatgtgttcataatttattcataactatgcgtggtatgtttcagaaccatttggatgtgacaatttcaagtccaaactacaaggatcccaataacctagaattccaggaaattaaaatctttggaacacgggaattccgcaatgttagagtgaaacagaatgggaatctccttcaaatgtctcctcaagtcacttacaatccaaacctgaaggttgccaccatcacaaatatccatctcaggctgggagaagcgtacacggttgagtgggacttcttcacaagggaggaggaaaggatagattgctatccagatgagcatggtgcttctgaggcaaactgcagtgcccgtggctgcatctgggaggaatccaacactattggggtccctacttgctactttgctcatgagctgtactcagtcagcaatgttcagtatgactcacatggggccacagctgacatctccttgaaggcttctacttatagcaatgccttcccctctacacctgtgaataaactgaaactgcaagtgacctaccacaagaatgaaatgctgcagtttaagatttatgatcccaacaacagtcggtatgaagtcccagtccctctgaatatccccagtgctccatccagcaccaacgaaggccgtctgtatgatgtcctcatcaaggagaatccatttggaattcaagttcgccgaaagagcacaggcactgtaatctgggactctcagctcctcggcttcaccttcaatgacatgttcatccgcatctccacccgcctgccctccacatacatctatggctttggggaaactgagcatacaaccttcaagatagacatgaactggcacacatggggcatgttttccagggatgagcccccggggtacaagaagaattcctatggtgtccacccttactacatgggtctggaggaggatggcaatgcccatggagtcctcctgatgaacagcaatgccatggatgtgacgttccagcctatgcctgctttgacataccgaaccacagggggtattttggatttctatgtgctcttgggcccaacaccagagattgtcactcagcaatacacagagttgattggtcggcctgtgatggtaccttactggtccctgggattccagctgtgtcgctatggatatgagaatgattctgaaatcgccagcttatatgatgagatggtggataagcagatcccctatgatgtgcagtactcagacattgactacatggagaggcagctggacttcaagctcagccccaagttctctgggtttccagccctgatcaatcgcatgaaggccaatgggatgagggtcatcctcattctggatccagccatttctggcaatgagacacagccctatcctgccttcacccggggcgtggagaatgacgtcttcatcagatatcccaataatggaagcattgtctggggaaaggtctggcctgattaccctaatatcactgtggacccttctttaggctgggaccatcaagtggagcaataccgagcctatgtggccttcccagactttttccgtaattcaactgccacgtggtggaaaaaggagattgaagaactctacacgaacacagaggaaccagaaaagagcttgaagtttgatggcctgtggattgatatgaatgaaccttccagctttgtgaacggggcagttccttcaggctgcagtgatgctactctgaaccatccaccctacatgccacacgttgaaggcagagacaggggcctgagcagcaagacgctgtgcatggagagtgagcacatccttccagatggctcccgagtgcagcactatgatgtgcacagcctgtacgggtggtcccagaccagacccacctacgaagctgtgcaggaggtgaccggagagagagggatcgtcatcacacgctccacattcccctcttctggacgctggggaggacactggctgggagacaacacagctgcctgggaccagctggggaaatccatcattggcatgatggatttcagcctctttggcatatcctataccgggtcagacatctgtgggttctttcaagatgctgagtatgagatgtgtgttcgctggatgcagctgggcgccttttaccccttctccaggaaccacaacaccattgggaccaagagacaagaccctgtatcctggaataaaacctttgaggatatttccagaagtgtgttggaaaccagatacaccctgttgccatatctctacaccttgatgtacaaggcccacatggagggcagcacagttgtgcggccccttctccatgaatttgtgtcagaccggaagacctggaatatagacaaacagttcctgctgggtccagctttcctagtcagccctgtgctagagcctaatgccagaaaggttgaagcatattttcccagggcccgctggtatgactactacaagggtgtagatatcaatgcaacgggagagtggaagaccttggaagcccctcttgagtacattaatcttcatattcgtgggggttatattctgccctggcaggaacctgccatgaacacccatttaagtcgacaaaatttgatgggattgacggttgctttggataatgatgggaaggctgaaggccaattgttttgggatgatggacaaagcattggtgagtatgaa

SEQ ID NO: 666 - protein, 1727 aa, Mus musculus
KKFSKLELVLIVLLLVLFIIAVVLIVLLANSTPENGAETTGTPDTTVTRTTLNSPNCPVLSELERINCIPDQSSNKGTCDERGCCWDPQGSISVPCYYSRNHGYKMESDVVNTNAGFTATLKNLPSAPVFGNSIENILLTAEYQTSNRFHFKLTDQTKKRYEVPHEHVQPFSGNAPSSLNYKVEVSKEPFSIKVTRKSNNRVLFDSSIGPLLFSDQFLQFSTHLPSANVYGLGEHVHQQYRHNMNWKTWPMFSRDTTPNEDGTNLYGVQTFFLCLEDNSGLSFGVFLMNSNAMEVTLQPTPAITYRTTGGILDFYVFLGNTPEQVVQEYLELIGRPALPSYWTLGFQLSRYDYKSLDNMKAVVERNRAAQLPYDVQHADIDYMDQKKDFTYDPVNFKGFPEFVKELHNNGQKLVIILDPAISNNSFSSNPYGPYDRGSAMKIWVNSSDGISPVIGKVWPGTTVFPDYTSPNCAVWWTKEFELFHKEVEFDGIWIDMNEVSNFIDGSFSGCSQNNLNYPPFTPKVLDGYLFSKTLCMDAVQHWGKQYDVHNLYGYSMAIATAKAVKDVFPDKRSFIITRSTFAGSGKFAAHWLGDNTATWKDLQWSIPGMLEFNLFGIPMVGADICGFAQDTYEELCRRWMQLGAFYPFSRNHNGQGYKDQDPASFGNNSLLLNSSRHYLNIRYTLLPYLYTLFYRAHSRGDTVARPLLHEFYDDNNTWGIDRQFLWGPGLLITPVLDQAKKVKAYVPNATWYDYETGEELGWRKQSIEMQLPGDKIGLHLRGGYIFPTQQPATTTEASRKNPLGLIVALDENKEARGELFWDDGESKGNLCVHNLFITMRGMFQNHLDVTISSPNYKDPNNLEFQEIKIFGTREFRNVRVKQNGNLLQMSPQVTYNPNLKVATITNIHLRLGEAYTVEWDFFTREEERIDCYPDEHGASEANCSARGCIWEESNTIGVPTCYFAHELYSVSNVQYDSHGATADISLKASTYSNAFPSTPVNKLKLQVTYHKNEMLQFKIYDPNNSRYEVPVPLNIPSAPSSTNEGRLYDVLIKENPFGIQVRRKSTGTVIWDSQLLGFTFNDMFIRISTRLPSTYIYGFGETEHTTFKIDMNWHTWGMFSRDEPPGYKKNSYGVHPYYMGLEEDGNAHGVLLMNSNAMDVTFQPMPALTYRTTGGILDFYVLLGPTPEIVTQQYTELIGRPVMVPYWSLGFQLCRYGYENDSEIASLYDEMVDKQIPYDVQYSDIDYMERQLDFKLSPKFSGFPALINRMKANGMRVILILDPAISGNETQPYPAFTRGVENDVFIRYPNNGSIVWGKVWPDYPNITVDPSLGWDHQVEQYRAYVAFPDFFRNSTATWWKKEIEELYTNTEEPEKSLKFDGLWIDMNEPSSFVNGAVPSGCSDATLNHPPYMPHVEGRDRGLSSKTLCMESEHILPDGSRVQHYDVHSLYGWSQTRPTYEAVQEVTGERGIVITRSTFPSSGRWGGHWLGDNTAAWDQLGKSIIGMMDFSLFGISYTGSDICGFFQDAEYEMCVRWMQLGAFYPFSRNHNTIGTKRQDPVSWNKTFEDISRSVLETRYTLLPYLYTLMYKAHMEGSTVVRPLLHEFVSDRKTWNIDKQFLLGPAFLVSPVLEPNARKVEAYFPRARWYDYYKGVDINATGEWKTLEAPLEYINLHIRGGYILPWQEPAMNTHLSRQNLMGLTVALDNDGKAEGQLFWDDGQSIGEYE

SEQ ID NO: 667 - DNA, 2058 bp, Mus musculus
cagttgactgaccaaaccaagaagaggtacgaagtgccccacgagcacgtgcaacccttcagtggaaatgccccttcttccttgaactacaaagttgaggtttccaaggagccatttagcatcaaagtcaccagaaaaagcaataaccgtgtgctgtttgactcaagtattgggcccctcctcttctctgaccagttcctgcagttctctacccacctgccaagtgctaatgtatatggtctgggtgaacatgtgcaccagcagtaccgacacaatatgaattggaagacctggcccatgttttccagagacacaaccccgaatgaggatggaactaacttgtatggtgtgcagacgttcttcctgtgccttgaagataacagtggattgtccttcggggtgtttctgatgaacagcaatgccatggaggttactcttcagcctaccccagcaatcacataccgcaccactgggggaattctggacttctatgtgttcttggggaacacacctgagcaagttgttcaagaatatctagagctcattggacggccagctctgccttcatactggacacttgggtttcagctcagccggtatgattataaaagcctagataatatgaaagcagttgtggagagaaaccgtgcagcacaactcccttatgatgttcagcatgctgatattgattatatggatcagaagaaggacttcacttatgacccagtgaattttaaaggcttcccagagtttgttaaggagctacacaataatgggcagaaacttgttatcattttggatccagcaatttccaacaactctttctcaagtaatccttatggcccatatgacaggggttcagcaatgaaaatctgggtgaatagttctgatggcatcagtccagtcattggaaaggtctggcctggaacaactgtgtttcctgattacaccagtcccaactgtgctgtttggtggacaaaagaatttgagcttttccacaaagaagtggagtttgatggaatttggattgatatgaacgaagtctccaactttattgatggttcattttctggatgttcccaaaacaacttgaattatcccccattcacaccaagtaaggctttctctgacaggttacttgttgtcattgttgcagaagtcctggatgggtacttgttctctaagactctctgcatggatgccgttcagcactgggggaagcagtatgatgtccacaatctatatggctactccatggccattgccacagcaaaagccgtgaaggacgtgttcccagacaagagaagcttcatcataacccgctctacctttgctggttctggcaaatttgcagcccactggttaggagataacaccgccacctggaaggaccttcagtggtccatcccaggcatgcttgagttcaacctcttcggtatcccaatgaccgggtcagacatctgtgggttctttcaagatgctgagtatgagatgtgtgttcgctggatgcagctgggcgccttttaccccttctccaggaaccacaacaccattgggaccaagagacaagaccctgtatcctgggataaaacctttgaggatatttccaggagtgtgctggagaccagatacaccctgttgccatatctctacaccttgatgtacaaggcccacaaggagggcagcacagttgtgcggccccttctccatgaatttgtgtcagaccggaagacctggaatatagacaaacagttcctgctgggtccagctttcctagtcagccctgtgctagagcctaatgcccgaaacatcagtgcatatttccccacagccctctggtatgactattacacggtaaatatcaatgcaacgggagagtggaagaccttggaagcccctcttgagtacattaatcttcatattcgtgggggttatattctgccctggcaggaacctgccatgaacacccatttaagtcgacaaaatttgatgggattgacggttgctttggataatgatgggaaggctgaaggccaattgttttgggatgatggacaa

SEQ ID NO: 668 - protein, 686 aa, Mus musculus
QLTDQTKKRYEVPHEHVQPFSGNAPSSLNYKVEVSKEPFSIKVTRKSNNRVLFDSSIGPLLFSDQFLQFSTHLPSANVYGLGEHVHQQYRHNMNWKTWPMFSRDTTPNEDGTNLYGVQTFFLCLEDNSGLSFGVFLMNSNAMEVTLQPTPAITYRTTGGILDFYVFLGNTPEQVVQEYLELIGRPALPSYWTLGFQLSRYDYKSLDNMKAVVERNRAAQLPYDVQHADIDYMDQKKDFTYDPVNFKGFPEFVKELHNNGQKLVIILDPAISNNSFSSNPYGPYDRGSAMKIWVNSSDGISPVIGKVWPGTTVFPDYTSPNCAVWWTKEFELFHKEVEFDGIWIDMNEVSNFIDGSFSGCSQNNLNYPPFTPSKAFSDRLLVVIVAEVLDGYLFSKTLCMDAVQHWGKQYDVHNLYGYSMAIATAKAVKDVFPDKRSFIITRSTFAGSGKFAAHWLGDNTATWKDLQWSIPGMLEFNLFGIPMTGSDICGFFQDAEYEMCVRWMQLGAFYPFSRNHNTIGTKRQDPVSWDKTFEDISRSVLETRYTLLPYLYTLMYKAHKEGSTVVRPLLHEFVSDRKTWNIDKQFLLGPAFLVSPVLEPNARNISAYFPTALWYDYYTVNINATGEWKTLEAPLEYINLHIRGGYILPWQEPAMNTHLSRQNLMGLTVALDNDGKAEGQLFWDDGQ

SEQ ID NO: 669 - DNA, 2058 bp, Mus musculus
cagttgactgaccaaaccaagaagaggtacgaagtgccccacgagcacgtgcaacccttcagtggaaatgccccttcttccttgaactacaaagttgaggtttccaaggagccatttagcatcaaagtcaccagaaaaagcaataaccgtgtgctgtttgactcaagtattgggcccctcctcttctctgaccagttcctgcagttctctacccacctgccaagtgctaatgtatatggtctgggtgaacatgtgcaccagcagtaccgacacaatatgaattggaagacctggcccatgttttccagagacacaaccccgaatgaggatggaactaacttgtatggtgtgcagacgttcttcctgtgccttgaagataacagtggattgtccttcggggtgtttctgatgaacagcaatgccatggaggttactcttcagcctaccccagcaatcacataccgcaccactgggggaattctggacttctatgtgttcttggggaacacacctgagcaagttgttcaagaatatctagaggtaaacatgaaatcatggtcatacataattccgttggtttctttaacagggaaaagtgtagatgctaaactgtggatgcctgtattctttcaggatgttcagcatgctgatattgattatatggatcagaagaaggacttcacttatgacccagtgaattttaaaggcttcccagagtttgttaaggagctacacaataatgggcagaaacttgttatcattttggatccagcaatttccaacaactctttctcaagtaatccttatggcccatatgacaggggttcagcaatgaaaatctgggtgaatagttctgatggcatcagtccagtcattggaaaggtctggcctggaacaactgtgtttcctgattacaccagtcccaactgtgctgtttggtggacaaaagaatttgagcttttccacaaagaagtggagtttgatggaatttggattgatatgaacgaagtctccaactttattgatggttcattttctggatgttcccaaaacaacttgaattatcccccattcacaccaaaagtcctggatgggtacttgttctctaagactctctgcatggatgccgttcagcactgggggaagcagtatgatgtccacaatctatatggctactccatggccattgccacagcaaaagccgtgaaggacgtgttcccagacaagagaagcttcatcataacccgctctacctttgctggttctggcaaatttgcagcccactggttaggagataacaccgccacctggaaggaccttcagtggtccatcccaggcatgcttgagttcaacctcttcggtatcccaatggtaggggccgatatatgtggctttgcccaagacacatacgaggagctctgcaggcgctggatgcagctgggggcattttatccattttctcggaatcacaatggccaaggttacaaggaccaggatcctgcctcttttgggaataactccctgctgttgaattcgtctaggcactaccttaacatccgctacactttgctgccttacctctacactcttttctacagagcacacagccggggagacactgtagctaggcctcttctgcatgagtttctggcagaccgggaaacctggaacatagacaaacagttcctgctgggaccagccttcctagtcagccctgtgctggagcctaatgccagaaatgtcactgcatatttccctaaagctcagtggtatgattattacacggtaagatgggtgcaactcttatcatttctcttttgcccacagggtgtagatatcaatgcaacgggagagtggaagaccttggaagcccctcttgagtacattaatcttcatattcgtgggggttatattctgccctggcaggaacctgccatgaacacccatttaagccggaagaatcccatgggactcatcattgctttggattataagcgcgaggcaaagggccagctgtactgggatgatggtgtgtctaaaggtatatttccccactga

SEQ ID NO: 670 - protein, 685 aa, Mus musculus
QLTDQTKKRYEVPHEHVQPFSGNAPSSLNYKVEVSKEPFSIKVTRKSNNRVLFDSSIGPLLFSDQFLQFSTHLPSANVYGLGEHVHQQYRHNMNWKTWPMFSRDTTPNEDGTNLYGVQTFFLCLEDNSGLSFGVFLMNSNAMEVTLQPTPAITYRTTGGILDFYVFLGNTPEQVVQEYLEVNMKSWSYIIPLVSLTGKSVDAKLWMPVFFQDVQHADIDYMDQKKDFTYDPVNFKGFPEFVKELHNNGQKLVIILDPAISNNSFSSNPYGPYDRGSAMKIWVNSSDGISPVIGKVWPGTTVFPDYTSPNCAVWWTKEFELFHKEVEFDGIWIDMNEVSNFIDGSFSGCSQNNLNYPPFTPKVLDGYLFSKTLCMDAVQHWGKQYDVHNLYGYSMAIATAKAVKDVFPDKRSFIITRSTFAGSGKFAAHWLGDNTATWKDLQWSIPGMLEFNLFGIPMVGADICGFAQDTYEELCRRWMQLGAFYPFSRNHNGQGYKDQDPASFGNNSLLLNSSRHYLNIRYTLLPYLYTLFYRAHSRGDTVARPLLHEFLADRETWNIDKQFLLGPAFLVSPVLEPNARNVTAYFPKAQWYDYYTVRWVQLLSFLFCPQGVDINATGEWKTLEAPLEYINLHIRGGYILPWQEPAMNTHLSRKNPMGLIIALDYKREAKGQLYWDDGVSKGIFPH

SEQ ID NO: 671 - DNA, 2037 bp, Mus musculus
ttgactgaccaaaccaagaagaggtacgaagtgccccacgagcacgtgcaacccttcagtggaaatgccccttcttccttgaactacaaagttgaggtttccaaggagccatttagcatcaaagtcaccagaaaaagcaataaccgtgtgctgtttgactcaagtattgggcccctcctcttctctgaccagttcctgcagttctctacccacctgccaagtgctaatgtatatggtctgggtgaacatgtgcaccagcagtaccgacacaatatgaattggaagacctggcccatgttttccagagacacaaccccgaatgaggatggaactaacttgtatggtgtgcagacgttcttcctgtgccttgaagataacagtggattgtccttcggggtgtttctgatgaacagcaatgccatggaggttactcttcagcctaccccagcaatcacataccgcaccactgggggaattctggacttctatgtgttcttggggaacacacctgagcaagttgttcaagaatatctagaggtaaacatgaaatcatggtcatacataattccgttggtttctttaacagggaaaagtgtagatgctaaactgtggatgcctgtattctttcaggatgttcagcatgctgatattgattatatggatcagaagaaggacttcacttatgacccagtgaattttaaaggcttcccagagtttgttaaggagctacacaataatgggcagaaacttgttatcattttggatccagcaatttccaacaactctttctcaagtaatccttatggcccatatgacaggggttcagcaatgaaaatctgggtgaatagttctgatggcatcagtccagtcattggaaaggtctggcctggaacaactgtgtttcctgattacaccagtcccaactgtgctgtttggtggacaaaagaatttgagcttttccacaaagaagtggagtttgatggaatttggattgatatgaacgaagtctccaactttattgatggttcattttctggatgttcccaaaacaacttgaattatcccccattcacaccaaaagtcctggatgggtacttgttctctaagactctctgcatggatgccgttcagcactgggggaagcagtatgatgtccacaatctatatggctactccatggccattgccacagcaaaagccgtgaaggacgtgttcccagacaagagaagcttcatcataacccgctctacctttgctggttctggcaaatttgcagcccactggttaggagataacaccgccacctggaaggaccttcagtggtccatcccaggcatgcttgagttcaacctcttcggtatcccaatggtaggggccgatatatgtggctttgcccaagacacatacgaggagctctgcaggcgctggatgcagctgggggcattttatccattttctcggaatcacaatggccaaggttacaaggaccaggatcctgcctcttttgggaataactccctgctgttgaattcgtctaggcactaccttaacatccgctacactttgctgccttacctctacactcttttctacagagcacacagccggggagacactgtagctaggcctcttctgcatgagttctatgacgacaacaatacttggggcatagaccggcaatttctttggggaccaggtcttctcatcactcctgttctggatcaggcaaagaaagtgaaagcatatgtgcctaatgccacctggtacgactatgaaaccgtaagatgggtgcaactcttatcatttctcttttgcccacagggtgtagatatcaatgcaacgggagagtggaagaccttggaagcccctcttgagtacattaatcttcatattcgtgggggttatattctgccctggcaggaacctgccatgaacacccatttaagtcgacaaaatttgatgggattgacggttgctttggataatgatgggaaggctgaaggccaattgttttgggatgatggacaaagcattggt

SEQ ID NO: 672 - protein, 679 aa, Mus musculus
LTDQTKKRYEVPHEHVQPFSGNAPSSLNYKVEVSKEPFSIKVTRKSNNRVLFDSSIGPLLFSDQFLQFSTHLPSANVYGLGEHVHQQYRHNMNWKTWPMFSRDTTPNEDGTNLYGVQTFFLCLEDNSGLSFGVFLMNSNAMEVTLQPTPAITYRTTGGILDFYVFLGNTPEQVVQEYLEVNMKSWSYIIPLVSLTGKSVDAKLWMPVFFQDVQHADIDYMDQKKDFTYDPVNFKGFPEFVKELHNNGQKLVIILDPAISNNSFSSNPYGPYDRGSAMKIWVNSSDGISPVIGKVWPGTTVFPDYTSPNCAVWWTKEFELFHKEVEFDGIWIDMNEVSNFIDGSFSGCSQNNLNYPPFTPKVLDGYLFSKTLCMDAVQHWGKQYDVHNLYGYSMAIATAKAVKDVFPDKRSFIITRSTFAGSGKFAAHWLGDNTATWKDLQWSIPGMLEFNLFGIPMVGADICGFAQDTYEELCRRWMQLGAFYPFSRNHNGQGYKDQDPASFGNNSLLLNSSRHYLNIRYTLLPYLYTLFYRAHSRGDTVARPLLHEFYDDNNTWGIDRQFLWGPGLLITPVLDQAKKVKAYVPNATWYDYETVRWVQLLSFLFCPQGVDINATGEWKTLEAPLEYINLHIRGGYILPWQEPAMNTHLSRQNLMGLTVALDNDGKAEGQLFWDDGQSIG

SEQ ID NO: 673 - DNA, 5046 bp, Mus musculus
tttgactcaagtattgggcccctcctcttctctgaccagttcctgcagttctctacccacctgccaagtgctaatgtatatggtctgggtgaacatgtgcaccagcagtaccgacacaatatgaattggaagacctggcccatgttttccagagacacaaccccgaatgaggatggaactaacttgtatggtgtgcagacgttcttcctgtgccttgaagataacagtggattgtccttcggggtgtttctgatgaacagcaatgccatggaggttactcttcagcctaccccagcaatcacataccgcaccactgggggaattctggacttctatgtgttcttggggaacacacctgagcaagttgttcaagaatatctagagctcattggacggccagctctgccttcatactggacacttgggtttcagctcagccggtatgattataaaagcctagataatatgaaagcagttgtggagagaaaccgtgcagcacaactcccttatgatgttcagcatgctgatattgattatatggatcagaagaaggacttcacttatgacccagtgaattttaaaggcttcccagagtttgttaaggagctacacaataatgggcagaaacttgttatcattttggatccagcaatttccaacaactctttctcaagtaatccttatggcccatatgacaggggttcagcaatgaaaatctgggtgaatagttctgatggcatcagtccagtcattggaaaggtctggcctggaacaactgtgtttcctgattacaccagtcccaactgtgctgtttggtggacaaaagaatttgagcttttccacaaagaagtggagtttgatggaatttggattgatatgaacgaagtctccaactttattgatggttcattttctggatgttcccaaaacaacttgaattatcccccattcacaccaagtaaggctttctctgacaggttacttgttgtcattgttgcagaagtcctggatgggtacttgttctctaagactctctgcatggatgccgttcagcactgggggaagcagtatgatgtccacaatctatatggctactccatggccattgccacagcaaaagctatgcaggaggtgacaggagagagagggatcgtcatcacacgctccacattcccctcttctggacgctggggaggacactggctgggagacaacacagctgcctgggaccagctggggaaatccatcattggcatgatggatttcagcctcttcggcatatcctataccgggtcagacatctgtgggttctttcaagatgctgagtatgagatgtgtgttcgctggatgcagctgggcgccttttaccccttctccaggaaccacaacaccattgggaccaagagacaagaccctgtatcctgggataaaacctttgaggatatttccaggagtgtgctggagaccagatacaccctgttgccatatctctacaccttgatgtacaaggcccacaaggagggcagcacagttgtgcggccccttctccatgagtttctggcagaccgggaaacctggaacatagacaaacagttcctgctgggaccagccttcctagtcagccctgtgctggagcctaatgccagaaatgtcactgcatatttccctaaagctcagtggtatgattattacacgggtgcagacattaattcaaccggttggacgaccttgccagcccctcttgagcacatcaatcttcatgtccgagggggttacatcttgccatggcaacaacctgccctgaacaccaacttaagccggaagaatcctcttggtcttctcattgccctggatgagaacaaagaagcaagaggagagctgttctgggatgatgggcagtcgaaggatctcacaaccaacaacattctatgtaaattttcagtcactcaaaaccgtttggatgtgagcactttacaatcaacctacatgaaccctgataacttagcatttcaggagattaaaatttttggaacacggccgctttacaatgttacagtgaaacataatggtatggtaaatcagatggctcctcaagtcagttacgatccaagcatgaaggttgcagttattacaggcctccaacttctcctgaatgaatcctatacggtagagtgggatgacagcattagagatgaggaaaagatagactgctatccagatcaacatggggcttctgaaacaagctgcactgcccgaggctgtgtctgggaggaatccaactctgatgtggtccctttttgctactttgtcaatgagctgtactcagtcagcaatgttcagtatggctcacatggggccacagccaacatctccttaaaggcttcaccttatagcggtgccttcccctctacacctgtgaaggagctgcaactgcaagtgacctaccacaagaatgaaatgctgcagtttaagatctatgatcccaaccacagtcggtatgaagttccagtccctttgaacattcccagtgctccatcaagcaccccggagagtcgcctctatgatgtgctcatcaaggagaacccatttgggattgaaattcgtcggaagggtacaggcactgtagtctgggactctcaactccttggcttcaccttcagtgacatgttcatccgcatctccacccgcctgccctccacatacatctatggctttggggaaactgagcacacaaccttcaagatagacatgaactggaacaaatggggcatgttttccagggatgagcccccggggtacaggaagaattcctatggtgtccacccttactacatgggtctggaggaggatggcaatgctcatggagtcctcctgatgaacagcaatgccatggatgtgacattccagcccatgcctgctctgacataccgcactacagggggaattttggatttttatgtatttttggggccaactcctgagtttgtcactcagcagtacacagagttgattggtcgacctgtgatggtaccttactggtccctgggattccagctgtgtcgctatggatatgagaatgattctgaaatcgccagcttatatgatgagatggtggataagaagatcccctatgatgtgcagtactcagacattgactacatggagaggcagctggacttcaagctcagccccaagttctctgggtttccagccctgatcaatcgcatgaaggccaatgggatgagggtcatcctcattctggatccagccatttctggcaacgagacagagccctacccggccttcacccggggtgtggagaatgacgtcttcatcagatatcccaataatggaagcattgtctggggaaaggtctggcctgattaccctaatatcactgtggacccttctttaggctgggaccatcaagtggagcaataccgagcttatgtggccttcccagactttttccgtaattcaactgctacatggtggaagaaggagattaaagaactccacagcaacacacaggatcctgccaagagcttgaagtttgatggcctgtggattgatatgaatgaaccttccagctttgtgaatggggcagttccttctggctgcagcgatgctactctgaaccaccctccctacatgccatatttggaagccagggacaggggcctgagcagtaagaccctgtgcatggagagtgagcagatccttccagatggctcccgggtacggcactatgatgtacacaacctgtatgggtggtcccagaccagacctacctacgaagctgtgcaggaggtgacaggagagagagggatcgtcatcacacgctccacattcccctcttctggacgctggggaggacactggctgggagacaacacagctgcctgggaccagctggggaaatccatcattggcatgatggatttcagcctcttcggcatatcctataccgggtcagacatctgtgggttctttcaagatgctgagtatgagatgtgtgttcgctggatgcagctgggcgccttttaccccttctccaggaaccacaacaccatcgggacccggagacaagaccctgtatcctggaataaaacctttgaggatatttccagaagtgtgttggaaaccagatacaccctgttgccatatctctacaccttgatgtacaaggcccacacggagggcagcacagttgtgaggcctcttctccatgagtttgtgtcagaccgggagacctggaatatagacaaacagttcctgttgggcccagccttcctagtcagccctgtgcttgagcctaatgccagaaaggttgaagcatattttcccagggcccgctggtatgactactacaagggtgtagatatcaatgcaacgggagagtggaagaccttggaagcccctcttgagtacattaatcttcatattcgtgggggttatattctgccctggcaggaacctgccatgaacacccatttaagccggcagaagttcatgggcctcagggctgcgttgaatgctgagggacgtgctgagggctggctcttctgggatgatgggaaaaggatcaataccgatcagtactacttggccaggttttctgtcaaccagactacattgctgacgcatgaaaagtttaacaattacctcactggcacagcacccttatatctaggctacattgatatctggggattgagcagttcttccattaccaatgtgagcatctcttggaacactaataatgaagaagtctttgccaactacaactccacaaccaagatactgagtgtcaatatgactgacaaaaaaatcagcctgcacactttcaattcactgacatggagctcttcataatttttaaagcaagatactatgaacagatttaaactgcttatacttcataatgctataattattgtatatcatcaattgttccatttccagtatggatagaatattttatggttttattttgttatttttttgtgtgtatatgactcccaaagataatatctctactgtacc

SEQ ID NO: 674 - protein, 635 aa, Mus musculus
FDSSIGPLLFSDQFLQFSTHLPSANVYGLGEHVHQQYRHNMNWKTWPMFSRDTTPNEDGTNLYGVQTFFLCLEDNSGLSFGVFLMNSNAMEVTLQPTPAITYRTTGGILDFYVFLGNTPEQVVQEYLELIGRPALPSYWTLGFQLSRYDYKSLDNMKAVVERNRAAQLPYDVQHADIDYMDQKKDFTYDPVNFKGFPEFVKELHNNGQKLVIILDPAISNNSFSSNPYGPYDRGSAMKIWVNSSDGISPVIGKVWPGTTVFPDYTSPNCAVWWTKEFELFHKEVEFDGIWIDMNEVSNFIDGSFSGCSQNNLNYPPFTPSKAFSDRLLVVIVAEVLDGYLFSKTLCMDAVQHWGKQYDVHNLYGYSMAIATAKAMQEVTGERGIVITRSTFPSSGRWGGHWLGDNTAAWDQLGKSIIGMMDFSLFGISYTGSDICGFFQDAEYEMCVRWMQLGAFYPFSRNHNTIGTKRQDPVSWDKTFEDISRSVLETRYTLLPYLYTLMYKAHKEGSTVVRPLLHEFLADRETWNIDKQFLLGPAFLVSPVLEPNARNVTAYFPKAQWYDYYTGADINSTGWTTLPAPLEHINLHVRGGYILPWQQPALNTNLSRKNPLGLLIALDENKEARGELFWDDGQSK

SEQ ID NO: 675 - DNA, 5542 bp, Mus musculus
cggctggtcgcgcggtgcatccgcggcagctgcagacccgacggcgtcctgcccgcccccctgcccggtcccgcgggccgccgcggcgagagggcctcgggctgcggtgctgcgctcgcgaggggctgtgcggcgtggctgcgccgggaccgacgccacagggcctctgagctgcaagagacttcggccgtggtggccaggcgctccccacacattgtatacgcttgcagcttcaggaagctgctcctcaggctgtgcccatcctgtttggcagcccagctaccatggaggccccagaagtccctgtgggctccctgattgactttgagactgaaccacctacctcccctcctttggaagcagcaccgtcaacgctccaggacccagatggctccctgggtgatggtgcatctgagagtgagaccaccgagtccgcagacagtgagaacgacatgggcgagtcaccttcacacccatcctgggaccaggaccgacgctcttcctccaatgagtccttctcctccaatcagagtgctgattccgccccagatgaggagaccctggcacttcgagagtttatgcgcagctacgtagagaagatcttctctggaggggaggacttggaccaggaagagaaagccaagtttggggagtactgcagcggagaagacgggaaaggccgggaatggttcgcacgctttgtgagcgcacagcgctgcaagtccaagtgtgtgtcggagccaaccttctaccgcctggtgcagtccttcgcggtagtgctgtttgaatgccaccagatggacgacttcgggcctgccaagaacctcatgaccatgtgcttcacttactaccatctgggcaagccccagctgcccccgacagagcccagggagaagccagcaggcagtattgactcctacctgaagtcagccaacagctggctggcagagaagaaggacattgccgagcggctgctgaagaacacagagaacatgaaaggctttttcggggggctggagaccaagctgaaaggaccgctggtcaggaaaaatgaggaagatgagaacaaacctaaggacagacagacgaagactgtgaccatgatcagccctgaggatgagcagaagggggagaaggtttacctgtacacgcacctgaggcagcagcccatctggcacacgctgaggttctggaatgctgccttttttgatgctgtccattgtgagaggcggaagcgatcccccaccaccagaggggatgctggagagcaggaggagaagagggagaaatggtgccacatgacccaggaagaacgggatgacagcctgcgcttcaacgagaacatcaccttcgggcagctgggcacgttcacccacaacatgctggcctttggcttgaacaagaagctatgcagcgacttcctgaagaagcaggctgtgattggcaatctagatgaagagcaatacaagctgctaagtgaccacatcgagcaaatggccacagagtaggagatcagcacgtgctcgtctcctaggatctgtcaccccagtgatgaccctgcatgacaccagcagcacccagagccgctccttgctgccctagaactagcagttaaaagactccagaagcctgtctcccctgcctgtgtctgctctccctctatgtctatggtgtcccctgggttacacagctaaacgtgagggaccatctaccccccacctatcctcgagcaccaggcttgtgagatgagacagagggtggaggaagccatgagggatggtccccacggatcctgccgagagccacggacatgtggttacagaggcgcaggaggggatccacacagctgcaacgtgaggacagaatcagtgctgtgaatgacagcctgccactccctgccacaggactccctgtgagctgtacagaggaccatggagccttcctgaaaggtctcggccatctgttcttctccacctcctcatgggataggaactgaaagagaactcaagggttgtcactttcctagagggtgtgagcgttctgccagccacaaccatgtctcagactcaagagctccgtcaacagagcctcggaactggccactcaatacagtctctccctcaatagcacagaaggtccttgagctcccaggccgcagcaacacatgcagtgggacgcaggaagcgtgggcgagcattctcctcggcagctctgggggggacagagctaagagcacacagaatggatctgactgagggaggagaccacgggaaagcaaggttgcctggtagctccagcccacagtcctccccttctgaaagacccacagcgatctgcctcctcagcatccagcgtgctggctccagagctgctgttcccatccacgccagtggcctcggtcccttctgtgccaggcattctggtcactgaccttgaactaggcctgcaggctctcctgtcaccccgcatcacctcacccttctctgtccctcagccttcagtcacatttagtcatggtctgcctgtgagcgcagtgagttctctcctgacagctgtgagctcagctggtgtgggtgagcctttcctgcaggaagagcctcccaagggatggccaaagaagagcaggataggcaaagctgtggaatgtacatttcctggatgtcaggggtgaccaaaacagtacatcagttcctgagatattcaagcaaatgcccccgatagcatagtgtgtgccaaccggtacacctgactcagcattaggatcctataaccatgcctgtccctgctctgtgttttagggaagtgacataaagtgaggtcgcccttgctaagtcctgctgtcctctctagagccttcctcagagctgtgcaagcatgggagcctctccttgctcctcccagtcctgcactggcatgagttcgggtgtaggaggacatgactccaaggtgctgggagatgcaccagtcttgcgcagcagcacctgtggtctggcctctgccttgccctcatgcagccatgagctgccttaaggggaagagtgccaatggtcttcgtggacttcagaagtgactttgagactgttcctgctgaccttttgagatagtcacttaaggaaggatggctctctctcatctgtctcttgttccttattgttgcagagctagctccacagagtcagaaagttctgacccacattagacccgtgtgcgctgctaaggccatggtaaccctctggggacaggcagccattgatgggagcaaagcttgcaggtgcctggaggtggtcccaccattgcctgcagatgtccttcctctgttcacagttaggtttagtgagcatttcatgtcagggagcctctggccagtgtctctgggaggtcactaatctacccctgaggtacccactctttctgtcgtagctttcttctagggccccaacaagcaagcataaaccaggcttgctggccagcactccttggctcccctgccgaaccacagacagacagttcagattaccaggataatcccaagcagtatctccagtctcggctggtagtggcccagatctatgcaggcccattagcacacattcaaaccttccggggctgtgaccttcaaagctgtgtaaatcagtgtcaagcacattatagtgtttgccctcacaggaaaaaaaaaaaagtcccctgttctgaaaacaggccagtggtgggccgccactctgctgctatcagctctgttaggttattgtgggtgttagaggccgagcacagcgacctccagggcacctctgcggagtgactagccacaggcagagctgcattgtggtatatatactgagagatctgcattgttcacctgccagactgggattttcctctcatctaagacacaaagcgcctaaggtgctcagcgtctcaagaggactggggtcgaggctaatctccaagctccatctgcaaaggaaggaggtcttcctagctgagccgactgtacatctgcagtccctcactcaggagatgggagcaggaggatcaggagttcaaggtcatccttggctacatagggggttcaaagccagcctgggcccaatgaaacctggtctcaagagaacaaaaccaaaccaatcaaatatggtcctaagaatgcagggtgggattagagccagtgtctctgcttgagatggaatggtgttcccagcctgccttgtcactcctcacctgagaggaagcagtgggtggtctgactctgcagcccagagacacaggaggcttcagggacagtgccctactctagaaacacctgccactctagatagttagtgtgagggatccaggcttgtgtgaggggaataatgtggaaagctgaggtctaattgtggtgacgttagctgtcccaggccacaagccatacccaaccttgaccttcctgggtcacaatgatcagttggtttttccattagggagggaaggtctgggcctgcttagcaagaaccgctttattccggttcccataccacattcagccggccaggagacgagcactagaggaaagcagtaggaagggactctaggaggtggcactggccccacagcctctgggaagtgacagagatgcctcagctctaggctcctgcccttgctgctcccaccttccaagccagttgcagagcccctgctaaggaccgagcctgctcactcatctcagctccagccgcacagccacagcctcaggtctgtttagcttgggaagccaaaagtggatgcctgtgttcatgggcctcccctgggagttagtgatttgggggaccagcctcactgcagactccaggctctgacaggtagtggcctgggcccagctgcaagccatgctcccctgagctataaccccagaaactctgcactttatcaagaaaggaccccctccttatggattgccttggctttgaccctgagctaaggctggccctattccatccttcttcctagatgatgggtgtgttaatgggaggaaggaaagagaccctgcctagggaaggttggcttacagccacccttgcaagaagtgctggtatagggtcagctggggagaagagccctggtcagtggccttggattgtcacttctttcaggataaagatcccttgggggggggggagttggatgtttgactactaggagatactagaggctcagacagcaggcatgtatccccatggggaatatgtgaggacctggaccgctggctgcctcagctgtacctggttttaaatgcagctttctgtagagattctacctgcagtctgttctctcttggggttccacacccatttcttgccagcagctcccagtgatgctgtgttttgtatgttagttacacaactttgtgtcctgccaggtcatgttctaaaattaaggctgagaaaggtgtgaggtcgaagatctcaggcagcgctgtttcctgtgaagaaaaaaaaagtgtatatatccatagatatagtactttgtcttgtcaggaggtggaaaccgaaataaattatctttt

SEQ ID NO: 676 - protein, 445 aa, Mus musculus
AARDFGRGGQALPTHCIRLQLQEAAPQAVPILFGSPATMEAPEVPVGSLIDFETEPPTSPPLEAAPSTLQDPDGSLGDGASESETTESADSENDMGESPSHPSWDQDRRSSSNESFSSNQSADSAPDEETLALREFMRSYVEKIFSGGEDLDQEEKAKFGEYCSGEDGKGREWFARFVSAQRCKSKCVSEPTFYRLVQSFAVVLFECHQMDDFGPAKNLMTMCFTYYHLGKPQLPPTEPREKPAGSIDSYLKSANSWLAEKKDIAERLLKNTENMKGFFGGLETKLKGPLVRKNEEDENKPKDRQTKTVTMISPEDEQKGEKVYLYTHLRQQPIWHTLRFWNAAFFDAVHCERRKRSPTTRGDAGEQEEKREKWCHMTQEERDDSLRFNENITFGQLGTFTHNMLAFGLNKKLCSDFLKKQAVIGNLDEEQYKLLSDHIEQMATE

SEQ ID NO: 677 - DNA, 2684 bp, Mus musculus
atagcacacagatatcctggagcaacacagactcagatctaagagctgactatgccactatacaaacttcttggatggctgaatgctgtggcctgtggggtcctgcttctcgttctgcatgtgcaaggtcaggactcagccagccccatcaggaacacacacacaggccaggtgagaggcagccttgtccacgtgaaggacactgacatcgctgttcataccttcctgggaatcccctttgccaagcctcctgtaggaccactgcgctttgcacctcctgaggcccctgagccatggagtggggtgagggatgggacctcacatccaaacatgtgtctacaaaatgacaatttgatgggttcagaggatctgaagatgatgaacttgatcctgcctcccatctctatgtctgaggactgcctgtatctcaacatctatgtaccagcccatgcccatgagggttctaacctacctgtgatggtatggatccatggtggtgcactcactgttggcatggcttccatgtatgatggatccatgctggcagcaactgaggatgtggtggtggtcgctatccagtaccgcctgggtgttctgggattcttcagcactggagaccagcatgccaaaggcaactggggatacctggaccaagtggctgcccttcgttgggtccagcaaaacattgtccactttggaggcaaccctgaccgagtcaccatttttggagagtcagcaggtggcacaagtgtgtcttcacatgttgtgtcccccatgtcccagggactcttccatggtgccatcatggagagtggagtagctgtgctccctgatcttatctccagctcctctgagatggttcacagaatagtggccaatctatctggctgtgcagctgtgaactcagagaccctgatgtgctgcctaagaggcaagaatgaagcagagatgctggctattaataaggtcttcaaaatcatccctggtgtggtggatggagagttcctacccaagcatcctcaggagctgatggcctctaaggattttcaccctgtccccagcatcattggtatcaacaatgatgaatatggttggattcttcctacgatcatggacccagctcagaaaatagaggaaataaccagaaagaccctgccagctgttctaaaaagcacagccctaaaaatgatgctgcctcctgagtgtggtgacctgctaatggaggagtacatgggggacactgaggacccagagactctgcaagcacagttcagagagatgaagggggacttcatgttcgtgatccctgcactacaagtagcacattttcaacgttcccatgctcctgtctacttctatgagttccaacatcgacccagcttcttcaaggatttcaggccaccctatgtgaaggctgaccatggtgatgaaattttccttgtctttggctaccagttcggtaacataaaacttccttacactgaggaagaggagcaactaagcagaaggataatgaagtactgggccaactttgcacggcacgggaaccccaacagtgagggtctaccctactggcctgtgatggaccatgatgagcagtacctgcagctggacatccagccttctgtgggtcgagccctgaaggccagaaggctgcagttctggaccaagactctgccccagaagatccaggagctaaaggggtctcaggagaggcacaaagagttgtagtgccctgtgtgaagaaaggcatgtgggcttcatgtctgaggtttggaaagctttttgaccctaccattcacacaaccattcctaacacatacagttatccattttaccaatttatatgacaaaccctttacatgtcactccttcacaaaatgctgacaatctcttgttagagccactcaataaaagcttctgtaacaatgtggaatatggatgtaggagccccaagttcccatagtctccacaagttctgaatgctgttccaagtagatctcaaactaccagcaggtcttgggatctagtggacctgaatatttagaaactaagtcagggatgttgcatgagcctagtagttccataccaccatggacaacatagcaagacctgtaactcaataacagaaataatcactagctgggtaacttgcaaacaacagaaatgtatgtaaagttctgtggtatgagaaatagagggtgagaaaatgaacttgagccatacagtctttcagggctcagctactagacctctgatgtcagccactgaacattccagctactaaaaactgtgtccattgtccctatagaggaaatcgcatcctttccaaattgccattatctacttttgtgaaaagcttgacttggtatgtttatagacacctcaagcaaggccaagaatgggggttgaccagcaggcccaagtaggctttctctaataacaaattgcttttacgcacagggattctgcagacactgtgaagcccacatttatgtgaacataacacatctgcaaagatctttggctatgattgtgttctagagatgatatagaagagaaaagaatccccggatatgtatagcagaagagatttctgtccttggcaccctgatggcttctccatgtatggaagtgacttcttgcctttcataaaatcctaataaaacccatcttttcatggc

SEQ ID NO: 678 - protein, 559 aa, Mus musculus
MPLYKLLGWLNAVACGVLLLVLHVQGQDSASPIRNTHTGQVRGSLVHVKDTDIAVHTFLGIPFAKPPVGPLRFAPPEAPEPWSGVRDGTSHPNMCLQNDNLMGSEDLKMMNLILPPISMSEDCLYLNIYVPAHAHEGSNLPVMVWIHGGALTVGMASMYDGSMLAATEDVVVVAIQYRLGVLGFFSTGDQHAKGNWGYLDQVAALRWVQQNIVHFGGNPDRVTIFGESAGGTSVSSHVVSPMSQGLFHGAIMESGVAVLPDLISSSSEMVHRIVANLSGCAAVNSETLMCCLRGKNEAEMLAINKVFKIIPGVVDGEFLPKHPQELMASKDFHPVPSIIGINNDEYGWILPTIMDPAQKIEEITRKTLPAVLKSTALKMMLPPECGDLLMEEYMGDTEDPETLQAQFREMKGDFMFVIPALQVAHFQRSHAPVYFYEFQHRPSFFKDFRPPYVKADHGDEIFLVFGYQFGNIKLPYTEEEEQLSRRIMKYWANFARHGNPNSEGLPYWPVMDHDEQYLQLDIQPSVGRALKARRLQFWTKTLPQKIQELKGSQERHKEL

SEQ ID NO: 679 - DNA, 1971 bp, Mus musculus
gcaacacagactcagatctaagagctgactatgccactatacaaacttcttggatggctgaatgctgtggcctgtggggtcctgcttctcgttctgcatgtgcaaggtcaggactcagccagccccatcaggaacacacacacaggccaggtgagaggcagccttgtccacgtgaaggacactgacatcgctgttcataccttcctgggaatcccctttgccaagcctcctgtaggaccactgcgctttgcacctcctgaggcccctgagccatggagtggggtgagggatgggacctcacatccaaacatgtgtctacaaaatgacaatttgatgggttcagaggatctgaagatgatgaacttgatcctgcctcccatctctatgtctgaggactgcctgtatctcaacatctatgtaccagcccatgcccatgagggttctaacctacctgtgatggtatggatccatggtggtgcactcactgttggcatggcttccatgtatgatggatccatgctggcagcaactgaggatgtggtggtggtcgctatccagtaccgcctgggtgttctgggattcttcagcactggagaccagcatgccaaaggcaactggggatacctggaccaagtggctgcccttcgttgggtccagcaaaacattgtccactttggaggcaaccctgaccgagtcaccatttttggagagtcagcaggtggcacaagtgtgtcttcacatgttgtgtcccccatgtcccagggactcttccatggtgccatcatggagagtggagtagctgtgctccctgatcttatctccagctcctctgagatggttcacagaatagtggccaatctatctggctgtgcagctgtgaactcagagaccctgatgtgctgcctaagaggcaagaatgaagcagagatgctggctattaataaggtcttcaaaatcatccctggtgtggtggatggagagttcctacccaagcatcctcaggagctgatggcctctaaggattttcaccctgtccccagcatcattggtatcaacaatgatgaatatggttggattcttcctacgatcatggacccagctcagaaaatagaggaaataaccagaaagaccctgccagctgttctaaaaagcacagccctaaaaatgatgctgcctcctgagtgtggtgacctgctaatggaggagtacatgggggacactgaggacccagagactctgcaagcacagttcagagagatgaagggggacttcatgttcgtgatccctgcactacaagtagcacattttcaacgttcccatgctcctgtctacttctatgagttccaacatcgacccagcttcttcaaggatttcaggccaccctatgtgaaggctgaccatggtgatgaaattttccttgtctttggctaccagttcggtaacataaaacttccttacactgaggaagaggagcaactaagcagaaggataatgaagtactgggccaactttgcacggcacgggaaccccaacagtgagggtctaccctactggcctgtgatggaccatgatgagcagtacctgcagctggacatccagccttctgtgggtcgagccctgaaggccagaaggctgcagttctggaccaagactctgccccagaagatccaggagctaaaggggtctcaggagaggcacaaagagttgtagtgccctgtgtgaagaaaggcatgtgggcttcatgtctgagggattctgcagacactgtgaagcccacatttatgtgaacataacacatctgcaaagatctttggctatgattgtgttctagagatgatatagaagagaaaagaatccccggatatgtatagcagaagagatttctgtccttggcaccctgatggcttctccatgtatggaagtgacttcttgcctttcataaaatcctaataaaacccatcttttcatggc

SEQ ID NO: 680 - protein, 559 aa, Mus musculus; identical to SEQ ID NO: 678

SEQ ID NO: 681 - DNA, 4683 bp, Mus musculus
ggtccctggggacgatgcatgggagatgactgtggaccgggcggcatccagactcgggctgtgtggtgtgctcacgtggaaggctggactacgttacatacaaactgcaagcaggctgtgagacccagtaaccagcaaaactgtttcaaggtctgtgactggcacaaggaattgtacgactggaggctgggaacctgggatcggtgtcagcctgtgatttcgaaaagcctcgagaaatcgcgagaatgcgtgaagggtgaggaaggcatccaggtgagagagataatgtgcatccaaaaggacaaggacattcccgccgaggacatcatctgcgagtactttgaacccaagccccttctggaacaggcctgcctcatcccttgccagaaagactgcatcgtgtctgagttctcaccctggtctgagtgttccaggacctgtggcagtggcctgcagcaccgcacgaggcacgtggttgcaccgccacagtatggaggctctggctgtcccaacctcaccgagtttcaggtgtgccagtccaacccctgcgaggaggatgagagcttgtacagcttgcaggtggggccctggagcgcatgctcagtcccacacacaaggcaagccaggcaagccaggcgtcgtggcaagaacaaggagagggagaaggagagaggaaaagccattggctatcagacccgggacgtgacgtgcttaaacaggactgggaaatctgcggacctcagcttttgccagcaagagaggctgcccatgaccttccagtcctgcgtgatcaccaaagagtgccaggtgtctgagtggttggaatggagcccatgttcaaaaacatgccacgatgtcacatcccctacaggcactcgagtaaggacaaggactatcacacagtttccgattggaagtgagaaggaatgtccagctcttgaggagaaggagccctgtgtgtctcagggagatggagctgtcctctgtgctacatatggctggagaactacagagtggacagagtgccacgtggaccctttgcttagtcagcaggacaagaggcgtgccaatcagacagccctctgtggaggaggtgtccagacccgggaaatatattgcatacaaaccaacgacaacatgctctcccatggaaatacacagaaggacaaagaagcttcaaaaccagtggactcaaaattatgcactggccctgttcctaacaccacacagctgtgccacgttccttgtccaattgaatgtgaggtttcgccttggtcagcctggggaccatgtacttatgaaaactgtaatgaccagcaaggcaaaaaaggattcaaattaaggaagcgacgcattactaatgagcctactggaggttctggggcaactggaaactgccctcacttattggaagccattccctgtgaagagccatcctgctatgactggaaatcagtgagactcggagactgtgaaccagataatggaaaatcctgtgggcctggcactcaagttcaagaggttgtatgcatcaacagtgatggagaagaagtggacagacagctctgcagagacgcaatctttcctatccctgtggcctgtgatgctccatgcccgaaggactgtgtgctcagtgcgtggtcctcgtggtcctcctgttcgcatacctgctctgggaaaaccacagaagggaaacagacccgagcccggtcaattttggcctatgcaggtgaagaaggtggaattcgctgccctaacatcagtgctttgcaagaggtgcgcagctgcaatgagcatccttgcactgtgtaccactggcaaactggtccctggggtcagtgtatagaggacacatcggtgtcatccttcaatacgaccacaacatggaatggggaggcctcatgttctgtgggcatgcagacacgaaaagtcatctgtgtgcgagtcaacgtgggccaagtgggacctaagaagtgtcctgaaagccttcggcctgaaacagtgagaccctgcttgcttccttgtcggaaggactgtgtcgtgaccccatacagtgactggactccatgcccctcttcatgcagagaaggagactctggagccaggaagcagtctcgacagcgagtcatcattcagctgccagccaatggcggcaaggaatgctcagacccactatatgaagagaaggcctgtgaagcccctcccacatgtcacagctacaggtggaagacacacaaatggcgcaggtgccagttagttccttggagcattcaacaggatgttcctggagcacaggaaggctgcggacctgggcggcaggcaagagccattacttgtcgaaagcaagatggagggcaggctagcatccaggagtgcctccagtatgcaggccctgtgccagccctgacccaggcttgccagatcccctgccaagatgactgtcaatttaccagctggtccaagttttcttcatgcaacggagactgcggtgcagttaggaccagaaagcgtgctattgttggtaagaataattgcgatgctaaatatttgtaccctctgatcgagacccagtattgtccctgtgacaaatataacgcacagcctgtggggaactggtcagactgtattttaccggaagggaaggcggaggtgctgctgggaatgaaggtacaaggcgacagcaaggaatgcgggcaaggataccgttaccaagcgatggcgtgctatgatcaaaatggcagacttgtggaaacatcgcgatgcaacagccatggttacatagaagaagcctgcatcatcccctgcccctcagactgcaagctcagtgagtggtccaactggtcccgctgcagcaagtcctgtggcagcggcgtgaaggtccggtccaagtggctgcgcgaaaagccttataacggaggaaggccttgccccaaactggaccatgtcaaccaggtgtacgaggtcgtcccatgccacagtgactgtaaccagtacatatgggtcacagagccatggagtgtctgcaaggtgacctttgtggacatgcgagacaactgcggagaagttcctttgctaatgcaaacattttctgttaaatgcatgcaaaatacagcaaatggcccttctgaacatgtggaggattacctgtgtgacccaaaagaatgcccctggtctagagagtgtaaactcccatgccctgaggactgtgtcatatctgagtggggaccatggacccagtgtgctttgccttgcaatccaagtggttcgaggcaaaggtcagccgatcccatcagacagcctgctgatgaaggaagagcctgccctgatgctgtggagaaagagccctgtagcctgaacaaaaattgttaccactatgactataatgtcacagactggagtacgtgtcagctgagcgagaaggcagtttgtgggaatggcattaaaacaaggatgttggactgtgttcgaagtgatggcaagtccgttgacctaaagtactgtgaagagcttgggctggaaaagaattggccaatgaacacatcctgcacagtggaatgccctgtgaactgccagctttctgactggtcttcttggtcacaatgttctcaaacatgtggactcacaggaaaaatgatacgaaaacgaactgtaacccagccctttcaaggtgatgggaggccctgcccttctctgatggaacagtccaagccttgcccagtgaagccatgttatcggtggcaatatggccagtggtctccatgccaagttcaggaggcccagtgtggagaaggaaccaggacacggaatatttcttgtgttgtgagtgatggctcagctgaggatttcagcaaagtggtggacgaagagttctgtgctaacacagagctcatcatagatggtaataaacaaatagttttggaggaaacctgcacccagccctgcccaggtgactgttatttgaatgactggtcttcatggagtctgtgtcagctgacctgtgtaaatggtgaggatcttggctttggtggaatacaagtccggtccagagcagtgattatacaagaactggagaatcaacacctatgtccagagcagatgttagaaacaaaatcatgtgatgacggacaatgctatgagtacaagtgggtggcaagtgcttggaagggctcctctcggacagtctggtgtcaaagatcagatggcataaacgtaacagggggctgcttggtggtgagccagcctgatactgacaggtcttgtaacccaccctgtagtcaaccgcactcatattgtagtgagatgaagacctgccgctgtgaagaagggtacactgaagtcatgtcctctaacagcacccttgagcaatgcacacttattcccgtggtggtgattcccactgtggaggataaaagaggagatgtgaaaaccagccgggcagttcacccaacccagccctccattaacccagcaggacggggcaggacatggtttctacagccatttgggccagatggaagattaaagacctgggtttatggtgtcgcagccggggcatttgtgctgttagtcttcattgtctccatgatttatctagcgtgcaaaaagccaaagaaaccccaaagacggcagaacaaccgcctcaaacctttaaccttagcatacgatggagacgctgatatgtaa

SEQ ID NO: 682 - protein, 1560 aa, Mus musculus
GPWGRCMGDDCGPGGIQTRAVWCAHVEGWTTLHTNCKQAVRPSNQQNCFKVCDWHKELYDWRLGTWDRCQPVISKSLEKSRECVKGEEGIQVREIMCIQKDKDIPAEDIICEYFEPKPLLEQACLIPCQKDCIVSEFSPWSECSRTCGSGLQHRTRHVVAPPQYGGSGCPNLTEFQVCQSNPCEEDESLYSLQVGPWSACSVPHTRQARQARRRGKNKEREKERGKAIGYQTRDVTCLNRTGKSADLSFCQQERLPMTFQSCVITKECQVSEWLEWSPCSKTCHDVTSPTGTRVRTRTITQFPIGSEKECPALEEKEPCVSQGDGAVLCATYGWRTTEWTECHVDPLLSQQDKRRANQTALCGGGVQTREIYCIQTNDNMLSHGNTQKDKEASKPVDSKLCTGPVPNTTQLCHVPCPIECEVSPWSAWGPCTYENCNDQQGKKGFKLRKRRITNEPTGGSGATGNCPHLLEAIPCEEPSCYDWKSVRLGDCEPDNGKSCGPGTQVQEVVCINSDGEEVDRQLCRDAIFPIPVACDAPCPKDCVLSAWSSWSSCSHTCSGKTTEGKQTRARSILAYAGEEGGIRCPNISALQEVRSCNEHPCTVYHWQTGPWGQCIEDTSVSSFNTTTTWNGEASCSVGMQTRKVICVRVNVGQVGPKKCPESLRPETVRPCLLPCRKDCVVTPYSDWTPCPSSCREGDSGARKQSRQRVIIQLPANGGKECSDPLYEEKACEAPPTCHSYRWKTHKWRRCQLVPWSIQQDVPGAQEGCGPGRQARAITCRKQDGGQASIQECLQYAGPVPALTQACQIPCQDDCQFTSWSKFSSCNGDCGAVRTRKRAIVGKNNCDAKYLYPLIETQYCPCDKYNAQPVGNWSDCILPEGKAEVLLGMKVQGDSKECGQGYRYQAMACYDQNGRLVETSRCNSHGYIEEACIIPCPSDCKLSEWSNWSRCSKSCGSGVKVRSKWLREKPYNGGRPCPKLDHVNQVYEVVPCHSDCNQYIWVTEPWSVCKVTFVDMRDNCGEVPLLMQTFSVKCMQNTANGPSEHVEDYLCDPKECPWSRECKLPCPEDCVISEWGPWTQCALPCNPSGSRQRSADPIRQPADEGRACPDAVEKEPCSLNKNCYHYDYNVTDWSTCQLSEKAVCGNGIKTRMLDCVRSDGKSVDLKYCEELGLEKNWPMNTSCTVECPVNCQLSDWSSWSQCSQTCGLTGKMIRKRTVTQPFQGDGRPCPSLMEQSKPCPVKPCYRWQYGQWSPCQVQEAQCGEGTRTRNISCVVSDGSAEDFSKVVDEEFCANTELIIDGNKQIVLEETCTQPCPGDCYLNDWSSWSLCQLTCVNGEDLGFGGIQVRSRAVIIQELENQHLCPEQMLETKSCDDGQCYEYKWVASAWKGSSRTVWCQRSDGINVTGGCLVVSQPDTDRSCNPPCSQPHSYCSEMKTCRCEEGYTEVMSSNSTLEQCTLIPVVVIPTVEDKRGDVKTSRAVHPTQPSINPAGRGRTWFLQPFGPDGRLKTWVYGVAAGAFVLLVFIVSMIYLACKKPKKPQRRQNNRLKPLTLAYDGDADM

SEQ ID NO: 683 - DNA, 4452 bp, Mus musculus
agagagataatgtgcatccaaaaggacaaggacattcccgccgaggacatcatctgcgagtactttgaacccaagccccttctggaacaggcctgcctcatcccttgccagaaagactgcatcgtgtctgagttctcaccctggtctgagtgttccaggacctgtggcagtggcctgcagcaccgcacgaggcacgtggttgcaccgccacagtatggaggctctggctgtcccaacctcaccgagtttcaggtgtgccagtccaacccctgcgaggaggatgagagcttgtacagcttgcaggtggggccctggagcgcatgctcagtcccacacacaaggcaagccaggcaagccaggcgtcgtggcaagaacaaggagagggagaaggagagaggaaaagccgtgaaggacccagaggcccactgggacatccagattggctatcagacccgggacgtgacgtgcttaaacaggactgggaaatctgcggacctcagcttttgccagcaagagaggctgcccatgaccttccagtcctgcgtgatcaccaaagagtgccaggtgtctgagtggttggaatggagcccatgttcaaaaacatgccacgatgtcacatcccctacaggcactcgagtaaggacaaggactatcacacagtttccgattggaagtgagaaggaatgtccagctcttgaggagaaggagccctgtgtgtctcagggagatggagctgtcctctgtgctacatatggctggagaactacagagtggacagagtgccacgtggaccctttgcttagtcagcaggacaagaggcgtgccaatcagacagccctctgtggaggaggtgtccagacccgggaaatatattgcatacaaaccaacgacaacatgctctcccatggaaatacacagaaggacaaagaagcttcaaaaccagtggactcaaaattatgcactggccctgttcctaacaccacacagctgtgccacgttccttgtccaattgaatgtgaggtttcgccttggtcagcctggggaccatgtacttatgaaaactgtaatgaccagcaaggcaaaaaaggattcaaattaaggaagcgacgcattactaatgagcctactggaggttctggggcaactggaaactgccctcacttattggaagccattccctgtgaagagccatcctgctatgactggaaatcagtgagactcggagactgtgaaccagataatggaaaatcctgtgggcctggcactcaagttcaagaggttgtatgcatcaacagtgatggagaagaagtggacagacagctctgcagagacgcaatctttcctatccctgtggcctgtgatgctccatgcccgaaggactgtgtgctcagtgcgtggtcctcgtggtcctcctgttcgcatacctgctctgggaaaaccacagaagggaaacagacccgagcccggtcaattttggcctatgcaggtgaagaaggtggaattcgctgccctaacatcagtgctttgcaagaggtgcgcagctgcaatgagcatccttgcactgtgtaccactggcaaactggtccctggggtcagtgtatagaggacacatcggtgtcatccttcaatacgaccacaacatggaatggggaggcctcatgttctgtgggcatgcagacacgaaaagtcatctgtgtgcgagtcaacgtgggccaagtgggacctaagaagtgtcctgaaagccttcggcctgaaacagtgagaccctgcttgcttccttgtcggaaggactgtgtcgtgaccccatacagtgactggactccatgcccctcttcatgcagagaaggagactctggagccaggaagcagtctcgacagcgagtcatcattcagctgccagccaatggcggcaaggaatgctcagacccactatatgaagagaaggcctgtgaagcccctcccacatgtcacagctacaggtggaagacacacaaatggcgcaggtgccagttagttccttggagcattcaacaggatgttcctggagcacaggaaggctgcggacctgggcggcaggcaagagccattacttgtcgaaagcaagatggagggcaggctagcatccaggagtgcctccagtatgcaggccctgtgccagccctgacccaggcttgccagatcccctgccaagatgactgtcaatttaccagctggtccaagttttcttcatgcaacggagactgcggtgcagttaggaccagaaagcgtgctattgttgaaaaatacaataaaactcaaaccaagagcattcttcatttgtaccctctgatcgagacccagtattgtccctgtgacaaatataacgcacagcctgtggggaactggtcagactgtattttaccggaagggaaggcggaggtgctgctgggaatgaaggtacaaggcgacagcaaggaatgcgggcaaggataccgttaccaagcgatggcgtgctatgatcaaaatggcagacttgtggaaacatcgcgatgcaacagccatggttacatagaagaagcctgcatcatcccctgcccctcagactgcaagctcagtgagtggtccaactggtcccgctgcagcaagtcctgtggcagcggcgtgaaggtccggtccaagtggctgcgcgaaaagccttataacggaggaaggccttgccccaaactggaccatgtcaaccaggtgtacgaggtcgtcccatgccacagtgactgtaaccagtacatatgggtcacagagccatggagtgtctgcaaggtgacctttgtggacatgcgagacaactgcggagaagttcctttgctaatgcaaacattttctgttaaatgcatgcaaaatacagcaaatggcccttctgaacatgtggaggattacctgtgtgacccaaaaatgcccctgggctctagagagtgtaaactcccatgccctgaggactgtgtcatatctgagtggggaccatggacccagtgtgctttgccttgcaatccaagtggttcgaggcaaaggtcagccgatcccatcagacagcctgctgatgaaggaagagcctgccctgatgctgtggagaaagagccctgtagcctgaacaaaaattgttaccactatgactataatgtcacagactggagtacgtgtcagctgagcgagaaggcagtttgtgggaatggcattaaaacaaggatgttggactgtgttcgaagtgatggcaagtccgttgacctaaagtactgtgaagagcttgggctggaaaagaattggccaatgaacacatcctgcacagtggaatgccctgtgaactgccagctttctgactggtcttcttggtcacaatgttctcaaacatgtggactcacaggaaaaatgatacgaaaacgaactgtaacccagccctttcaaggtgatgggaggccctgcccttctctgatggaacagtccaagccttgcccagtgaagccatgttatcggtggcaatatggccagtggtctccatgccaagttcaggaggcccagtgtggagaaggaaccaggacacggaatatttcttgtgttgtgagtgatggctcagctgaggatttcagcaaagtggtggacgaagagttctgtgctaacacagagctcatcatagatggtaataaacaaatagttttggaggaaacctgcacccagccctgcccaggtgactgttatttgaatgactggtcttcatggagtctgtgtcagctgacctgtgtaaatggtgaggatcttggctttggtggaatacaagtccggtccagagcagtgattatacaagaactggagaatcaacacctatgtccagagcagatgttagaaacaaaatcatgtgatgacggacaatgctatgagtacaagtgggtggcaagtgcttggaagggctcctctcggacagtctggtgtcaaagatcagatggcataaacgtaacagggggctgcttggtggtgagccagcctgatactgacaggtcttgtaacccaccctgtagtcaaccgcactcatattgtagtgagatgaagacctgccgctgtgaagaagggtacactgaagtcatgtcctctaacagcacccttgagcaatgcacacttattcccgtggtggtgattcccactgtggaggataaaagaggagatgtgaaaaccagccgggcagttcacccaacccagccctccattaacccagcaggacggggcaggacatggtttctacagccatttgggccagatggaagattaaagacctgggtttatggtgtcgcagccggggcatttgtgctgttagtcttcattgtctccatgatttatctagcgtgcaaaaagccaaagaaaccccaaagacggcagaacaaccgcctcaaacctttaaccttagcatacgatggagacgctgatatgtaa

SEQ ID NO: 684 - protein, 1483 aa, Mus musculus
REIMCIQKDKDIPAEDIICEYFEPKPLLEQACLIPCQKDCIVSEFSPWSECSRTCGSGLQHRTRHVVAPPQYGGSGCPNLTEFQVCQSNPCEEDESLYSLQVGPWSACSVPHTRQARQARRRGKNKEREKERGKAVKDPEAHWDIQIGYQTRDVTCLNRTGKSADLSFCQQERLPMTFQSCVITKECQVSEWLEWSPCSKTCHDVTSPTGTRVRTRTITQFPIGSEKECPALEEKEPCVSQGDGAVLCATYGWRTTEWTECHVDPLLSQQDKRRANQTALCGGGVQTREIYCIQTNDNMLSHGNTQKDKEASKPVDSKLCTGPVPNTTQLCHVPCPIECEVSPWSAWGPCTYENCNDQQGKKGFKLRKRRITNEPTGGSGATGNCPHLLEAIPCEEPSCYDWKSVRLGDCEPDNGKSCGPGTQVQEVVCINSDGEEVDRQLCRDAIFPIPVACDAPCPKDCVLSAWSSWSSCSHTCSGKTTEGKQTRARSILAYAGEEGGIRCPNISALQEVRSCNEHPCTVYHWQTGPWGQCIEDTSVSSFNTTTTWNGEASCSVGMQTRKVICVRVNVGQVGPKKCPESLRPETVRPCLLPCRKDCVVTPYSDWTPCPSSCREGDSGARKQSRQRVIIQLPANGGKECSDPLYEEKACEAPPTCHSYRWKTHKWRRCQLVPWSIQQDVPGAQEGCGPGRQARAITCRKQDGGQASIQECLQYAGPVPALTQACQIPCQDDCQFTSWSKFSSCNGDCGAVRTRKRAIVEKYNKTQTKSILHLYPLIETQYCPCDKYNAQPVGNWSDCILPEGKAEVLLGMKVQGDSKECGQGYRYQAMACYDQNGRLVETSRCNSHGYIEEACIIPCPSDCKLSEWSNWSRCSKSCGSGVKVRSKWLREKPYNGGRPCPKLDHVNQVYEVVPCHSDCNQYIWVTEPWSVCKVTFVDMRDNCGEVPLLMQTFSVKCMQNTANGPSEHVEDYLCDPKMPLGSRECKLPCPEDCVISEWGPWTQCALPCNPSGSRQRSADPIRQPADEGRACPDAVEKEPCSLNKNCYHYDYNVTDWSTCQLSEKAVCGNGIKTRMLDCVRSDGKSVDLKYCEELGLEKNWPMNTSCTVECPVNCQLSDWSSWSQCSQTCGLTGKMIRKRTVTQPFQGDGRPCPSLMEQSKPCPVKPCYRWQYGQWSPCQVQEAQCGEGTRTRNISCVVSDGSAEDFSKVVDEEFCANTELIIDGNKQIVLEETCTQPCPGDCYLNDWSSWSLCQLTCVNGEDLGFGGIQVRSRAVIIQELENQHLCPEQMLETKSCDDGQCYEYKWVASAWKGSSRTVWCQRSDGINVTGGCLVVSQPDTDRSCNPPCSQPHSYCSEMKTCRCEEGYTEVMSSNSTLEQCTLIPVVVIPTVEDKRGDVKTSRAVHPTQPSINPAGRGRTWFLQPFGPDGRLKTWVYGVAAGAFVLLVFIVSMIYLACKKPKKPQRRQNNRLKPLTLAYDGDADM

SEQ ID NO: 685 - DNA, 1497 bp, Mus musculus
cacgcacgcacgcgggcccggctccggggttttcggcttttactccaggcggcggggaggagggggagccccggccacactgtagggaggaggaagaggaggacgtggaggagggaggaagagaagaggcgaggaggccaggggcggggggcggggggcttgccaccttcagcccccccccgcgagcgcccaaggtgtacacactgttaccagcacagccacaaggcggatttcctgtgtgcttgaagagagagaaagcaatgtccccgtgtctgtagagatgatttgcagtccagccctgctgaagctgaccgaatgagactatgggctgtgcctctgccaagcatgtcgctactgttcaaaatgaagaggaagcacagagagggaaaagctaccagaatggagatgtgtttggcgatgagtataggatcaaacccgtggaagaggtcaaatacatgaaaaatggggcagaagaggagcagaaaatagcagccagaaaccaagaaaacctggaaaaaagtgccagctcgaacacaaggcttaaaactaataaagaaatccctggattagttcatcaacccagagcaaacatgcacatctctgaaagccaacaagaattcttcagaatgctggatgaaaaaatcgaaaagggtcgggattactgttctgaagaagaggatatcacatagcatcggttctcagtcggaccaggagctactactgtgtaaataggttgcaccccagttgaaacctttgcaaaggtcggttctcttcactgaacagcactatagcgaacgaagactgttccatgtcctatgccccattaaattacagtgtttcttaatgaacctgcagaggaatattgctaaacacaaacacacacacacaagaacaaaaacaacaacaacaaaaaaaaaaactgttctggaactttctttgttgctgctagttaaaacttgttgcaacttttcacttctctcgtgtccaagtatgcagcaaaattctgcagttcactttaaagatgttattggtttcaggatgctctctagcctgtatcctcggcgattgggtagaggtgaactctgatacagatgtcagttctagcctggttctgctttgatgtcaagcatcccctcccttctattctccttatccatctctttcgagtggtccagagatggcctgagccttgcttctcactggtaacgtggggctttggacatgggatggtggccacggtgagcctagtttctctgcttgaaagagccacaattgattgaaagcctgttgtaacctaacctgactcccggaagtgacaaaggaacaagtgagcagtaggttgttccgcttactaggactcttagtgcaggattaagcttgtagcattggcttttgctcagatgcaaatggaagtgtgaccacgtgaccacaatcattttcaacccctccctcctcacttttttttctaagaaaataaacattttgctgtttttctgt

SEQ ID NO: 686 - protein, 46 aa, Mus musculus
EKSASSNTRLKTNKEIPGLVHQPRANMHISESQQEFFRMLDEKIEK

SEQ ID NO: 687 - DNA, 4558 bp, Mus musculus
gtagaagtttgtggagcgctttctcagcggctggtcccagacggacctcgggcgcctcgctcttcggtggccgccccgttttctcgggattctttctgtggtgatggactctccggacgctctgtaagggaagctgagagctggcggcgcgagttcagaggaggagggctgggaagtccgttcgctgacagcggcgcgactgaacgcggacggcgtcgggctccggccggctgagagcttcgcctaccttcccgcggcctgtgcgcgggcgatgctgcggccccgaggcgcggcgcggcgagcacggagggcgcctccgagagcctagagctggtttccgcccccttcccccggggcaagtgggcatggaacagtgagagcccctcgctcggcgaggccgcgcgcggaggctcccccatggccgggacatacagctccacattgaagactctggaggacttgaccttggactccgggtatggggccggcgactcctgccgctcgctcagcctttcgtcttccaagtccaactcgcaggcgctcaactcttcggcgcagcagcaccgcggggcggcctggtggtgctactccggctccatgaacagccgccacaacagctgggacacggtgaacacagtgctgcccgaggatcccgaagtggccgacctcttctcccgctgcccgcggctcccggagctggaggagttcccttggaccgagggagacgtggcccgggtgctccgcaaaagcgtcggcggccggaggctgccctcgttctccgccgaggctgtgagacgcttggccggactcctccgccgggcgctcatccgcgtggcccgggaggcgcagcgccttagcgtgctgcacgctaagtgcacccgcttcgaggtgcagagtgcggtgcgcctggtgcacagctgggcgctggccgagagctgcgcactggcagcggtcaaggcgttgtccctctacagcatgagcgctggggatgggctgcgccgcggcaagtcggcgcgctgcggcctcactttctccgtgggccgcttcttccgttggatggtggacactcgcatctccgtgcgcatccatgagtacgcggccatctcgctaacggcttgcatggagaacctggtggaggagatccgggccagggtgctggcgagccagagcccagatggcggaggggcaggaggtggagaggtatccgctgaggccttggagatggtcatcaacaacgacgccgagctctggggagtcctgcaaccctatgagcatctcatctgtggcaagaacgccaatggtgtcctctctctccctgcctacttcagtccctacaatggtgggtccctgggccacgatgagcgagcagatgcctatgctcagctggaacttcggacactggagcagtcactcctggccacgtgtgtgggcagcatctccgagctcagtgatctggtctctcgagccatgcaccacatgcagggccgccaccccctgtgcccaggcaccagccctgctcgccaggcccgccagccaccacagcccatcacgtggtcccccgatgctctccacacactctactacttcctgaggtgtccacagatggagtccatggagaaccccaacctggatcccccaagaatgactctgaataatgaacggcccttcatgctgctgccaccgctgatggagtggatgcgggttgcaatcacctatgcagaacaccgtcgcagccccactgtggacagtggcgatatccggcaggcagcccggctactgctgccaggcctggactgtgagccccggcaactcaaacccgagtgctgcttcagttccttccggaggctggatgctcgagctgctactgaacgcttcaaccaggacctgggcttccgcatgctcaactgtgggagaacagacctcatcagccaggccatcgaggccctgggcccggatggggtgaacacaatggatgaccagggtatgacgccgcttatgtacgcctgtgctgctggggacgaagccatggtccagatgctgattgatgctggagctaacttagatatccaggttccaagccactctcccaggcatccgtccgtccaccccgacagcaggcattggacctccctgacatttgcggtgctacatggacacatctctgtggtgcagctgctacttgatgccggtgcccatgtggagggctcagctgtgaacagtggggaggacagctacgccgagacacccctgcagctggcctctgcagccgggaactatgagctggtcagcttgctgctgagccggggtgctgaccccctcctcagcatgctggaagccaacggcatggcatcttccctccacgaggagatgaactgcttcagccactccgctgcccacggccacagaaatgtcctgagaaagctcctgactcagccacagcaggctaaagcagatgtgctgtctctagaagagatcctggctgagggtgtggaggaaagcgacacatcgagccagggcagcagtgaggggcctgtgaggctaagccgaacccgaacgaaggccctgcaggaagccatgtactacagcgctgagcacggttacctggacatcaccatggagctgagggcactgggtgttccctggaagctgcacatctggatagagtcgctgcggacctccttctcacagtcacggtactcagtggtgcagagcctcctgaaggatttcagctccatcaaggaagaggagtacaacgaggagctggtgacagaaggcttgcagctcatgtttgatatcctcaagaccagcaaaaacgactccgtcctccagcagctggccaccatcttcacacactgctatggcaccagccccatccccagcatcccggagatccggaagaccctgccagccaggctagatcctcactttctgaacaacaaggagatgtctgatgtaaccttcctagtggaaggaaagctgttttatgcacacaaagtccttttggtgacagcatctaacaggttcaagaccttaatgaccaacaaatcagaacaagatggggacagcagcaaaaccattgagatcagcgacatcaagtaccacatctttcagatgctgatgcagtacctgtactacggaggaaccgagtccatggaaatccccactgctgacatcctgcagctgctgtcagctgccaacctgttccagctagatgccctgcagagacactgtgagatcctgtgctcccagacccttagtgtggaaagtgctgtcaacacctacaaatatgccaagatccacaacgccccggagctggccctcttctgtgaaggcttcttcctcaagcacatgaaggccctgctagagcaggatgccttccggcagctcatctatggccgaagcagcaaagtccagggcctggacccactgcaggatctgcagagcaccctagcagagcgagtgcattctgtctacgtcacctcccgggtgtgaggcaggatggagggggactgttatctgagggcgtgcaaaggtctgttaaggccagaaaccaccagtgacacccccagtggaaggaggcttgtaggctttaggggtacttcctgctcttcccctagataaccaatcatctgtggtgttgaccgacccttgggtgaacagagtccacttcactgttgctcaaccagtaactggcaagggggtgtaacatagttgcaccttgagggccaccctgtgccctctcccctccagtggctcagcagcaagctcacctcagctccagctctcgccatcctggctggactgttaggggcatgggcattcttatgaatgtagaaaatggatcctgagccccaggccactggatgcagtagctggtatgctttgttttcctaaacagagaagaaagggtttccaaatcctgtcctccaagctgtgcctttgaaagggctggtgaggtggcccctgtctgtgaagactggacctctagtcgcctgccccacgagactactatgttaggagtctgagctcagagcttccgagctgatgatgggctacagtacaggaactcaaggacttccgctcttgctgctacaactggcagccaaagtgaagaggttggttctaggtcgggcctagctctaatgtgtctgcaggctgaggcagcagagtgccttccagttaggacaggggtgcaagagcacacttgtcacctgggatctgtgactctggggcatgaaggacaaggcctcggtggaagagaagctatgtcccctcccatcctgtcctcagtcttggctccccatcctctggcctgtttgtggacagatgctgggacagcatcaagaacagctaccttagaaactatttattcatcagaagcccccagggcttgcaatcctggaaagatattttcaacttgctgcttgtgcgggatgtacaaaggaatgaatggtattttattgctgtaatattgtataatactgtaactataccttaatgttgttacttactgtaaatgtgctatggttttatcaacaataaacactcattaacattg

SEQ ID NO: 688 - protein, 1024 aa, Mus musculus
MAGTYSSTLKTLEDLTLDSGYGAGDSCRSLSLSSSKSNSQALNSSAQQHRGAAWWCYSGSMNSRHNSWDTVNTVLPEDPEVADLFSRCPRLPELEEFPWTEGDVARVLRKSVGGRRLPSFSAEAVRRLAGLLRRALIRVAREAQRLSVLHAKCTRFEVQSAVRLVHSWALAESCALAAVKALSLYSMSAGDGLRRGKSARCGLTFSVGRFFRWMVDTRISVRIHEYAAISLTACMENLVEEIRARVLASQSPDGGGAGGGEVSAEALEMVINNDAELWGVLQPYEHLICGKNANGVLSLPAYFSPYNGGSLGHDERADAYAQLELRTLEQSLLATCVGSISELSDLVSRAMHHMQGRHPLCPGTSPARQARQPPQPITWSPDALHTLYYFLRCPQMESMENPNLDPPRMTLNNERPFMLLPPLMEWMRVAITYAEHRRSPTVDSGDIRQAARLLLPGLDCEPRQLKPECCFSSFRRLDARAATERFNQDLGFRMLNCGRTDLISQAIEALGPDGVNTMDDQGMTPLMYACAAGDEAMVQMLIDAGANLDIQVPSHSPRHPSVHPDSRHWTSLTFAVLHGHISVVQLLLDAGAHVEGSAVNSGEDSYAETPLQLASAAGNYELVSLLLSRGADPLLSMLEANGMASSLHEEMNCFSHSAAHGHRNVLRKLLTQPQQAKADVLSLEEILAEGVEESDTSSQGSSEGPVRLSRTRTKALQEAMYYSAEHGYLDITMELRALGVPWKLHIWIESLRTSFSQSRYSVVQSLLKDFSSIKEEEYNEELVTEGLQLMFDILKTSKNDSVLQQLATIFTHCYGTSPIPSIPEIRKTLPARLDPHFLNNKEMSDVTFLVEGKLFYAHKVLLVTASNRFKTLMTNKSEQDGDSSKTIEISDIKYHIFQMLMQYLYYGGTESMEIPTADILQLLSAANLFQLDALQRHCEILCSQTLSVESAVNTYKYAKIHNAPELALFCEGFFLKHMKALLEQDAFRQLIYGRSSKVQGLDPLQDLQSTLAERVHSVYVTSRV

SEQ ID NO: 689 - DNA, 5735 bp, Mus musculus
actcacatctgtctttcaggctgtaactgagaagaattttgaaacaacggattttcgagcctctctagaaaatggtgttctgttgtgcgacttgattaataagctcaaacctggcgtcgttaagaagatcaatagactgtctaccccaatagcaggtttggataacataaatgtttttttgagagcttgtgaacagattggattgaaagaagcccagctttttcatccgggggatctacaggacttatcaaaccgagtcaccgtcaagcaagaagagactgacaggagactgaaaaatgttttgataactttgtactggctgggaagaaaagcacaaagtaacccctactataatggtccctatctcaatttgaaagcttttgagactcttttagggcaagctttgactaaggcacttgaagattccagctgcctgaaaagaagtggccgggacagtggctacggggacatctggtgtcctgacagaggagaatttcctgcccctccaggtagccacagaagggaagattcctttgagagcttggactcgctggggtccagatctctgaccagctgttcctcagacttcactctgagagttgggaaggaaggttgcgaaagtgacatcgattgggaatttacattcaaaatgcaggattacaacaaagatgatatgtcctaccgaaggatttcagccattgagccaaagtcagctctcccgttcaatcgtttcttgccgaacaaaagcaagcagccgtcctatgtgccagcacctttgaggaagaagaggccagacaaacacgaggataacaggaggagctgggcaagcccggtctacacagaaacagacggaacattttcaagtacccagaggagaacctggggtcccaagatggagacctggcacacagtccaagaaacttccacctcttcttggtgtgtagaagaggaagaggaaaagctcacgcgcatgcccaacattgtgaaggatgatctgtatgtgcggaagcttagccccgtcatgccaagtccagggagctcttttgatcagttccttcccaaatgttggactccagaagatatgaactggaaaaaaattaaaagagagacttataagccatggtataaggaatttcagggattcagtcagtttttattgcttcaggccctccaaacctactctgatgacatcttgtcctcggaaacaagtgtcaaactcgatcctacctctggccccaggctcataactcgcaggaagaatcgctctcccgcaccaggctatcgagcccatgaccttgagctgccagccctagatcccgacttagaaaatgatgatttctttgtcagaaaaacaggggctttccatgcaaatccgtgtgtccttcgagcctttgaagactttagaagtttctcggagccagacgatgccgtggaacgagatataattttgcagtgtcgggaaggtgaactcgtacttccagatttagaaaaggatgatatgattgtccgcaggattccagctcagaagaaagaagtgcccctttctggggccccggataggtaccagccagtccctttccctgaaccctggaccctacctccagaaatccaagcgaagtttctctctgtgctcgaaaggacacgcccacccaaagaacaaagcagcggctgtagagtgttagtcccttcctatcgacagaagaaagacgacatgttggctcgcaagatccagtcttggaagctggggactgctgtacctcccatcagtttcaagcctggcccctgcagcgaggccgacctgcagaagtgggaggccatctgggaggccagcaggcttaggcacaggaagcggctgatggttgagagactctttcaaaagatctatggtgagaatgggagcaagtccatgagcgatgtcagcgcagaggatgttcagaacctgcgtcaggtgcgctacgaggagatgcagaaaataaaatcccagctgaaagaacaagatcagaaatggcaggatgaccttgcaaaatggaaaaaccgccggaagagttacacttcagatctgcagaagaaaaaggaagagagggaagagattgagaagcaggcactggagaagtctgaccgcagctccaagacatttagggaaatgctgcaggacagggaatctcgaggttctacagttacgtcttggaggaggacctattcctctgatgacatcctcgatgatggagtgctccctcctacagtgactctgtcagaaactagttaccagagcgagagactagaagatgaggcaagagcgcatcctgctgagatgcccaaagaagattccacaacatttgcaaatagagaggacagtgtagtagctgagactcagcttgcttctcacagtcctgaagagcaacaaccacgccggacccctttgccttccgaggaaccacaccaggcctctctatcttctacactacagcgtccatcctcactctcttctcagcagtcatggagtacaagagcagagtccactcggatttcagcttctctccctagaagttaccagagaaccgatacagccaggttaacatctgtggtcacagcgagaccttttggcacatcttcaaggggaatctcctcactgcccagatcctacacgatggatgatggctggaaatacaacggagatgttgaagttgtcaagagagagcaactcgatttgggcagagccactggcccgaagcctgactccagccactttatttcgggctcagccagtgagaaggaggtcatagccacagaagatgtggcaagcttgtcctctcccacactcccttcctcatctctctcccacgaccgggcagtctcttccaaagccacgttctcatcaatgtctggtttggattcagtgtctgactctggagaaggaagaggctcaccattgagggaagtttccaggtccctggatcagttcagcgatatgagagtcagcataaaccagacgcccgggaacaaacctgtctttgggtttacgataaaatgggatatttctgggatcttcgtagcatcagtcgaacaaggtagcccagcagaattttctcagctgcaggtagatgatgaaattcttgccatcaataacaccaagttttcatataaggatacaaaaaagtgggaggaagttatggcaaacgcccaagaaactggaaacttagtgatggacgtccggcgttacggaaagtctggttcatctgaaacaaagtggatcgatacaacatcaggaatttacaactcagacaagtcttcaagtttatcagtcacaactgatttctctgaaagccttcagagtccttatactgaatccaaagaagtcaatggaattcacgaggaaagtaacccctttgattcaaaagcatcagaatccatttctttgaaaaatttaaaaaggcgatcacaattttttgaacaaggaagctcggattctgtggcccccgatcttccagttccaaccctcagtgccccgagtcgctgggcttgggatcaagaggaggagagacggaggcaggagcggtggcagaaagagcaagatcgcctattgcaggaaaaataccagcgtgagcaggagaagctgagggaggagtggcagagagcccaacaggaggcggagagagagaattccaagtacctggatgaggagctgatggtcctaaattccaacagcatttctctgacctcccgggagcctgtggccgccacctgggaagccacgtggagtgaagggtccaagtctctggacagcgaaggcacccgagcgggagaggaggacaggggacagctggaagacgatgctgtgtatgaggaccaaagtcagaagctgcaggaacttgagcaggagaagaaacggaaggagcaagaggctcaggaagaggagcgccgcaagcagcgggaggcccaggcctgggcagaggcagaagctaaggcttgggcggaggcccaggctcgggcagaggcagaagctaaggctcgggcggaggcccaggcccgggcagaggctgaggctcaaaaacgagctgaagctcagaagctccaggcagagagggaacgtgaaacgtccgtcaaaatataccagtaccgaaggcccattgattcctacgacctaccaaagagagaagacgacacttcagggatgcttccaactgacaggagtaaatcaagatctactacggaactaaatgaccccctcatagagaaaaatggaagcagcaaatattcagagagaattggggccactagcttttcacataggagttctaagaaggatcaagccccctcagaagcagagttggagagacagcaaatccttcaggaaatgaggaagagaacatctctccacaatgacaacagctggatccgacagcgcagcgccagtgtgaacaaggagcccatctgcctgcctgggatcatgaggagaggggagtctctggacaatctggattcccagcggccgggttcttggaggcagtccccttggcacagccagcctgccggggtctatgcgtcttcctctgtccaggacttcagtcgccccccacctcagctgttgtctacatcaaaccgtgcctacatgcggaacccatcctctgcggtgccacctccagccggctctgtgaagacctccccagggtctccctctccacgcagccattccccttccatgtcacagtcaggctctcagctacggaataggtcagtgagtgggaagcgtgtgtgctcctactgtaataacattctgggcaaaggagccgccatgatcatcgagaccctgggtctttcttatcatttacattgttttaagtgtgtctcctgtgggtgtgacctcggaggctcttcctcaggagctgaagtcagaatccgaaaccaccaactctactgcaatgactgctatctccgattcaaatctggacggccaaccgccatgtgatgtaaacccccattcgaaagcgctgttgcagatagaagaggaggcgcttgtcactgatgcagagctataaaaaaaaaaatgctggatggttttttcccctcttttttttttttaaaggaataatcattgcctcgttaaatgacataggaacactgtggtgttggtaggacctgtatttttgttgtttatttataagaaggtaattatgtgtgtgtgtgtgggggggggaggagtgcagtattgaccttttaaattcagcatcctaaaagcacaagtggaaaagaaaactaaacaaagctcaagaacttaaaatccttctcatactcatatgattaatgatctcgtttgactctctagtggtttttcgaagaaggtattttattttaattttttaagttcttaaacattatttgaaatagttaatataaatgtgtaactgtgtttgtttattataatgtattctaagttaatgtggatccatatgaaaaatttcacttaaatccactcataaatttgcttcttttgtggttttctttacacggaaataatccaattgaaaaataattttgcctctctgtaatgttttattggtttgaggagggcactcaattttctttacaaggactgttgatgctaagcaaatgccaggagagggctgtttactttcagtaatgaaaaatatccatggcttgtataccagtgatttcctccagaaacacgtgagctcttctgttccgctgcctttgtaaataaacttggtgatgcattt

SEQ ID NO: 690 - protein, 1654 aa, Mus musculus
LTSVFQAVTEKNFETTDFRASLENGVLLCDLINKLKPGVVKKINRLSTPIAGLDNINVFLRACEQIGLKEAQLFHPGDLQDLSNRVTVKQEETDRRLKNVLITLYWLGRKAQSNPYYNGPYLNLKAFETLLGQALTKALEDSSCLKRSGRDSGYGDIWCPDRGEFPAPPGSHRREDSFESLDSLGSRSLTSCSSDFTLRVGKEGCESDIDWEFTFKMQDYNKDDMSYRRISAIEPKSALPFNRFLPNKSKQPSYVPAPLRKKRPDKHEDNRRSWASPVYTETDGTFSSTQRRTWGPKMETWHTVQETSTSSWCVEEEEEKLTRMPNIVKDDLYVRKLSPVMPSPGSSFDQFLPKCWTPEDMNWKKIKRETYKPWYKEFQGFSQFLLLQALQTYSDDILSSETSVKLDPTSGPRLITRRKNRSPAPGYRAHDLELPALDPDLENDDFFVRKTGAFHANPCVLRAFEDFRSFSEPDDAVERDIILQCREGELVLPDLEKDDMIVRRIPAQKKEVPLSGAPDRYQPVPFPEPWTLPPEIQAKFLSVLERTRPPKEQSSGCRVLVPSYRQKKDDMLARKIQSWKLGTAVPPISFKPGPCSEADLQKWEAIWEASRLRHRKRLMVERLFQKIYGENGSKSMSDVSAEDVQNLRQVRYEEMQKIKSQLKEQDQKWQDDLAKWKNRRKSYTSDLQKKKEEREEIEKQALEKSDRSSKTFREMLQDRESRGSTVTSWRRTYSSDDILDDGVLPPTVTLSETSYQSERLEDEARAHPAEMPKEDSTTFANREDSVVAETQLASHSPEEQQPRRTPLPSEEPHQASLSSTLQRPSSLSSQQSWSTRAESTRISASLPRSYQRTDTARLTSVVTARPFGTSSRGISSLPRSYTMDDGWKYNGDVEVVKREQLDLGRATGPKPDSSHFISGSASEKEVIATEDVASLSSPTLPSSSLSHDRAVSSKATFSSMSGLDSVSDSGEGRGSPLREVSRSLDQFSDMRVSINQTPGNKPVFGFTIKWDISGIFVASVEQGSPAEFSQLQVDDEILAINNTKFSYKDTKKWEEVMANAQETGNLVMDVRRYGKSGSSETKWIDTTSGIYNSDKSSSLSVTTDFSESLQSPYTESKEVNGIHEESNPFDSKASESISLKNLKRRSQFFEQGSSDSVAPDLPVPTLSAPSRWAWDQEEERRRQERWQKEQDRLLQEKYQREQEKLREEWQRAQQEAERENSKYLDEELMVLNSNSISLTSREPVAATWEATWSEGSKSLDSEGTRAGEEDRGQLEDDAVYEDQSQKLQELEQEKKRKEQEAQEEERRKQREAQAWAEAEAKAWAEAQARAEAEAKARAEAQARAEAEAQKRAEAQKLQAERERETSVKIYQYRRPIDSYDLPKREDDTSGMLPTDRSKSRSTTELNDPLIEKNGSSKYSERIGATSFSHRSSKKDQAPSEAELERQQILQEMRKRTSLHNDNSWIRQRSASVNKEPICLPGIMRRGESLDNLDSQRPGSWRQSPWHSQPAGVYASSSVQDFSRPPPQLLSTSNRAYMRNPSSAVPPPAGSVKTSPGSPSPRSHSPSMSQSGSQLRNRSVSGKRVCSYCNNILGKGAAMIIETLGLSYHLHCFKCVSCGCDLGGSSSGAEVRIRNHQLYCNDCYLRFKSGRPTAM

SEQ ID NO: 691 - DNA, 4017 bp, Mus musculus
caggctgtaactgagaagaattttgaaacaacggattttcgagcctctctagaaaatggtgttctgttgtgcgacttgattaataagctcaaacctggcgtcgttaagaagatcaatagactgtctaccccaatagcaggtttggataacataaatgtttttttgagagcttgtgaacagattggattgaaagaagcccagctttttcatccgggggatctacaggacttatcaaaccgagtcaccgtcaagcaagaagagactgacaggagactgaaaaatgttttgataactttgtactggctgggaagaaaagcacaaagtaacccctactataatggtccctatctcaatttgaaagcttttgagactcttttagggcaagctttgactaaggcacttgaagattccagctgcctgaaaagaagtggccgggacagtggctacggggacatctggtgtcctgacagaggagaatttcctgcccctccaggtagccacagaagggaagattcctttgagagcttggactcgctggggtccagatctctgaccagctgttcctcagacttcactctgagagttgggaaggaaggttgcgaaagtgacatcgattgggaatttacattcaaaatgcaggattacaacaaagatgatatgtcctaccgaaggatttcagccattgagccaaagtcagctctcccgttcaatcgtttcttgccgaacaaaagcaagcagccgtcctatgtgccagcacctttgaggaagaagaggccagacaaacacgaggataacaggaggagctgggcaagcccggtctacacagaaacagacggaacattttcaagactctttcaaaagatctatggtgagaatgggagcaagtccatgagcgatgtcagcgcagaggatgttcagaacctgcgtcaggtgcgctacgaggagatgcagaaaataaaatcccagctgaaagaacaagatcagaaatggcaggatgaccttgcaaaatggaaaaaccgccggaagagttacacttcagatctgcagaagaaaaaggaagagagggaagagattgagaagcaggcactggagaagtctgaccgcagctccaagacatttagggaaatgctgcaggacagggaatctcgaggttctacagttacgtcttggaggaggacctattcctctgatgacatcctcgatgatggagtgctccctcctacagtgactctgtcagaaactagttaccagagcgagagactagaagatgaggcaagagcgcatcctgctgagatgcccaaagaagattccacaacatttgcaaatagagaggacagtgtagtagctgagactcagcttgcttctcacagtcctgaagagcaacgtctggccccttctccttctgaggaaccgcgccaggcctctggatcttctgcagaaccgcaccaggccccgttgctgtccacagaaccacgccggacccctttgccttccgaggaaccacaccaggcctctctatcttctacactacagcgtccatcctcactctcttctcagcagtcatggagtacaagagcagagtccactcggatttcagcttctctccctagaagttaccagagaaccgatacagccaggttaacatctgtggtcacagcgagaccttttggcacatcttcaaggggaatctcctcactgcccagatcctacacgatggatgatggctggaaatacaacggagatgttgaagttgtcaagagagagcaactcgatttgggcagagccactggcccgaagcctgactccagccactttatttcgggctcagccagtgagaaggaggtcatagccacagaagatgtggcaagcttgtcctctcccacactcccttcctcatctctctcccacgaccgggcagtctcttccaaagccacgttctcatcaatgtctggtttggattcagtgtctgactctggagaaggaagaggctcaccattgagggaagtttccaggtccctggatcagttcagcgatatgagagtcagcataaaccagacgcccgggaacaaacctgtctttgggtttacgataaaatgggatatttctgggatcttcgtagcatcagtcgaacaaggtagcccagcagaattttctcagctgcaggtagatgatgaaattcttgccatcaataacaccaagttttcatataaggatacaaaaaagtgggaggaagttatggcaaacgcccaagaaactggaaacttagtgatggacgtccggcgttacggaaagtctggttcatctgaaacaaagtggatcgatacaacatcaggaatttacaactcagacaagtcttcaagtttatcagtcacaactgatttctctgaaagccttcagagtccttatactgaatccaaagaagtcaatggaattcacgaggaaagtaacccctttgattcaaaagcatcagaatccatttctttgaaaaatttaaaaaggcgatcacaattttttgaacaaggaagctcggattctgtggcccccgatcttccagttccaaccctcagtgccccgagtcgctgggcttgggatcaagaggaggagagacggaggcaggagcggtggcagaaagagcaagatcgcctattgcaggaaaaataccagcgtgagcaggagaagctgagggaggagtggcagagagcccaacaggaggcggagagagagaattccaagtacctggatgaggagctgatggtcctaaattccaacagcatttctctgacctcccgggagcctgtggccgccacctgggaagccacgtggagtgaagggtccaagtctctggacagcgaaggcacccgagcgggagaggaggacaggggacagctggaagacgatgctgtgtatgaggaccaaagtcagaagctgcaggaacttgagcaggagaagaaacggaaggagcaagaggctcaggaagaggagcgccgcaagcagcgggaggcccaggcctgggcagaggcagaagctaaggcttgggcggaggcccaggctcgggcagaggcagaagctaaggctcgggcggaggcccaggcccgggcagaggctgaggctcaaaaacgagctgaagctcagaagctccaggcagagagggaacgtgaaacgtccgtcaaaatataccagtaccgaaggcccattgattcctacgacctaccaaagagagaagacgacacttcagggatgcttccaactgacaggagtaaatcaagatctactacggaactaaatgaccccctcatagagaaaaatggaagcagcaaatattcagagagaattggggccactagcttttcacataggagttctaagaaggatcaagccccctcagaagcagagttggagagacagcaaatccttcaggaaatgaggaagagaacatctctccacaatgacaacagctggatccgacagcgcagcgccagtgtgaacaaggagcccatctgcctgcctgggatcatgaggagaggggagtctctggacaatctggattcccagcggccgggttcttggaggcagtccccttggcacagccagcctgccggggtctatgcgtcttcctctgtccaggacttcagtcgccccccacctcagctgttgtctacatcaaaccgtgcctacatgcggaacccatcctctgcggtgccacctccagccggctctgtgaagacctccccagggtctccctctccacgcagccattccccttccatgtcacagtcaggctctcagctacggaataggtcagtgagtgggaagcgtgtgtgctcctactgtaataacattctgggcaaaggagccgccatgatcatcgagaccctgggtctttcttatcatttacattgttttaagtgtgtctcctgtgggtgtgacctcggaggctcttcctcaggagctgaagtcagaatccgaaaccaccaactctactgcaatgactgctatctccgattcaaatgtaagaga

SEQ ID NO: 692 - protein, 1339 aa, Mus musculus
QAVTEKNFETTDFRASLENGVLLCDLINKLKPGVVKKINRLSTPIAGLDNINVFLRACEQIGLKEAQLFHPGDLQDLSNRVTVKQEETDRRLKNVLITLYWLGRKAQSNPYYNGPYLNLKAFETLLGQALTKALEDSSCLKRSGRDSGYGDIWCPDRGEFPAPPGSHRREDSFESLDSLGSRSLTSCSSDFTLRVGKEGCESDIDWEFTFKMQDYNKDDMSYRRISAIEPKSALPFNRFLPNKSKQPSYVPAPLRKKRPDKHEDNRRSWASPVYTETDGTFSRLFQKIYGENGSKSMSDVSAEDVQNLRQVRYEEMQKIKSQLKEQDQKWQDDLAKWKNRRKSYTSDLQKKKEEREEIEKQALEKSDRSSKTFREMLQDRESRGSTVTSWRRTYSSDDILDDGVLPPTVTLSETSYQSERLEDEARAHPAEMPKEDSTTFANREDSVVAETQLASHSPEEQRLAPSPSEEPRQASGSSAEPHQAPLLSTEPRRTPLPSEEPHQASLSSTLQRPSSLSSQQSWSTRAESTRISASLPRSYQRTDTARLTSVVTARPFGTSSRGISSLPRSYTMDDGWKYNGDVEVVKREQLDLGRATGPKPDSSHFISGSASEKEVIATEDVASLSSPTLPSSSLSHDRAVSSKATFSSMSGLDSVSDSGEGRGSPLREVSRSLDQFSDMRVSINQTPGNKPVFGFTIKWDISGIFVASVEQGSPAEFSQLQVDDEILAINNTKFSYKDTKKWEEVMANAQETGNLVMDVRRYGKSGSSETKWIDTTSGIYNSDKSSSLSVTTDFSESLQSPYTESKEVNGIHEESNPFDSKASESISLKNLKRRSQFFEQGSSDSVAPDLPVPTLSAPSRWAWDQEEERRRQERWQKEQDRLLQEKYQREQEKLREEWQRAQQEAERENSKYLDEELMVLNSNSISLTSREPVAATWEATWSEGSKSLDSEGTRAGEEDRGQLEDDAVYEDQSQKLQELEQEKKRKEQEAQEEERRKQREAQAWAEAEAKAWAEAQARAEAEAKARAEAQARAEAEAQKRAEAQKLQAERERETSVKIYQYRRPIDSYDLPKREDDTSGMLPTDRSKSRSTTELNDPLIEKNGSSKYSERIGATSFSHRSSKKDQAPSEAELERQQILQEMRKRTSLHNDNSWIRQRSASVNKEPICLPGIMRRGESLDNLDSQRPGSWRQSPWHSQPAGVYASSSVQDFSRPPPQLLSTSNRAYMRNPSSAVPPPAGSVKTSPGSPSPRSHSPSMSQSGSQLRNRSVSGKRVCSYCNNILGKGAAMIIETLGLSYHLHCFKCVSCGCDLGGSSSGAEVRIRNHQLYCNDCYLRFKCKR

SEQ ID NO: 693 - DNA, 1053 bp, Mus musculus
gggaagagggcgtttgtttgcagagcagagctgacatcaaagtgtagattgctgctcactggctaggcgcttgtcctataacaggataacataaatgtttttttgagagcttgtgaacagattggattgaaagaagcccagctttttcatccgggggatctacaggacttatcaaaccgagtcaccgtcaagcaagaagagactgacaggagactgaaaaatgttttgataactttgtactggctgggaagaaaagcacaaagtaacccctactataatggtccctatctcaatttgaaagcttttgagactcttttagggcaagctttgactaaggcacttgaagattccagctgcctgaaaagaagtggccgggacagtggctacggggacatctggtgtcctgacagaggagaatttcctgcccctccaggtagccacagaagggaagattcctttgagagcttggactcgctggggtccagatctctgaccagctgttcctcagacttcactctgagagttgggaaggaaggttgcgaaagtgacatcgattgggaatttacattcaaaatgcaggattacaacaaagatgatatgtcctaccgaaggatttcagccattgagccaaagtcagctctcccgttcaatcgtttcttgccgaacaaaagcaagcagccgtcctatgtgccagcacctttgaggaagaagaggccagacaaacacgaggataacaggaggagctgggcaagcccggtctacacagaaacagacggaacattttcaaggagcaagtccatgagcgatgtcagcgcagaggatgttcagaacctgcgtcaggtgcgctacgaggagatgcagaaaataaaatcccagctgaaagaacaagatcagaaatggcaggatgaccttgcaaaatggaaaaaccgccggaagagttacacttcagatctgcagaagaaaaaggaagagagggaagagattgagaagcaggcactggagaagtctgaccgcagctccaagacatttagggaaatgctgcaggacaggtaa

SEQ ID NO: 694 - protein, 223 aa, Mus musculus
GYGDIWCPDRGEFPAPPGSHRREDSFESLDSLGSRSLTSCSSDFTLRVGKEGCESDIDWEFTFKMQDYNKDDMSYRRISAIEPKSALPFNRFLPNKSKQPSYVPAPLRKKRPDKHEDNRRSWASPVYTETDGTFSRSKSMSDVSAEDVQNLRQVRYEEMQKIKSQLKEQDQKWQDDLAKWKNRRKSYTSDLQKKKEEREEIEKQALEKSDRSSKTFREMLQDR

SEQ ID NO: 695 - DNA, 4904 bp, Mus musculus
ctttgtctgagagcaagctcggctaagcaatcactttccaattcttttcacaggataacataaatgtttttttgagagcttgtgaacagattggattgaaagaagcccagctttttcatccgggggatctacaggacttatcaaaccgagtcaccgtcaagcaagaagagactgacaggagactgaaaaatgttttgataactttgtactggctgggaagaaaagcacaaagtaacccctactataatggtccctatctcaatttgaaagcttttgagactcttttagggcaagctttgactaaggcacttgaagattccagctgcctgaaaagaagtggccgggacagtggctacggggacatctggtgtcctgacagaggagaatttcctgcccctccaggtagccacagaagggaagattcctttgagagcttggactcgctggggtccagatctctgaccagctgttcctcagacttcactctgagagttgggaaggaaggttgcgaaagtgacatcgattgggaatttacattcaaaatgcaggattacaacaaagatgatatgtcctaccgaaggatttcagccattgagccaaagtcagctctcccgttcaatcgtttcttgccgaacaaaagcaagcagccgtcctatgtgccagcacctttgaggaagaagaggccagacaaacacgaggataacaggaggagctgggcaagcccggtctacacagaaacagacggaacattttcaagtacccagaggagaacctggggtcccaagatggagacctggcacacagtccaagaaacttccacctcttcttggtgtgtagaagaggaagaggaaaagctcacgcgcatgcccaacattgtgaaggatgatctgtatgtgcggaagcttagccccgtcatgccaagtccagggagctcttttgatcagttccttcccaaatgttggactccagaagatatgaactggaaaaaaattaaaagagagacttataagccatggtataaggaatttcagggattcagtcagtttttattgcttcaggccctccaaacctactctgatgacatcttgtcctcggaaacaagtgtcaaactcgatcctacctctggccccaggctcataactcgcaggaagaatcgctctcccgcaccaggctatcgagcccatgaccttgagctgccagccctagatcccgacttagaaaatgatgatttctttgtcagaaaaacaggggctttccatgcaaatccgtgtgtccttcgagcctttgaagactttagaagtttctcggagccagacgatgccgtggaacgagatataattttgcagtgtcgggaaggtgaactcgtacttccagatttagaaaaggatgatatgattgtccgcaggattccagctcagaagaaagaagtgcccctttctggggccccggataggtaccagccagtccctttccctgaaccctggaccctacctccagaaatccaagcgaagtttctctctgtgctcgaaaggacacgcccacccaaagaacaaagcagcggctgtagagtgttagtcccttcctatcgacagaagaaagacgacatgttggctcgcaagatccagtcttggaagctggggactgctgtacctcccatcagtttcaagcctggcccctgcagcgaggccgacctgcagaagtgggaggccatctgggaggccagcaggcttaggcacaggaagcggctgatggttgagagactctttcaaaagatctatggtgagaatgggagcaagtccatgagcgatgtcagcgcagaggatgttcagaacctgcgtcaggtgcgctacgaggagatgcagaaaataaaatcccagctgaaagaacaagatcagaaatggcaggatgaccttgcaaaatggaaaaaccgccggaagagttacacttcagatctgcagaagaaaaaggaagagagggaagagattgagaagcaggcactggagaagtctgaccgcagctccaagacatttagggaaatgctgcaggacagggaatctcgaggttctacagttacgtcttggaggaggacctattcctctgatgacatcctcgatgatggagtgctccctcctacagtgactctgtcagaaactagttaccagagcgagagactagaagatgaggcaagagcgcatcctgctgagatgcccaaagaagattccacaacatttgcaaatagagaggacagtgtagtagctgagactcagcttgcttctcacagtcctgaagagcaacgtctggccccttctccttctgaggaaccgcgccaggcctctggatcttctgcagaaccgcaccaggccccgttgctgtccacagaaccacgccggacccctttgccttccgaggaaccacaccaggcctctctatcttctacactacagcgtccatcctcactctcttctcagcagtcatggagtacaagagcagagtccactcggatttcagcttctctccctagaagttaccagagaaccgatacagccaggttaacatctgtggtcacagcgagaccttttggcacatcttcaaggggaatctcctcactgcccagatcctacacgatggatgatggctggaaatacaacggagatgttgaagttgtcaagagagagcaactcgatttgggcagagccactggcccgaagcctgactccagccactttatttcgggctcagccagtgagaaggaggtcatagccacagaagatgtggcaagcttgtcctctcccacactcccttcctcatctctctcccacgaccgggcagtctcttccaaagccacgttctcatcaatgtctggtttggattcagtgtctgactctggagaaggaagaggctcaccattgagggaagtttccaggtccctggatcagttcagcgatatgagagtcagcataaaccagacgcccgggaacaaacctgtctttgggtttacgataaaatgggatatttctgggatcttcgtagcatcagtcgaacaaggtagcccagcagaattttctcagctgcaggtagatgatgaaattcttgccatcaataacaccaagttttcatataaggatacaaaaaagtgggaggaagttatggcaaacgcccaagaaactggaaacttagtgatggacgtccggcgttacggaaagtctggttcatctgaaacaaagtggatcgatacaacatcaggaatttacaactcagacaagtcttcaagtttatcagtcacaactgatttctctgaaagccttcagagtccttatactgaatccaaagaagtcaatggaattcacgaggaaagtaacccctttgattcaaaagcatcagaatccatttctttgaaaaatttaaaaaggcgatcacaattttttgaacaaggaagctcggattctgtggcccccgatcttccagttccaaccctcagtgccccgagtcgctgggcttgggatcaagaggaggagagacggaggcaggagcggtggcagaaagagcaagatcgcctattgcaggaaaaataccagcgtgagcaggagaagctgagggaggagtggcagagagcccaacaggaggcggagagagagaattccaagtacctggatgaggagctgatggtcctaaattccaacagcatttctctgacctcccgggagcctgtggccgccacctgggaagccacgtggagtgaagggtccaagtctctggacagcgaaggcacccgagcgggagaggaggacaggggacagctggaagacgatgctgtgtatgaggaccaaagtcagaagctgcaggaacttgagcaggagaagaaacggaaggagcaagaggctcaggaagaggagcgccgcaagcagcgggaggcccaggcctgggcagaggcagaagctaaggcttgggcggaggcccaggctcgggcagaggcagaagctaaggctcgggcggaggcccaggcccgggcagaggctgaggctcaaaaacgagctgaagctcagaagctccaggcagagagggaacgtgaaacgtccgtcaaaatataccagtaccgaaggcccattgattcctacgacctaccaaagagagaagacgacacttcagggatgcttccaactgacaggagtaaatcaagatctactacggaactaaatgaccccctcatagagaaaaatggaagcagcaaatattcagagagaattggggccactagcttttcacataggagttctaagaaggatcaagccccctcagaagcagagttggagagacagcaaatccttcaggaaatgaggaagagaacatctctccacaatgacaacagctggatccgacagcgcagcgccagtgtgaacaaggagcccatctgcctgcctgggatcatgaggagaggggagtctctggacaatctggattcccagcggccgggttcttggaggcagtccccttggcacagccagcctgccggggtctatgcgtcttcctctgtccaggacttcagtcgccccccacctcagctgttgtctacatcaaaccgtgcctacatgcggaacccatcctctgcggtgccacctccagccggctctgtgaagacctccccagggtctccctctccacgcagccattccccttccatgtcacagtcaggctctcagctacggaatagtgtgtctcctgtgggtgtgacctcggaggctcttcctcaggagctgaagtcagaatccgaaaccaccaactctactgcaatgactgctatctccgattcaaatctggacggccaaccgccatgtgatgtaaacccccattcgaaagcgctgttgcagatagaagaggaggcgcttgtcactgatgcagagctataa

SEQ ID NO: 696 - protein, 1625 aa, Mus musculus
AITFQFFSQDNINVFLRACEQIGLKEAQLFHPGDLQDLSNRVTVKQEETDRRLKNVLITLYWLGRKAQSNPYYNGPYLNLKAFETLLGQALTKALEDSSCLKRSGRDSGYGDIWCPDRGEFPAPPGSHRREDSFESLDSLGSRSLTSCSSDFTLRVGKEGCESDIDWEFTFKMQDYNKDDMSYRRISAIEPKSALPFNRFLPNKSKQPSYVPAPLRKKRPDKHEDNRRSWASPVYTETDGTFSSTQRRTWGPKMETWHTVQETSTSSWCVEEEEEKLTRMPNIVKDDLYVRKLSPVMPSPGSSFDQFLPKCWTPEDMNWKKIKRETYKPWYKEFQGFSQFLLLQALQTYSDDILSSETSVKLDPTSGPRLITRRKNRSPAPGYRAHDLELPALDPDLENDDFFVRKTGAFHANPCVLRAFEDFRSFSEPDDAVERDIILQCREGELVLPDLEKDDMIVRRIPAQKKEVPLSGAPDRYQPVPFPEPWTLPPEIQAKFLSVLERTRPPKEQSSGCRVLVPSYRQKKDDMLARKIQSWKLGTAVPPISFKPGPCSEADLQKWEAIWEASRLRHRKRLMVERLFQKIYGENGSKSMSDVSAEDVQNLRQVRYEEMQKIKSQLKEQDQKWQDDLAKWKNRRKSYTSDLQKKKEEREEIEKQALEKSDRSSKTFREMLQDRESRGSTVTSWRRTYSSDDILDDGVLPPTVTLSETSYQSERLEDEARAHPAEMPKEDSTTFANREDSVVAETQLASHSPEEQRLAPSPSEEPRQASGSSAEPHQAPLLSTEPRRTPLPSEEPHQASLSSTLQRPSSLSSQQSWSTRAESTRISASLPRSYQRTDTARLTSVVTARPFGTSSRGISSLPRSYTMDDGWKYNGDVEVVKREQLDLGRATGPKPDSSHFISGSASEKEVIATEDVASLSSPTLPSSSLSHDRAVSSKATFSSMSGLDSVSDSGEGRGSPLREVSRSLDQFSDMRVSINQTPGNKPVFGFTIKWDISGIFVASVEQGSPAEFSQLQVDDEILAINNTKFSYKDTKKWEEVMANAQETGNLVMDVRRYGKSGSSETKWIDTTSGIYNSDKSSSLSVTTDFSESLQSPYTESKEVNGIHEESNPFDSKASESISLKNLKRRSQFFEQGSSDSVAPDLPVPTLSAPSRWAWDQEEERRRQERWQKEQDRLLQEKYQREQEKLREEWQRAQQEAERENSKYLDEELMVLNSNSISLTSREPVAATWEATWSEGSKSLDSEGTRAGEEDRGQLEDDAVYEDQSQKLQELEQEKKRKEQEAQEEERRKQREAQAWAEAEAKAWAEAQARAEAEAKARAEAQARAEAEAQKRAEAQKLQAERERETSVKIYQYRRPIDSYDLPKREDDTSGMLPTDRSKSRSTTELNDPLIEKNGSSKYSERIGATSFSHRSSKKDQAPSEAELERQQILQEMRKRTSLHNDNSWIRQRSASVNKEPICLPGIMRRGESLDNLDSQRPGSWRQSPWHSQPAGVYASSSVQDFSRPPPQLLSTSNRAYMRNPSSAVPPPAGSVKTSPGSPSPRSHSPSMSQSGSQLRNSVSPVGVTSEALPQELKSESETTNSTAMTAISDSNLDGQPPCDVNPHSKALLQIEEEALVTDAEL

SEQ ID NO: 697 - DNA, 897 bp, Mus musculus
ccaaccctcagtgccccgagtcgctgggcttgggatcaagaggaggagagacggaggcaggagcggtggcagaaagagcaagatcgcctattgcaggaaaaataccagcgtgagcaggagaagctgagggaggagtggcagagagcccaacaggaggcggagagagagaattccaagtacctggatgaggagctgatggtcctaaattccaacagcatttctctgacctcccgggagcctgtggccgccacctgggaagccacgtggagtgaagggtccaagtctctggacagcgaaggcacccgagcgggagaggaggacaggggacagctggaagacgatgctgtgtatgaggaccaaagtcagaagctgcaggaacttgagcaggagaagaaacggaaggagcaagaggctcaggaagaggagcgccgcaagcagcgggaggcccaggcctgggcagaggcagaagctaaggcttgggcggaggcccaggctcgggcagaggcagaagctaaggctcgggcggaggcccaggcccgggcagaggctgaggctcaaaaacgagctgaagctcagaagctccaggcagagagggaacgtgaaacgtccgtcaaaatataccagtaccgaaggtctgtgcccatagctcaaagagttgtcctcaatcaaggagtttcagcaactgtggctttgtcagtgagtgggaagcgtgtgtgctcctactgtaataacattctgggcaaaggagccgccatgatcatcgagaccctgggtctttcttatcatttacattgttttaagtgtgtctcctgtgggtgtgacctcggaggctcttcctcaggagctgaagtcagaatccgaaaccaccaactctactgcaatgactgctatctccga

SEQ ID NO: 698 - protein, 299 aa, Mus musculus
PTLSAPSRWAWDQEEERRRQERWQKEQDRLLQEKYQREQEKLREEWQRAQQEAERENSKYLDEELMVLNSNSISLTSREPVAATWEATWSEGSKSLDSEGTRAGEEDRGQLEDDAVYEDQSQKLQELEQEKKRKEQEAQEEERRKQREAQAWAEAEAKAWAEAQARAEAEAKARAEAQARAEAEAQKRAEAQKLQAERERETSVKIYQYRRSVPIAQRVVLNQGVSATVALSVSGKRVCSYCNNILGKGAAMIIETLGLSYHLHCFKCVSCGCDLGGSSSGAEVRIRNHQLYCNDCYLR

SEQ ID NO: 699 - DNA, 6437 bp, Mus musculus
atgctgcgagtcttcatcctttttgcggagaatgtccacaccccggactccgacatcagcgatgcctactgctccgcggtgtttgcaggaaccatcttacatgctacatggcactcatggtaccgtgggtacagagaaaccttaaaggactccgaaagaactaggcggtggaggaggcacattaggctggttctcacccttggacttctttgtcttcccaggttcctgggggaagccaagatcccactccaggaggtccttgccacccccagcctctctgccagcttcaacgcacctctgctagacgccaagcagcaacccacgggggcctctctggtcctgcaggtgtcctacacgccacccccaggagctgtgcccctgttcccaccacctgcttctctagcaccctccccgacactgcctgacatggatctggtgcctgacacaggaggggaggaagacaccgaggaccagggcctgactggagatgaagctgagccgttcctggaccagagtgctgctgtgggcccagggggaccgaccacacccaggaagccaccttcccaccctcctccccactatccaggggcaaaaagaaaaagaagctctgccccacctagaaagctgctgtcagacaagccacaggacttccaggtgatagtgggggaactagtccaggtgatagaggggcgtcagctgcctggggtgaatattaagcctgtggtcaaggtcacagctgctgggcagaccaagcgaactcggatccagaagggaaatagcccactcttcaatgagactcttttcttcaacgtatttgactctcccttggagctgtttgatgagcccatcttcatcacggtggtggactcacgctcccttaggacagatgccctccttggcgagttccggatggatgtgggcaccgtgtacagagagccccgacacgcttatctccggaagtggctgctgctctccgaccctgatgacttctctgcgggggccagaggctacctcaaagccagcctgtgtgtgctagggcctggagatgaagctcccctggacaagaaggacccttatgaagacaaagaggacattgaaggcaacctgcttaggcccaccggtgtggcccttcgaggagcccacttatgcatgaagctgttccgggctgaggacttaccacagatggacgatgctgtgatggacaacgtcaagcagatctttggctttgacagcaacaagaagaacttggtggatccctttgtggaagtcagctttgctgggaaaatgctctgcagcaagatcctggagaagacagctaaccctcagtggaaccagaacatcaccttgcctgcgatgtttccctctatgtgtgaaaaaatgaggattcgtgtcatggactgggaccgcctcactcacaatgacactgtggccaccacctacttgggtatgtcgaaaatctctgctactggaggagaaatagaagaggagcctgcaggtgtactcaagagtccacaagccactgacctggacgacaacctgggcttcctccccacttttgggccctgctatgtgaacctctatggcagtccccgagagttcacgggcttcccagatccttatgcagagctcaacacaggaaagggagaaggtgtggcttatcgaggcagggttctgttgtccctggagaccaaactggtggaacacagtgagcagaaggtggaagaccttcctgctgatgatatcctgcgtgtggagaagtacctgcggaggcgcaaatattccctctttgctgccttctactcagccacaatgctgcaggatgtggatgacgccatccagttcgaggtcagcattgggaactacgggaacaagttcgacaccacctgcctgcccttggcctccaccacccagtacagccgggcggtctttgatggtgggtccctccctctccctgtaggatgccactactattacttgccttggggcaacgtgaagcccgtggtggtgctgtcctcatactgggaagacatcagccatcgaattgagatccaaaaccagctcctcagggtcgctgaccgcctggaagctaacctggagcaggtccacttggctctgaaggcacagtgttcctccgaggatgtggacgccctggtggctcagttgacagatgagctccttgcagactgcaggaagggactccagatccatccctccaagcaccacttgaggctgaaaccatgcttcctgaggcttgggcataagcaggtccagatcaaagaagctgctctggccttgaagcttggccatagtgagctctccactgccctggagcaggccgaggactggcttctgcatctccgtgccctggccgaggagccccagaacagcctgccggacatcatcatctggatgctgcagggtgacaagcgtgtggcctaccagcgggtgcctgcccatgaagtcctcttctcccggcggggccccagctactgcggcaggaactgtgggaagctgcagaccatctttctgaaatatcctatggaaggtatgcctggggcccgaatgcccgtgcagattcggatcaagctctggttcgggctctctgtggatgagaaggaattcaatcagtttgctgagggaaagctctctgtctttgccgaaacgtatgagaaccagacaaagctggcactggtcgggaactggggcacaacgggcctcacctaccccaagttttctgatgtcacaggcaagatcaaactaccaaaggatagcttccgcccctcagctggctgggcctgggcaggagattggttcgtgtgtccagagaagaccctactccatgatgctgacgctggtcatctgagcttcgtggaggaggtgttcgagaaccagacccggctccctgggggccagtggatttacatgagtgataactacacagatgtgaatggggagaaggtacttccgaaggatgatattgaatgcccgctgggctggaagtgggaagatgaagaatggtccacagacctcaatcgggctgttgatgaacaaggctgggagtacagcatcaccatacccccagaccgaaagccaaaacactgggtccctgttgagaagatgtattacactcacaggcgtcgacgctgggtccgactgcgcaggagggacctcagccagatggaagcactgaagaggcacaggcaggcagaggccgagggcgagggctgggagtatgcctctctcttcggctggaagttccacctggagtaccgcaagacagatgccttccgccgccgccgctggcgccgccgcatggagccgctggagaagacgggacctgcagctgtgtttgccctcgagggggccctgggcggcatggtggatgacaagagcgaagactccatgtctgtttctaccctgagctttggcgttaacagacccacaatctcctgcatctttgactatgggaaccgctaccatctgcgctgctacctgtaccaggcccgagacctgccagccatggacaaggactccttctctgatccctacgccatcgtctccttcctgcatcaaagccagaagacagtggtggagaagaacaccctgaatcccacctgggatcaaaccctcatcttctatgagattgagatcttcggcgagccagccagtatcgccgagcatccgccctgcatcgtggtggagctctatgaccacgacacctatggtgctgacgagttcatgggtcgctgtatttgtcagccaagcctggaacggatgccccgcctggcctggttcccactgacccggggcagccagcctgccggcgagctgctggcagcgttcgagcttatccagagagagaagccagccatccatcacatccctggctttgagacggaggacacagatttgccttacccaccacctcaaagggaggccaacatctacatggttccccagaacattaagccagctctccaacgtactgccattgagatcctggcctggggcctgcggaacatgaagagctatcagatggccagcatctcttcccccagcctcgtggtggagtgtggtgggcagacagtgcagtcctgtgtcatcagaaaccttcggaagaaccccaactttgatgtctgtactctcttcatggaagtgatgttacccagagaggacctctactgtccacctattgtggtcaaggtcattgataatcgccagtttggccgccggccagttgtgggtcagtgtaccattcgctccctggagaacttcctgtgcgacccatactcagcagagagtccatccccacagggtggcccagatgatgtgagcttactcagccccggggaagatgtgctgattgacatcgatgacaaggagcctctcattcctgtccaggaggaggagttcattgactggtggagcaaattctttgcttctgtcggggagagggaaaagtgtggttcctacctggagaaggattttgacaccttgaaggtctatgacacacagctggagaatgtggaggcttttggaggcctgtccgacttttgtaacaccttcaagctctaccggggcaggactcaggaggagacagatgatccatctgtcatcggagaatttaagggtctcttcaaaatttatcccctcccagaagatccagccatccccatgcccccgagacaattccatcagctggctgctcagggtccccaggaatgcttggtccgtatttatatcgtccgagcatttggcttacagcccaaggaccccaatggcaagtgtgacccttacatcaagatctccatagggaagaaatcagtgagtgaccaggataactacatcccttgcaccctggagcctgtattcggaaagatgtttgaactcacctgcactctacctctggagaaggacctgaagatcacactctacgattatgacctgctctccaaggatgagaagattggggagacggtcatagacctggagaacaggctgctgtccaagtttggggctcgctgtgggctcccacagacctactgtgtctctggaccaaatcagtggagagatcagctccgcccctcccagctcctccacctcttctgccagcagcacaggatcaaggcccccgtgtaccggacagaccgagtgacgtttcaggataaggactacaccattgaggagatagaggctggcagactcccaaacccacacctgggcccagtggaggaacgcttagccctgcatgtccttcagcaacaaggcttggttcctgagcatgtggagtcacggcctctttatagtcctctgcagccagatatcgagcaggggaagctacagatgtggattgacatatttccaaaggtgctgggccggcctggacctcccttcaacatcaccccacggaaagctagaaggttttttctgcgttgtattatttggaacacaaaagatgtgatcttggatgacctcagtctcacgggggagaagatgagtgacatctatgtgaaaggctggatggtgggattcgaagaacacaagcagaagacagatgtgcactaccgctccctgggtggggagggcaatttcaactggaggttcgtgtttcccttcgactatctgcctgctgagcaagtctgtgctgttgccaagaaggatgccttctggagactcgacaagacagagagcaagatcccagcacgtgtggtcttccagatctgggacaatgacaaattctcttttgatgactttctgggctctctgcagctggatctcaaccgaatgcccaagccagccaagacggctgagaagtgctccttggaccagctggatgacaccttccacccagaatggtttgtgtccctttttgagcagaagacagtgaaaggatggtggccttgtgtgacagaggagggcgagaagaagatgttggcgggcaagctggaaatgaccttggagattgttgcagaaagtgaacatgaagagcggcctgctggccaaggtcgggatgaacccaacatgaatccgaagctagaggatccaaggcgccccgatacttctttcctgtggttcacctccccgtacaagaccatgaagttcatcttgtggcgacgcttccggtgtgccatcatcctcttcatcatcctcttcatcctcctgctcttcctgggtgtctttgtctacgccttcccgaactacgctgccatgaagctggtgaagccctttcgatgaagaagacatctgctctggagaagggggtgcaggctgcctcctggcccaggactagctgctcctccattgctctggggcctggtggtcttgcgcatgtccatggagttcttgggaatcacgttattttcatcttctctttctcccctaacccaacactcctctggataaactcttggctttctcagtataaagcagacagaacc

SEQ ID NO: 700 - protein, 2076 aa, Mus musculus
MLRVFILFAENVHTPDSDISDAYCSAVFAGTILHATWHSWYRGYRETLKDSERTRRWRRHIRLVLTLGLLCLPRFLGEAKIPLQEVLATPSLSASFNAPLLDAKQQPTGASLVLQVSYTPPPGAVPLFPPPASLAPSPTLPDMDLVPDTGGEEDTEDQGLTGDEAEPFLDQSAAVGPGGPTTPRKPPSHPPPHYPGAKRKRSSAPPRKLLSDKPQDFQVIVGELVQVIEGRQLPGVNIKPVVKVTAAGQTKRTRIQKGNSPLFNETLFFNVFDSPLELFDEPIFITVVDSRSLRTDALLGEFRMDVGTVYREPRHAYLRKWLLLSDPDDFSAGARGYLKASLCVLGPGDEAPLDKKDPYEDKEDIEGNLLRPTGVALRGAHLCMKLFRAEDLPQMDDAVMDNVKQIFGFDSNKKNLVDPFVEVSFAGKMLCSKILEKTANPQWNQNITLPAMFPSMCEKMRIRVMDWDRLTHNDTVATTYLGMSKISATGGEIEEEPAGVLKSPQATDLDDNLGFLPTFGPCYVNLYGSPREFTGFPDPYAELNTGKGEGVAYRGRVLLSLETKLVEHSEQKVEDLPADDILRVEKYLRRRKYSLFAAFYSATMLQDVDDAIQFEVSIGNYGNKFDTTCLPLASTTQYSRAVFDGGSLPLPVGCHYYYLPWGNVKPVVVLSSYWEDISHRIEIQNQLLRVADRLEANLEQVHLALKAQCSSEDVDALVAQLTDELLADCRKGLQIHPSKHHLRLKPCFLRLGHKQVQIKEAALALKLGHSELSTALEQAEDWLLHLRALAEEPQNSLPDIIIWMLQGDKRVAYQRVPAHEVLFSRRGPSYCGRNCGKLQTIFLKYPMEGMPGARMPVQIRIKLWFGLSVDEKEFNQFAEGKLSVFAETYENQTKLALVGNWGTTGLTYPKFSDVTGKIKLPKDSFRPSAGWAWAGDWFVCPEKTLLHDADAGHLSFVEEVFENQTRLPGGQWIYMSDNYTDVNGEKVLPKDDIECPLGWKWEDEEWSTDLNRAVDEQGWEYSITIPPDRKPKHWVPVEKMYYTHRRRRWVRLRRRDLSQMEALKRHRQAEAEGEGWEYASLFGWKFHLEYRKTDAFRRRRWRRRMEPLEKTGPAAVFALEGALGGMVDDKSEDSMSVSTLSFGVNRPTISCIFDYGNRYHLRCYLYQARDLPAMDKDSFSDPYAIVSFLHQSQKTVVEKNTLNPTWDQTLIFYEIEIFGEPASIAEHPPCIVVELYDHDTYGADEFMGRCICQPSLERMPRLAWFPLTRGSQPAGELLAAFELIQREKPAIHHIPGFETEDTDLPYPPPQREANIYMVPQNIKPALQRTAIEILAWGLRNMKSYQMASISSPSLVVECGGQTVQSCVIRNLRKNPNFDVCTLFMEVMLPREDLYCPPIVVKVIDNRQFGRRPVVGQCTIRSLENFLCDPYSAESPSPQGGPDDVSLLSPGEDVLIDIDDKEPLIPVQEEEFIDWWSKFFASVGEREKCGSYLEKDFDTLKVYDTQLENVEAFGGLSDFCNTFKLYRGRTQEETDDPSVIGEFKGLFKIYPLPEDPAIPMPPRQFHQLAAQGPQECLVRIYIVRAFGLQPKDPNGKCDPYIKISIGKKSVSDQDNYIPCTLEPVFGKMFELTCTLPLEKDLKITLYDYDLLSKDEKIGETVIDLENRLLSKFGARCGLPQTYCVSGPNQWRDQLRPSQLLHLFCQQHRIKAPVYRTDRVTFQDKDYTIEEIEAGRLPNPHLGPVEERLALHVLQQQGLVPEHVESRPLYSPLQPDIEQGKLQMWIDIFPKVLGRPGPPFNITPRKARRFFLRCIIWNTKDVILDDLSLTGEKMSDIYVKGWMVGFEEHKQKTDVHYRSLGGEGNFNWRFVFPFDYLPAEQVCAVAKKDAFWRLDKTESKIPARVVFQIWDNDKFSFDDFLGSLQLDLNRMPKPAKTAEKCSLDQLDDTFHPEWFVSLFEQKTVKGWWPCVTEEGEKKMLAGKLEMTLEIVAESEHEERPAGQGRDEPNMNPKLEDPRRPDTSFLWFTSPYKTMKFILWRRFRCAIILFIILFILLLFLGVFVYAFPNYAAMKLVKPF

SEQ ID NO: 701 - DNA, 5722 bp, Mus musculus
tttcaaatcagagtccaggtgatagaggggcgtcagctgcctggggtgaatattaagcctgtggtcaaggtcacagctgctgggcagaccaagcgaactcggatccagaagggaaatagcccactcttcaatgagactcttttcttcaacgtatttgactctcccttggagctgtttgatgagcccatcttcatcacggtggtggactcacgctcccttaggacagatgccctccttggcgagttccggatggatgtgggcaccgtgtacagagagccccgacacgcttatctccggaagtggctgctgctctccgaccctgatgacttctctgcgggggccagaggctacctcaaagccagcctgtgtgtgctagggcctggagatgaagctcccctggacaagaaggacccttatgaagacaaagaggacattgaaggcaacctgcttaggcccaccggtgtggcccttcgaggagcccacttatgcatgaagctgttccgggctgaggacttaccacagatggacgatgctgtgatggacaacgtcaagcagatctttggctttgacagcaacaagaagaacttggtggatccctttgtggaagtcagctttgctgggaaaatgctctgcagcaagatcctggagaagacagctaaccctcagtggaaccagaacatcaccttgcctgcgatgtttccctctatgtgtgaaaaaatgaggattcgtgtcatggactgggaccgcctcactcacaatgacactgtggccaccacctacttgggtatgtcgaaaatctctgctactggaggagaaatagaagtggacgacaacctgggcttcctccccacttttgggccctgctatgtgaacctctatggcagtccccgagagttcacgggcttcccagatccttatgcagagctcaacacaggaaagggagaaggtgtggcttatcgaggcagggttctgttgtccctggagaccaaactggtggaacacagtgagcagaaggtggaagaccttcctgctgatgatatcctgcgtgtggagaagtacctgcggaggcgcaaatattccctctttgctgccttctactcagccacaatgctgcaggatgtggatgacgccatccagttcgaggtcagcattgggaactacgggaacaagttcgacaccacctgcctgcccttggcctccaccacccagtacagccgggcggtctttgatggtgggtccctccctctccctgtaggatgccactactattacttgccttggggcaacgtgaagcccgtggtggtgctgtcctcatactgggaagacatcagccatcgaattgagatccaaaaccagctcctcagggtcgctgaccgcctggtgagtgggatcctgtccagacacggtgcctggtcgctagccctgccagaaggatgtgcaggcagacttgtagagatggggtatcaaggtgctggggatgcccgagggtttgtcccccagggtggaacacatatcacatgccctgacgtgtggagagggctacttaggagactgaggcagctttgggctgacagccagatcaaagaagctgctctggccttgaagcttggccatagtgagctctccactgccctggagcaggccgaggactggcttctgcatctccgtgccctggccgaggagccccagaacagcctgccggacatcatcatctggatgctgcagggtgacaagcgtgtggcctaccagcgggtgcctgcccatgaagtcctcttctcccggcggggccccagctactgcggcaggaactgtgggaagctgcagaccatctttctgaaatatcctatggaaggtatgcctggggcccgaatgcccgtgcagattcggatcaagctctggttcgggctctctgtggatgagaaggaattcaatcagtttgctgagggaaagctctctgtctttgccgaaacgtatgagaaccagacaaagctggcactggtcgggaactggggcacaacgggcctcacctaccccaagttttctgatgtcacaggcaagatcaaactaccaaaggatagcttccgcccctcagctggctgggcctgggcaggagattggttcgtgtgtccagagaagaccctactccatgatgctgacgctggtcatctgagcttcgtggaggaggtgttcgagaaccagacccggctccctgggggccagtggatttacatgagtgataactacacagatgtgaatggggagaaggtacttccgaaggatgatattgaatgcccgctgggctggaagtgggaagatgaagaatggtccacagacctcaatcgggctgttgatgaacaaggctgggagtacagcatcaccatacccccagaccgaaagccaaaacactgggtccctgttgagaagatgtattacactcacaggcgtcgacgctgggtccgactgcgcaggagggacctcagccagatggaagcactgaagagggtgagccagcgggaggtggaggccgagggcgagggctgggagtatgcctctctcttcggctggaagttccacctggagtaccgcaagacagatgccttccgccgccgccgctggcgccgccgcatggagccgctggagaagacgggacctgcagctgtgtttgccctcgagggggccctgggcggcatggtggatgacaagagcgaagactccatgtctgtttctaccctgagctttggcgttaacagacccacaatctcctgcatctttgactatgggaaccgctaccatctgcgctgctacctgtaccaggcccgagacctgccagccatggacaaggactccttctctgatccctacgccatcgtctccttcctgcatcaaagccagaagacagtggtggagaagaacaccctgaatcccacctgggatcaaaccctcatcttctatgagattgagatcttcggcgagccagccagtatcgccgagcatccgccctgcatcgtggtggagctctatgaccacgacacctatggtgctgacgagttcatgggtcgctgtatttgtcagccaagcctggaacggatgccccgcctggcctggttcccactgacccggggcagccagcctgccggcgagctgctggcagcgttcgagcttatccagagagagaagacggaggacacagatttgccttacccaccacctcaaagggaggccaacatctacatggttccccagaacattaagccagctctccaacgtactgccattgagatcctggcctggggcctgcggaacatgaagagctatcagatggccagcatctcttcccccagcctcgtggtggagtgtggtgggcagacagtgcagtcctgtgtcatcagaaaccttcggaagaaccccaactttgatgtctgtactctcttcatggaagtgatgttacccagagaggacctctactgtccacctattgtggtcaaggtcattgataatcgccagtttggccgccggccagttgtgggtcagtgtaccattcgctccctggagaacttcctgtgcgacccatactcagcagagagtccatccccacagggtggcccagatgatgtgagcttactcagccccggggaagatgtgctgattgacatcgatgacaaggagcctctcattcctgtccaggaggaggagttcattgactggtggagcaaattctttgcttctgtcggggagagggaaaagtgtggttcctacctggagaaggattttgacaccttgaaggtctatgacacacagctggagaatgtggaggcttttggaggcctgtccgacttttgtaacaccttcaagctctaccggggcaggactcaggaggagacagatgatccatctgtcatcggagaatttaagggtctcttcaaaatttatcccctcccagaagatccagccatccccatgcccccgagacaattccatcagctggctgctcagggtccccaggaatgcttggtccgtatttatatcgtccgagcatttggcttacagcccaaggaccccaatggcaagtgtgacccttacatcaagatctccatagggaagaaatcagtgagtgaccaggataactacatcccttgcaccctggagcctgtattcggaaagatgtttgaactcacctgcactctacctctggagaaggacctgaagatcacactctacgattatgacctgctctccaaggatgagaagattggggagacggtcatagacctggagaacaggctgctgtccaagtttggggctcgctgtgggctcccacagacctactgtgtctctggaccaaatcagtggagagatcagctccgcccctcccagctcctccacctcttctgccagcagcacaggatcaaggcccccgtgtaccggacagaccgagtgacgtttcaggataaggactacaccattgaggagatagaggctggcagactcccaaacccacacctgggcccagtggaggaacgcttagccctgcatgtccttcagcaacaaggcttggttcctgagcatgtggagtcacggcctctttatagtcctctgcagccagatatcgagcaggggaagctacagatgtggattgacatatttccaaaggtgctgggccggcctggacctcccttcaacatcaccccacggaaagctagaaggttttttctgcgttgtattatttggaacacaaaagatgtgatcttggatgacctcagtctcacgggggagaagatgagtgacatctatgtgaaaggctggatggtgggattcgaagaacacaagcagaagacagatgtgcactaccgctccctgggtggggagggcaatttcaactggaggttcgtgtttcccttcgactatctgcctgctgagcaagtctgtgctgttgccaagaaggatgccttctggagactcgacaagacagagagcaagatcccagcacgtgtggtcttccagatctgggacaatgacaaattctcttttgatgactttctgggctctctgcagctggatctcaaccgaatgcccaagccagccaagacggctgagaagtgctccttggaccagctggatgacaccttccacccagaatggtttgtgtccctttttgagcagaagacagtgaaaggatggtggccttgtgtgacagaggagggcgagaagaagatgttggcgggcaagctggaaatgaccttggagattgttgcagaaagtgaacatgaagagcggcctgctggccaaggtcgggatgaacccaacatgaatccgaagctagaggatccaaggcgccccgatacttctttcctgtggttcacctccccgtacaagaccatgaagttcatcttgtggcgacgcttccggtgtgccatcatcctcttcatcatcctcttcatcctcctgctcttcctgggtgtctttgtctacgccttcccgaactacgctgccatgaagctggtgaagccctttcgatgaagaagacatctgctctggagaagggggtgcaggctgcctcctggcccaggactagctgctcctccattgctctggggcctggtggtcttgcgcatgtccatggagttcttgggaatcacgttattttcatcttctctttctcccctaacccaacactcctctggataaactcttggctttctcagtataaagcagacagaaccag

SEQ ID NO: 702 - protein, 1826 aa, Mus musculus
FQIRVQVIEGRQLPGVNIKPVVKVTAAGQTKRTRIQKGNSPLFNETLFFNVFDSPLELFDEPIFITVVDSRSLRTDALLGEFRMDVGTVYREPRHAYLRKWLLLSDPDDFSAGARGYLKASLCVLGPGDEAPLDKKDPYEDKEDIEGNLLRPTGVALRGAHLCMKLFRAEDLPQMDDAVMDNVKQIFGFDSNKKNLVDPFVEVSFAGKMLCSKILEKTANPQWNQNITLPAMFPSMCEKMRIRVMDWDRLTHNDTVATTYLGMSKISATGGEIEVDDNLGFLPTFGPCYVNLYGSPREFTGFPDPYAELNTGKGEGVAYRGRVLLSLETKLVEHSEQKVEDLPADDILRVEKYLRRRKYSLFAAFYSATMLQDVDDAIQFEVSIGNYGNKFDTTCLPLASTTQYSRAVFDGGSLPLPVGCHYYYLPWGNVKPVVVLSSYWEDISHRIEIQNQLLRVADRLVSGILSRHGAWSLALPEGCAGRLVEMGYQGAGDARGFVPQGGTHITCPDVWRGLLRRLRQLWADSQIKEAALALKLGHSELSTALEQAEDWLLHLRALAEEPQNSLPDIIIWMLQGDKRVAYQRVPAHEVLFSRRGPSYCGRNCGKLQTIFLKYPMEGMPGARMPVQIRIKLWFGLSVDEKEFNQFAEGKLSVFAETYENQTKLALVGNWGTTGLTYPKFSDVTGKIKLPKDSFRPSAGWAWAGDWFVCPEKTLLHDADAGHLSFVEEVFENQTRLPGGQWIYMSDNYTDVNGEKVLPKDDIECPLGWKWEDEEWSTDLNRAVDEQGWEYSITIPPDRKPKHWVPVEKMYYTHRRRRWVRLRRRDLSQMEALKRVSQREVEAEGEGWEYASLFGWKFHLEYRKTDAFRRRRWRRRMEPLEKTGPAAVFALEGALGGMVDDKSEDSMSVSTLSFGVNRPTISCIFDYGNRYHLRCYLYQARDLPAMDKDSFSDPYAIVSFLHQSQKTVVEKNTLNPTWDQTLIFYEIEIFGEPASIAEHPPCIVVELYDHDTYGADEFMGRCICQPSLERMPRLAWFPLTRGSQPAGELLAAFELIQREKTEDTDLPYPPPQREANIYMVPQNIKPALQRTAIEILAWGLRNMKSYQMASISSPSLVVECGGQTVQSCVIRNLRKNPNFDVCTLFMEVMLPREDLYCPPIVVKVIDNRQFGRRPVVGQCTIRSLENFLCDPYSAESPSPQGGPDDVSLLSPGEDVLIDIDDKEPLIPVQEEEFIDWWSKFFASVGEREKCGSYLEKDFDTLKVYDTQLENVEAFGGLSDFCNTFKLYRGRTQEETDDPSVIGEFKGLFKIYPLPEDPAIPMPPRQFHQLAAQGPQECLVRIYIVRAFGLQPKDPNGKCDPYIKISIGKKSVSDQDNYIPCTLEPVFGKMFELTCTLPLEKDLKITLYDYDLLSKDEKIGETVIDLENRLLSKFGARCGLPQTYCVSGPNQWRDQLRPSQLLHLFCQQHRIKAPVYRTDRVTFQDKDYTIEEIEAGRLPNPHLGPVEERLALHVLQQQGLVPEHVESRPLYSPLQPDIEQGKLQMWIDIFPKVLGRPGPPFNITPRKARRFFLRCIIWNTKDVILDDLSLTGEKMSDIYVKGWMVGFEEHKQKTDVHYRSLGGEGNFNWRFVFPFDYLPAEQVCAVAKKDAFWRLDKTESKIPARVVFQIWDNDKFSFDDFLGSLQLDLNRMPKPAKTAEKCSLDQLDDTFHPEWFVSLFEQKTVKGWWPCVTEEGEKKMLAGKLEMTLEIVAESEHEERPAGQGRDEPNMNPKLEDPRRPDTSFLWFTSPYKTMKFILWRRFRCAIILFIILFILLLFLGVFVYAFP

SEQ ID NO: 703 - DNA, 4044 bp, Mus musculus
tttcaaatcagagtccaggtgatagaggggcgtcagctgcctggggtgaatattaagcctgtggtcaaggtcacagctgctgggcagaccaagcgaactcggatccagaagggaaatagcccactcttcaatgagactcttttcttcaacgtatttgactctcccttggagctgtttgatgagcccatcttcatcacggtggtggactcacgctcccttaggacagatgccctccttggcgagttccggatggatgtgggcaccgtgtacagagagccccgacacgcttatctccggaagtggctgctgctctccgaccctgatgacttctctgcgggggccagaggctacctcaaagccagcctgtgtgtgctagggcctggagatgaagctcccctggacaagaaggacccttatgaagacaaagaggacattgaaggcaacctgcttaggcccaccggtgtggcccttcgaggagcccacttatgcatgaagctgttccgggctgaggacttaccacagatggacgatgctgtgatggacaacgtcaagcagatctttggctttgacagcaacaagaagaacttggtggatccctttgtggaagtcagctttgctgggaaaatgctctgcagcaagatcctggagaagacagctaaccctcagtggaaccagaacatcaccttgcctgcgatgtttccctctatgtgtgaaaaaatgaggattcgtgtcatggactgggaccgcctcactcacaatgacactgtggccaccacctacttgggtatgtcgaaaatctctgctactggaggagaaatagaagtggacgacaacctgggcttcctccccacttttgggccctgctatgtgaacctctatggcagtccccgagagttcacgggcttcccagatccttatgcagagctcaacacaggaaagggagaaggtgtggcttatcgaggcagggttctgttgtccctggagaccaaactggtggaacacagtgagcagaaggtggaagaccttcctgctgatgatatcctgcgtgtggagaagtacctgcggaggcgcaaatattccctctttgctgccttctactcagccacaatgctgcaggatgtggatgacgccatccagttcgaggtcagcattgggaactacgggaacaagttcgacaccacctgcctgcccttggcctccaccacccagtacagccgggcggtctttgatggtgggtccctccctctccctgtaggatgccactactattacttgccttggggcaacgtgaagcccgtggtggtgctgtcctcatactgggaagacatcagccatcgaattgagatccaaaaccagctcctcagggtcgctgaccgcctggtgagtgggatcctgtccagacacggtgcctggtcgctagccctgccagaaggatgtgcaggcagacttgtagagatggggtatcaaggtgctggggatgcccgagggtttgtcccccagggtggaacacatatcacatgccctgacgtgtggagagggctacttaggagactgaggcagctttgggctgacagccagatcaaagaagctgctctggccttgaagcttggccatagtgagctctccactgccctggagcaggccgaggactggcttctgcatctccgtgccctggccgaggagccccagaacagcctgccggacatcatcatctggatgctgcagggtgacaagcgtgtggcctaccagcgggtgcctgcccatgaagtcctcttctcccggcggggccccagctactgcggcaggaactgtgggaagctgcagaccatctttctgaaatatcctatggaaggtatgcctggggcccgaatgcccgtgcagattcggatcaagctctggttcgggctctctgtggatgagaaggaattcaatcagtttgctgagggaaagctctctgtctttgccgaaacgtatgagaaccagacaaagctggcactggtcgggaactggggcacaacgggcctcacctaccccaagttttctgatgtcacaggcaagatcaaactaccaaaggatagcttccgcccctcagctggctgggcctgggcaggagattggttcgtgtgtccagagaagaccctactccatgatgctgacgctggtcatctgagcttcgtggaggaggtgttcgagaaccagacccggctccctgggggccagtggatttacatgagtgataactacacagatgtgaatggggagaaggtacttccgaaggatgatattgaatgcccgctgggctggaagtgggaagatgaagaatggtccacagacctcaatcgggctgttgatgaacaaggctgggagtacagcatcaccatacccccagaccgaaagccaaaacactgggtccctgttgagaagatgtattacactcacaggcgtcgacgctgggtccgactgcgcaggagggacctcagccagatggaagcactgaagagggtgagccagcgggaggtggaggccgagggcgagggctgggagtatgcctctctcttcggctggaagttccacctggagtaccgcaagacagatgccttccgccgccgccgctggcgccgccgcatggagccgctggagaagacgggacctgcagctgtgtttgccctcgagggggccctgggcggcatggtggatgacaagagcgaagactccatgtctgtttctaccctgagctttggcgttaacagacccacaatctcctgcatctttgactatgggaaccgctaccatctgcgctgctacctgtaccaggcccgagacctgccagccatggacaaggactccttctctgatccctacgccatcgtctccttcctgcatcaaagccagaagacagtggtggagaagaacaccctgaatcccacctgggatcaaaccctcatcttctatgagattgagatcttcggcgagccagccagtatcgccgagcatccgccctgcatcgtggtggagctctatgaccacgacacctatgtgaaggctggcagactcccaaacccacacctgggcccagtggaggaacgcttagccctgcatgtccttcagcaacaaggcttggttcctgagcatgtggagtcacggcctctttatagtcctctgcagccagatatcgagcaggggaagctacagatgtggattgacatatttccaaaggtgctgggccggcctggacctcccttcaacatcaccccacggaaagctagaaggttttttctgcgttgtattatttggaacacaaaagatgtgatcttggatgacctcagtctcacgggggagaagatgagtgacatctatgtgaaaggctggatggtgggattcgaagaacacaagcagaagacagatgtgcactaccgctccctgggtggggagggcaatttcaactggaggttcgtgtttcccttcgactatctgcctgctgagcaagtctgtgctgttgccaagaaggatgccttctggagactcgacaagacagagagcaagatcccagcacgtgtggtcttccagatctgggacaatgacaaattctcttttgatgactttctgggctctctgcagctggatctcaaccgaatgcccaagccagccaagacggctgagaagtgctccttggaccagctggatgacaccttccacccagaatggtttgtgtccctttttgagcagaagacagtgaaaggatggtggccttgtgtgacagaggagggcgagaagaagatgttggcgggcaagctggaaatgaccttggagattgttgcagaaagtgaacatgaagagcggcctgctggccaaggtcgggatgaacccaacatgaatccgaagctagaggatccaaggcgccccgatacttctttcctgtggttcacctccccgtacaagaccatgaagttcatcttgtggcgacgcttccggtgtgccatcatcctcttcatcatcctcttcatcctcctgctcttcctgggtgtctttgtctacgccttcccg

SEQ ID NO: 704 - protein, 1348 aa, Mus musculus
FQIRVQVIEGRQLPGVNIKPVVKVTAAGQTKRTRIQKGNSPLFNETLFFNVFDSPLELFDEPIFITVVDSRSLRTDALLGEFRMDVGTVYREPRHAYLRKWLLLSDPDDFSAGARGYLKASLCVLGPGDEAPLDKKDPYEDKEDIEGNLLRPTGVALRGAHLCMKLFRAEDLPQMDDAVMDNVKQIFGFDSNKKNLVDPFVEVSFAGKMLCSKILEKTANPQWNQNITLPAMFPSMCEKMRIRVMDWDRLTHNDTVATTYLGMSKISATGGEIEVDDNLGFLPTFGPCYVNLYGSPREFTGFPDPYAELNTGKGEGVAYRGRVLLSLETKLVEHSEQKVEDLPADDILRVEKYLRRRKYSLFAAFYSATMLQDVDDAIQFEVSIGNYGNKFDTTCLPLASTTQYSRAVFDGGSLPLPVGCHYYYLPWGNVKPVVVLSSYWEDISHRIEIQNQLLRVADRLVSGILSRHGAWSLALPEGCAGRLVEMGYQGAGDARGFVPQGGTHITCPDVWRGLLRRLRQLWADSQIKEAALALKLGHSELSTALEQAEDWLLHLRALAEEPQNSLPDIIIWMLQGDKRVAYQRVPAHEVLFSRRGPSYCGRNCGKLQTIFLKYPMEGMPGARMPVQIRIKLWFGLSVDEKEFNQFAEGKLSVFAETYENQTKLALVGNWGTTGLTYPKFSDVTGKIKLPKDSFRPSAGWAWAGDWFVCPEKTLLHDADAGHLSFVEEVFENQTRLPGGQWIYMSDNYTDVNGEKVLPKDDIECPLGWKWEDEEWSTDLNRAVDEQGWEYSITIPPDRKPKHWVPVEKMYYTHRRRRWVRLRRRDLSQMEALKRVSQREVEAEGEGWEYASLFGWKFHLEYRKTDAFRRRRWRRRMEPLEKTGPAAVFALEGALGGMVDDKSEDSMSVSTLSFGVNRPTISCIFDYGNRYHLRCYLYQARDLPAMDKDSFSDPYAIVSFLHQSQKTVVEKNTLNPTWDQTLIFYEIEIFGEPASIAEHPPCIVVELYDHDTYVKAGRLPNPHLGPVEERLALHVLQQQGLVPEHVESRPLYSPLQPDIEQGKLQMWIDIFPKVLGRPGPPFNITPRKARRFFLRCIIWNTKDVILDDLSLTGEKMSDIYVKGWMVGFEEHKQKTDVHYRSLGGEGNFNWRFVFPFDYLPAEQVCAVAKKDAFWRLDKTESKIPARVVFQIWDNDKFSFDDFLGSLQLDLNRMPKPAKTAEKCSLDQLDDTFHPEWFVSLFEQKTVKGWWPCVTEEGEKKMLAGKLEMTLEIVAESEHEERPAGQGRDEPNMNPKLEDPRRPDTSFLWFTSPYKTMKFILWRRFRCAIILFIILFILLLFLGVFVYAFP

SEQ ID NO: 705 - DNA, 4095 bp, Mus musculus
tttcaaatcagagtccaggtgatagaggggcgtcagctgcctggggtgaatattaagcctgtggtcaaggtcacagctgctgggcagaccaagcgaactcggatccagaagggaaatagcccactcttcaatgagactcttttcttcaacgtatttgactctcccttggagctgtttgatgagcccatcttcatcacggtggtggactcacgctcccttaggacagatgccctccttggcgagttccgggtaattgtttgtctacttggaagtagacacgcttatctccggaagtggctgctgctctccgaccctgatgacttctctgcgggggccagaggctacctcaaagccagcctgtgtgtgctagggcctggagatgaagctcccctggacaagaaggacccttatgaagacaaagaggacattgaaggcaacctgcttaggcccaccggtgtggcccttcgaggagcccacttatgcatgaagctgttccgggctgaggacttaccacagatggacgatgctgtgatggacaacgtcaagcagatctttggctttgacagcaacaagaagaacttggtggatccctttgtggaagtcagctttgctgggaaaatgctctgcagcaagatcctggagaagacagctaaccctcagtggaaccagaacatcaccttgcctgcgatgtttccctctatgtgtgaaaaaatgaggattcgtgtcatggactgggaccgcctcactcacaatgacactgtggccaccacctacttgggtatgtcgaaaatctctgctactggaggagaaatagaagtggacgacaacctgggcttcctccccacttttgggccctgctatgtgaacctctatggcagtccccgagagttcacgggcttcccagatccttatgcagagctcaacacaggaaagggagaaggtgtggcttatcgaggcagggttctgttgtccctggagaccaaactggtggaacacagtgagcagaaggtggaagaccttcctgctgatgatatcctgcgtgtggagaagtacctgcggaggcgcaaatattccctctttgctgccttctactcagccacaatgctgcaggatgtggatgacgccatccagttcgaggtcagcattgggaactacgggaacaagttcgacaccacctgcctgcccttggcctccaccacccagtacagccgggcggtctttgatggtgggtccctccctctccctgtaggatgccactactattacttgccttggggcaacgtgaagcccgtggtggtgctgtcctcatactgggaagacatcagccatcgaattgagatccaaaaccagctcctcagggtcgctgaccgcctggtgagtgggatcctgtccagacacggtgcctggtcgctagccctgccagaaggatgtgcaggcagacttgtagagatggggttgagggttatcccaaaaaggcttatgcctgggaataaggaggtatgtttcatagtagaaggaccaggttgtataaggaaggcttcctggagcaggcaggtccgcgatgagatcaaagaagctgctctggccttgaagcttggccatagtgagctctccactgccctggagcaggccgaggactggcttctgcatctccgtgccctggccgaggagccccagaacagcctgccggacatcatcatctggatgctgcagggtgacaagcgtgtggcctaccagcgggtgcctgcccatgaagtcctcttctcccggcggggccccagctactgcggcaggaactgtgggaagctgcagaccatctttctgaaatatcctatggaaggtatgcctggggcccgaatgcccgtgcagattcggatcaagctctggttcgggctctctgtggatgagaaggaattcaatcagtttgctgagggaaagctctctgtctttgccgaaacgtatgagaaccagacaaagctggcactggtcgggaactggggcacaacgggcctcacctaccccaagttttctgatgtcacaggcaagatcaaactaccaaaggatagcttccgcccctcagctggctgggcctgggcaggagattggttcgtgtgtccagagaagaccctactccatgatgctgacgctggtcatctgagcttcgtggaggaggtgttcgagaaccagacccggctccctgggggccagtggatttacatgagtgataactacacagatgtgaatggggagaaggtacttccgaaggatgatattgaatgcccgctgggctggaagtgggaagatgaagaatggtccacagacctcaatcgggctgttgatgaacaaggctgggagtacagcatcaccatacccccagaccgaaagccaaaacactgggtccctgttgagaagatgtattacactcacaggcgtcgacgctgggtccgactgcgcaggagggacctcagccagatggaagcactgaagagggtgagccagcgggaggtggaggccgagggcgagggctgggagtatgcctctctcttcggctggaagttccacctggagtaccgcaagacagatgccttccgccgccgccgctggcgccgccgcatggagccgctggagaagacgggacctgcagctgtgtttgccctcgagggggccctgggcggcatggtggatgacaagagcgaagactccatgtctgtttctaccctgagctttggcgttaacagacccacaatctcctgcatctttgactatgggaaccgctaccatctgcgctgctacctgtaccaggcccgagacctgccagccatggacaaggactccttctctgatccctacgccatcgtctccttcctgcatcaaagccagaagacagtggtggagaagaacaccctgaatcccacctgggatcaaaccctcatcttctatgagattgagatcttcggcgagccagccagtatcgccgagcatccgccctgcatcgtggtggagctctatgaccacgacacctatggtgctgacgagttcatgggtcgctgtatttgtcagccaagcctggaacggatgccccgcctggcctggttcccactgacccggggcagccagcctgccggcgagctgctggcagcgttcgagcttatccagagagagaagacggaggacacagatttgccttacccaccacctcaaagggaggccaacatctacatggttccccagaacattaagccagctctccaacgtactgccattgagatcctggcctggggcctgcggaacatgaagagctatcagatggccagcatctcttcccccagcctcgtggtggagtgtggtgggcagacagtgcagtcctgtgtcatcagaaaccttcggaagaaccccaactttgatgtctgtactctcttcatggaagtgatgttacccagagaggacctctactgtccacctattgtggtcaaggtcattgataatcgccagtttggccgccggccagttgtgggtcagtgtaccattcgctccctggagaacttcctgtgcgacccatactcagcagagagtccatccccacagggtggcccaggtaaggagcctttgctgagctggcccagtcatttttcccttgggttggcacatctggaccaagtgacctcctacttgtgggaggaggagttcattgactggtggagcaaattctttgcttctgtcggggagagggaaaagtgtggttcctacctggagaaggattttgacaccttgaaggtctatgacacacagctggagaatgtggaggcttttggaggcctgtccgacttttgtaacaccttcaagctctaccggggcaggactcaggaggagacagatgatccatctgtcatcggagaatttaagggtctcttcaaaatttatcccctcccagaagatccagccatccccatgcccccgagacaattccatcagctggctgctcagggtccccaggaatgcttggtccgtatttatatcgtccgagcatttggcttacagcccaaggaccccaatggcaagtgtgacccttacatcaagatctccatagggaagaaa

SEQ ID NO: 706 - protein, 1365 aa, Mus musculus
FQIRVQVIEGRQLPGVNIKPVVKVTAAGQTKRTRIQKGNSPLFNETLFFNVFDSPLELFDEPIFITVVDSRSLRTDALLGEFRVIVCLLGSRHAYLRKWLLLSDPDDFSAGARGYLKASLCVLGPGDEAPLDKKDPYEDKEDIEGNLLRPTGVALRGAHLCMKLFRAEDLPQMDDAVMDNVKQIFGFDSNKKNLVDPFVEVSFAGKMLCSKILEKTANPQWNQNITLPAMFPSMCEKMRIRVMDWDRLTHNDTVATTYLGMSKISATGGEIEVDDNLGFLPTFGPCYVNLYGSPREFTGFPDPYAELNTGKGEGVAYRGRVLLSLETKLVEHSEQKVEDLPADDILRVEKYLRRRKYSLFAAFYSATMLQDVDDAIQFEVSIGNYGNKFDTTCLPLASTTQYSRAVFDGGSLPLPVGCHYYYLPWGNVKPVVVLSSYWEDISHRIEIQNQLLRVADRLVSGILSRHGAWSLALPEGCAGRLVEMGLRVIPKRLMPGNKEVCFIVEGPGCIRKASWSRQVRDEIKEAALALKLGHSELSTALEQAEDWLLHLRALAEEPQNSLPDIIIWMLQGDKRVAYQRVPAHEVLFSRRGPSYCGRNCGKLQTIFLKYPMEGMPGARMPVQIRIKLWFGLSVDEKEFNQFAEGKLSVFAETYENQTKLALVGNWGTTGLTYPKFSDVTGKIKLPKDSFRPSAGWAWAGDWFVCPEKTLLHDADAGHLSFVEEVFENQTRLPGGQWIYMSDNYTDVNGEKVLPKDDIECPLGWKWEDEEWSTDLNRAVDEQGWEYSITIPPDRKPKHWVPVEKMYYTHRRRRWVRLRRRDLSQMEALKRVSQREVEAEGEGWEYASLFGWKFHLEYRKTDAFRRRRWRRRMEPLEKTGPAAVFALEGALGGMVDDKSEDSMSVSTLSFGVNRPTISCIFDYGNRYHLRCYLYQARDLPAMDKDSFSDPYAIVSFLHQSQKTVVEKNTLNPTWDQTLIFYEIEIFGEPASIAEHPPCIVVELYDHDTYGADEFMGRCICQPSLERMPRLAWFPLTRGSQPAGELLAAFELIQREKTEDTDLPYPPPQREANIYMVPQNIKPALQRTAIEILAWGLRNMKSYQMASISSPSLVVECGGQTVQSCVIRNLRKNPNFDVCTLFMEVMLPREDLYCPPIVVKVIDNRQFGRRPVVGQCTIRSLENFLCDPYSAESPSPQGGPGKEPLLSWPSHFSLGLAHLDQVTSYLWEEEFIDWWSKFFASVGEREKCGSYLEKDFDTLKVYDTQLENVEAFGGLSDFCNTFKLYRGRTQEETDDPSVIGEFKGLFKIYPLPEDPAIPMPPRQFHQLAAQGPQECLVRIYIVRAFGLQPKDPNGKCDPYIKISIGKK

SEQ ID NO: 707 - DNA, 2028 bp, Mus musculus
tttcaaatcagagtccaggtgatagaggggcgtcagctgcctggggtgaatattaagcctgtggtcaaggtcacagctgctgggcagaccaagcgaactcggatccagaagggaaatagcccactcttcaatgagactcttttcttcaacgtatttgactctcccttggagctgtttgatgagcccatcttcatcacggtggtggactcacgctcccttaggacagatgccctccttggcgagttccggatggatgtgggcaccgtgtacagagagccccgacacgcttatctccggaagtggctgctgctctccgaccctgatgacttctctgcgggggccagaggctacctcaaagccagcctgtgtgtgctagggcctggagatgaagctcccctggacaagaaggacccttatgaagacaaagaggacattgaaggcaacctgcttaggcccaccggtgtggcccttcgaggagcccacttatgcatgaagctgttccgggctgaggacttaccacagatggacgatgctgtgatggacaacgtcaagcagatctttggctttgacagcaacaagaagaacttggtggatccctttgtggaagtcagctttgctgggaaaatgctctgcagcaagatcctggagaagacagctaaccctcagtggaaccagaacatcaccttgcctgcgatgtttccctctatgtgtgaaaaaatgaggattcgtgtcatggactgggaccgcctcactcacaatgacactgtggccaccacctacttgggtatgtcgaaaatctctgctactggaggagaaatagaagtggacgacaacctgggcttcctccccacttttgggccctgctatgtgaacctctatggcagtccccgagagttcacgggcttcccagatccttatgcagagctcaacacaggaaagggagaaggtgtggcttatcgaggcagggttctgttgtccctggagaccaaactggtggaacacagtgagcagaaggtggaagaccttcctgctgatgatatcctgcgtgtggagaagtacctgcggaggcgcaaatattccctctttgctgccttctactcagccacaatgctgcaggatgtggatgacgccatccagttcgaggtcagcattgggaactacgggaacaagttcgacaccacctgcctgcccttggcctccaccacccagtacagccgggcggtctttgatggtgggtccctccctctccctgtaggatgccactactattacttgccttggggcaacgtgaagcccgtggtggtgctgtcctcatactgggaagacatcagccatcgaattgagatccaaaaccagctcctcagggtcgctgaccgcctggtgagtgggatcctgtccagacacggtgcctggtcgctagccctgccagaaggatgtgcaggcagacttgtagagatgggccagatcaaagaagctgctctggccttgaagcttggccatagtgagctctccactgccctggagcaggccgaggactggcttctgcatctccgtgccctggccgaggagccccagaacagcctgccggacatcatcatctggatgctgcagggtgacaagcgtgtggcctaccagcgggtgcctgcccatgaagtcctcttctcccggcggggccccagctactgcggcaggaactgtgggaagctgcagaccatctttctgaaatatcctatggaaggtatgcctggggcccgaatgcccgtgcagattcggatcaagctctggttcgggctctctgtggatgagaaggaattcaatcagtttgctgagggaaagctctctgtctttgccgaaacgtatgagaaccagacaaagctggcactggtcgggaactggggcacaacgggcctcacctaccccaagttttctgatgtcacaggcaagatcaaactaccaaaggatagcttccgcccctcagctggctgggcctgggcaggagattggttcgtgtgtccagagaagacgtga

SEQ ID NO: 708 - protein, 675 aa, Mus musculus
FQIRVQVIEGRQLPGVNIKPVVKVTAAGQTKRTRIQKGNSPLFNETLFFNVFDSPLELFDEPIFITVVDSRSLRTDALLGEFRMDVGTVYREPRHAYLRKWLLLSDPDDFSAGARGYLKASLCVLGPGDEAPLDKKDPYEDKEDIEGNLLRPTGVALRGAHLCMKLFRAEDLPQMDDAVMDNVKQIFGFDSNKKNLVDPFVEVSFAGKMLCSKILEKTANPQWNQNITLPAMFPSMCEKMRIRVMDWDRLTHNDTVATTYLGMSKISATGGEIEVDDNLGFLPTFGPCYVNLYGSPREFTGFPDPYAELNTGKGEGVAYRGRVLLSLETKLVEHSEQKVEDLPADDILRVEKYLRRRKYSLFAAFYSATMLQDVDDAIQFEVSIGNYGNKFDTTCLPLASTTQYSRAVFDGGSLPLPVGCHYYYLPWGNVKPVVVLSSYWEDISHRIEIQNQLLRVADRLVSGILSRHGAWSLALPEGCAGRLVEMGQIKEAALALKLGHSELSTALEQAEDWLLHLRALAEEPQNSLPDIIIWMLQGDKRVAYQRVPAHEVLFSRRGPSYCGRNCGKLQTIFLKYPMEGMPGARMPVQIRIKLWFGLSVDEKEFNQFAEGKLSVFAETYENQTKLALVGNWGTTGLTYPKFSDVTGKIKLPKDSFRPSAGWAWAGDWFVCPEKT

SEQ ID NO: 709 - DNA, 3873 bp, Mus musculus
ggtgtggcttatcgaggcagggttctgttgtccctggagaccaaactggtggaacacagtgagcagaaggtggaagaccttcctgctgatgatatcctgcgtgtggagaagtacctgcggaggcgcaaatattccctctttgctgccttctactcagccacaatgctgcaggatgtggatgacgccatccagttcgaggtcagcattgggaactacgggaacaagttcgacaccacctgcctgcccttggcctccaccacccagtacagccgggcggtctttgatggtgggtccctccctctccctgtaggatgccactactattacttgccttggggcaacgtgaagcccgtggtggtgctgtcctcatactgggaagacatcagccatcgaattgagatccaaaaccagctcctcagggtcgctgaccgcctggtgagtgggatcctgtccagacacggtgcctggtcgctagccctgccagaaggatgtgcaggcagacttgtagagatggggtatcaaggtgctggggatgcccgagggtttgtcccccagggtggaacacatatcacatgccctgacgtgtggagagggctacttaggagactgaggcagctttgggctgacagccagatcaaagaagctgctctggccttgaagcttggccatagtgagctctccactgccctggagcaggccgaggactggcttctgcatctccgtgccctggccgaggagccccagaacagcctgccggacatcatcatctggatgctgcagggtgacaagcgtgtggcctaccagcgggtgcctgcccatgaagtcctcttctcccggcggggccccagctactgcggcaggaactgtgggaagctgcagaccatctttctgaaatatcctatggaaggtatgcctggggcccgaatgcccgtgcagattcggatcaagctctggttcgggctctctgtggatgagaaggaattcaatcagtttgctgagggaaagctctctgtctttgccgaaacgtatgagaaccagacaaagctggcactggtcgggaactggggcacaacgggcctcacctaccccaagttttctgatgtcacaggcaagatcaaactaccaaaggatagcttccgcccctcagctggctgggcctgggcaggagattggttcgtgtgtccagagaagaccctactccatgatgctgacgctggtcatctgagcttcgtggaggaggtgttcgagaaccagacccggctccctgggggccagtggatttacatgagtgataactacacagatgtgaatggggagaaggtacttccgaaggatgatattgaatgcccgctgggctggaagtgggaagatgaagaatggtccacagacctcaatcgggctgttgatgaacaaggctgggagtacagcatcaccatacccccagaccgaaagccaaaacactgggtccctgttgagaagatgtattacactcacaggcgtcgacgctgggtccgactgcgcaggagggacctcagccagatggaagcactgaagagggtgagccagcgggaggtggaggccgagggcgagggctgggagtatgcctctctcttcggctggaagttccacctggagtaccgcaagacagatgccttccgccgccgccgctggcgccgccgcatggagccgctggagaagacgggacctgcagctgtgtttgccctcgagggggccctgggcggcatggtggatgacaagagcgaagactccatgtctgtttctaccctgagctttggcgttaacagacccacaatctcctgcatctttgactatgggaaccgctaccatctgcgctgctacctgtaccaggcccgagacctgccagccatggacaaggactccttctctgatccctacgccatcgtctccttcctgcatcaaagccagaagacagtggtggagaagaacaccctgaatcccacctgggatcaaaccctcatcttctatgagattgagatcttcggcgagccagccagtatcgccgagcatccgccctgcatcgtggtggagctctatgaccacgacacctatggtgctgacgagttcatgggtcgctgtatttgtcagccaagcctggaacggatgccccgcctggcctggttcccactgacccggggcagccagcctgccggcgagctgctggcagcgttcgagcttatccagagagagaagacggaggacacagatttgccttacccaccacctcaaagggaggccaacatctacatggttccccagaacattaagccagctctccaacgtactgccattgagatcctggcctggggcctgcggaacatgaagagctatcagatggccagcatctcttcccccagcctcgtggtggagtgtggtgggcagacagtgcagtcctgtgtcatcagaaaccttcggaagaaccccaactttgatgtctgtactctcttcatggaagtgaaatcagtgagtgaccaggataactacatcccttgcaccctggagcctgtattcggaaagatgtttgaactcacctgcactctacctctggagaaggacctgaagatcacactctacgattatgacctgctctccaaggatgagaagattggggagacggtcatagacctggagaacaggctgctgtccaagtttggggctcgctgtgggctcccacagacctactgtgtctctggaccaaatcagtggagagatcagctccgcccctcccagctcctccacctcttctgccagcagcacaggatcaaggcccccgtgtaccggacagaccgagtgacgtttcaggataaggactacaccattgaggagatagaggctggcagactcccaaacccacacctgggcccagtggaggaacgcttagccctgcatgtccttcagcaacaaggcttggttcctgagcatgtggagtcacggcctctttatagtcctctgcagccagatatcgagcaggggaagctacagatgtggattgacatatttccaaaggtgctgggccggcctggacctcccttcaacatcaccccacggaaagctagaaggttttttctgcgttgtattatttggaacacaaaagatgtgatcttggatgacctcagtctcacgggggagaagatgagtgacatctatgtgaaaggctggatggtgggattcgaagaacacaagcagaagacagatgtgcactaccgctccctgggtggggagggcaatttcaactggaggttcgtgtttcccttcgactatctgcctgctgagcaagtctgtgctgttgccaagaaggatgccttctggagactcgacaagacagagagcaagatcccagcacgtgtggtcttccagatctgggacaatgacaaattctcttttgatgactttctgggctctctgcagctggatctcaaccgaatgcccaagccagccaagacggctgagaagtgctccttggaccagctggatgacaccttccacccagaatggtttgtgtccctttttgagcagaagacagtgaaaggatggtggccttgtgtgacagaggagggcgagaagaagatgttggcgggcaagctggaaatgaccttggagattgttgcagaaagtgaacatgaagagcggcctgctggccaaggtcgggatgaacccaacatgaatccgaagctagaggatccaaggcgccccgatacttctttcctgtggttcacctccccgtacaagaccatgaagttcatcttgtggcgacgcttccggtgtgccatcatcctcttcatcatcctcttcatcctcctgctcttcctgggtgtctttgtctacgccttcccg

SEQ ID NO: 710 - protein, 1291 aa, Mus musculus
GVAYRGRVLLSLETKLVEHSEQKVEDLPADDILRVEKYLRRRKYSLFAAFYSATMLQDVDDAIQFEVSIGNYGNKFDTTCLPLASTTQYSRAVFDGGSLPLPVGCHYYYLPWGNVKPVVVLSSYWEDISHRIEIQNQLLRVADRLVSGILSRHGAWSLALPEGCAGRLVEMGYQGAGDARGFVPQGGTHITCPDVWRGLLRRLRQLWADSQIKEAALALKLGHSELSTALEQAEDWLLHLRALAEEPQNSLPDIIIWMLQGDKRVAYQRVPAHEVLFSRRGPSYCGRNCGKLQTIFLKYPMEGMPGARMPVQIRIKLWFGLSVDEKEFNQFAEGKLSVFAETYENQTKLALVGNWGTTGLTYPKFSDVTGKIKLPKDSFRPSAGWAWAGDWFVCPEKTLLHDADAGHLSFVEEVFENQTRLPGGQWIYMSDNYTDVNGEKVLPKDDIECPLGWKWEDEEWSTDLNRAVDEQGWEYSITIPPDRKPKHWVPVEKMYYTHRRRRWVRLRRRDLSQMEALKRVSQREVEAEGEGWEYASLFGWKFHLEYRKTDAFRRRRWRRRMEPLEKTGPAAVFALEGALGGMVDDKSEDSMSVSTLSFGVNRPTISCIFDYGNRYHLRCYLYQARDLPAMDKDSFSDPYAIVSFLHQSQKTVVEKNTLNPTWDQTLIFYEIEIFGEPASIAEHPPCIVVELYDHDTYGADEFMGRCICQPSLERMPRLAWFPLTRGSQPAGELLAAFELIQREKTEDTDLPYPPPQREANIYMVPQNIKPALQRTAIEILAWGLRNMKSYQMASISSPSLVVECGGQTVQSCVIRNLRKNPNFDVCTLFMEVKSVSDQDNYIPCTLEPVFGKMFELTCTLPLEKDLKITLYDYDLLSKDEKIGETVIDLENRLLSKFGARCGLPQTYCVSGPNQWRDQLRPSQLLHLFCQQHRIKAPVYRTDRVTFQDKDYTIEEIEAGRLPNPHLGPVEERLALHVLQQQGLVPEHVESRPLYSPLQPDIEQGKLQMWIDIFPKVLGRPGPPFNITPRKARRFFLRCIIWNTKDVILDDLSLTGEKMSDIYVKGWMVGFEEHKQKTDVHYRSLGGEGNFNWRFVFPFDYLPAEQVCAVAKKDAFWRLDKTESKIPARVVFQIWDNDKFSFDDFLGSLQLDLNRMPKPAKTAEKCSLDQLDDTFHPEWFVSLFEQKTVKGWWPCVTEEGEKKMLAGKLEMTLEIVAESEHEERPAGQGRDEPNMNPKLEDPRRPDTSFLWFTSPYKTMKFILWRRFRCAIILFIILFILLLFLGVFVYAFP

SEQ ID NO: 711 - DNA, 2823 bp, Mus musculus
taccatctgcgctgctacctgtaccaggcccgagacctgccagccatggacaaggactccttctctgatccctacgccatcgtctccttcctgcatcaaagccagaagacagtggtggagaagaacaccctgaatcccacctgggatcaaaccctcatcttctatgagattgagatcttcggcgagccagccagtatcgccgagcatccgccctgcatcgtggtggagctctatgaccacgacacctatggtgctgacgagttcatgggtcgctgtatttgtcagccaagcctggaacggatgccccgcctggcctggttcccactgacccggggcagccagcctgccggcgagctgctggcagcgttcgagcttatccagagagagaagacggaggacacagatttgccttacccaccacctcaaagggaggccaacatctacatggttccccagaacattaagccagctctccaacgtactgccattgagatcctggcctggggcctgcggaacatgaagagctatcagatggccagcatctcttcccccagcctcgtggtggagtgtggtgggcagacagtgcagtcctgtgtcatcagaaaccttcggaagaaccccaactttgatgtctgtactctcttcatggaagtgatgttacccagagaggacctctactgtccacctattgtggtcaaggtcattgataatcgccagtttggccgccggccagttgtgggtcagtgtaccattcgctccctggagaacttcctgtgcgacccatactcagcagagagtccatccccacagggtggcccaggtaaggagcctttgctgagctggcccagtcatttttcccttgggttggcacatctggaccaagtgacctcctacttgtgggaggaggagttcattgactggtggagcaaattctttgcttctgtcggggagagggaaaagtgtggttcctacctggagaaggattttgacaccttgaaggtaagacctctccagaacgcactcccagcccagcagccgtcaggtagagcgagagaaaacaacaactatacattgcaatcgccagcaaaggggatacgagctcgtcgactaagcagcaaagaaatgagagtctatgacacacagctggagaatgtggaggcttttggaggcctgtccgacttttgtaacaccttcaagctctaccggggcaggactcaggaggagacagatgatccatctgtcatcggagaatttaagggtctcttcaaaatttatcccctcccagaagatccagccatccccatgcccccgagacaattccatcagctggctgctcagggtccccaggaatgcttggtccgtatttatatcgtccgagcatttggcttacagcccaaggaccccaatggcaagtgtgacccttacatcaagatctccatagggaagaaatcagtgagtgaccaggataactacatcccttgcaccctggagcctgtattcggaaagatgtttgaactcacctgcactctacctctggagaaggacctgaagatcacactctacgattatgacctgctctccaaggatgagaagattggggagacggtcatagacctggagaacaggctgctgtccaagtttggggctcgctgtgggctcccacagacctactgtgtctctggaccaaatcagtggagagatcagctccgcccctcccagctcctccacctcttctgccagcagcacaggatcaaggcccccgtgtaccggacagaccgagtgacgtttcaggataaggactacaccattgaggagatagaggctggcagactcccaaacccacacctgggcccagtggaggaacgcttagccctgcatgtccttcagcaacaaggcttggttcctgagcatgtggagtcacggcctctttatagtcctctgcagccagatatcgagcaggggaagctacagatgtggattgacatatttccaaaggtgctgggccggcctggacctcccttcaacatcaccccacggaaagctagaaggttttttctgcgttgtattatttggaacacaaaagatgtgatcttggatgacctcagtctcacgggggagaagatgagtgacatctatgtgaaaggctggatggtgggattcgaagaacacaagcagaagacagatgtgcactaccgctccctgggtggggagggcaatttcaactggaggttcgtgtttcccttcgactatctgcctgctgagcaagtctgtgctgttgccaagaaggatgccttctggagactcgacaagacagagagcaagatcccagcacgtgtggtcttccagatctgggacaatgacaaattctcttttgatgactttctgggctctctgcagctggatctcaaccgaatgcccaagccagccaagacggctgagaagtgctccttggaccagctggatgacaccttccacccagaatggtttgtgtccctttttgagcagaagacagtgaaaggatggtggccttgtgtgacagaggagggcgagaagaagatgttggcgggcaagctggaaatgaccttggagattgttgcagaaagtgaacatgaagagcggcctgctggccaaggtcgggatgaacccaacatgaatccgaagctagaggatccaaggcgccccgatacttctttcctgtggttcacctccccgtacaagaccatgaagttcatcttgtggcgacgcttccggtgtgccatcatcctcttcatcatcctcttcatcctcctgctcttcctgggtgtctttgtctacgccttcccg

SEQ ID NO: 712 - protein, 941 aa, Mus musculus
YHLRCYLYQARDLPAMDKDSFSDPYAIVSFLHQSQKTVVEKNTLNPTWDQTLIFYEIEIFGEPASIAEHPPCIVVELYDHDTYGADEFMGRCICQPSLERMPRLAWFPLTRGSQPAGELLAAFELIQREKTEDTDLPYPPPQREANIYMVPQNIKPALQRTAIEILAWGLRNMKSYQMASISSPSLVVECGGQTVQSCVIRNLRKNPNFDVCTLFMEVMLPREDLYCPPIVVKVIDNRQFGRRPVVGQCTIRSLENFLCDPYSAESPSPQGGPGKEPLLSWPSHFSLGLAHLDQVTSYLWEEEFIDWWSKFFASVGEREKCGSYLEKDFDTLKVRPLQNALPAQQPSGRARENNNYTLQSPAKGIRARRLSSKEMRVYDTQLENVEAFGGLSDFCNTFKLYRGRTQEETDDPSVIGEFKGLFKIYPLPEDPAIPMPPRQFHQLAAQGPQECLVRIYIVRAFGLQPKDPNGKCDPYIKISIGKKSVSDQDNYIPCTLEPVFGKMFELTCTLPLEKDLKITLYDYDLLSKDEKIGETVIDLENRLLSKFGARCGLPQTYCVSGPNQWRDQLRPSQLLHLFCQQHRIKAPVYRTDRVTFQDKDYTIEEIEAGRLPNPHLGPVEERLALHVLQQQGLVPEHVESRPLYSPLQPDIEQGKLQMWIDIFPKVLGRPGPPFNITPRKARRFFLRCIIWNTKDVILDDLSLTGEKMSDIYVKGWMVGFEEHKQKTDVHYRSLGGEGNFNWRFVFPFDYLPAEQVCAVAKKDAFWRLDKTESKIPARVVFQIWDNDKFSFDDFLGSLQLDLNRMPKPAKTAEKCSLDQLDDTFHPEWFVSLFEQKTVKGWWPCVTEEGEKKMLAGKLEMTLEIVAESEHEERPAGQGRDEPNMNPKLEDPRRPDTSFLWFTSPYKTMKFILWRRFRCAIILFIILFILLLFLGVFVYAFP

SEQ ID NO: 713 - DNA, 2453 bp, Mus musculus
aagtttgaaactggggttcagagcaagaaaagttcaaagaagaaaagtaacgcaactatattttgtttggtctccatcccagttaaatctgagtcacttgtgctagctacggatacaaacaacaatgactttaagctggttgctgataagacccgagggctgtgccagggttcagccctgcaggagcagagtctgctgagtatgtcttccactgacctggagctgcaagccctcatgggaagcatggcttggagaagaacatctccaaggcaaggtctgagggagtcagaagatggccaaattgatgaccccagaatcctccatctcatcaaacccaaagaacttcaggcttccagcccttggccaggacaccaatacagagatcaacagacccaaaccagtttccatgaagactccaaaagctcacagctcctccctgccacaaagccaggagaggccagcaatgtagctccgaccccaacatgcccagataccactgcctccgaagtatgcctccatacagccttagcattcagtgatcaaaatcagaagcccagtgtacctcacctccaaggacaaacgtcccttagcccgtctcgaaacagtgctttctcaaggacttcctcagccataaaccaggcatctatgtccaaagggacctctgaccagctccctggtgccaaccctgttcccaagccagaggtggtgaagggggagtccacaacaggccagtgcaatagcacacaactcttcggtcagtttctcttgaaaccagttagccggcggccctgggatttgataagtcagttagaaagttttaacaaggaacttcaggaagaggaagaaagccatggtggtagtggtagtgaggacagtgaggcagaacagccagaggactgtgcagattccagaaccaagtcctgggctctccagggaactagaacagcacagcagcctgcagggctggcgctggagaatgtagcttccccagatagaagacttaatgactcacagagctggaatgaagaaccaaagcctggccactcaagtgtccatccacagtccctgggcccatcacaggaggaaggcagcagaggtgttccagtccaatgggcagatggaagcctgactgcagagcagaaaagccaggaggatttgaatgggatgtgtgagcgagactttagcccaaggcctgtgagcaggattgcacccattgacacaaaagcagcccctttatactgtctgtcagaaccaagaggaagtcaagaactcaccaaattcggcgatgctgtagggtctgtgcagctgggcagagagactcccacacaggtgggtaatggtggggacacagaggtcctaccctgtgtccttctgccactggctgacaaatatcgaggccactcaacaccagactttcggtctttagagctcacactgggacaagaacagaatgcctataaattagagtgtctggatttagagaacaccgtggaagtccttccaagtgagtctctgcaggaaagggcagagaggatcctgggcatagaggtggccgtggagtcccttctgccaagtgccaggagaacagaacaaagccagcttcctgagcctgatgcaagtgcctgcaacccaagttcatccagagaggactcatcacacagcttggcactaccagtggggcccaaagtggccactgacgccttctatggcaggaggaagtgtggctggactgagagtcctctttttgtaggagaaagggccccccaggcttctatatgctcagatgtggatggcttccctacaagccaggccaccagtcctgagcctgggaaaaaggatgaggaggcgaaagcacccttcaagtccactctgttccatttcatggaaaagtccacaaatgtggtgggtcctgaaaagaggctcagaaacccttccaaagtggttgagaacttacaagaaaaactggtatcacccccaaaaaaggcagactctgttcacttgataagaatgagggaggtcaactccttgtctcagatgaggtgtctgagctccaagagcgctgactccgtggaggagcctgaccccttaaaggtcatcaaaagttcagcctggctttcagaaggccttacttccctgggtggtaaagacgaagcctggcaagcagggcacctgccctctgtctctcagaatgaaaacggacaccccgaagtgccgagggacaagatgtcagaccaagacttgtggtgtgcagattcctatgatccaagccgagtggagagggtgtgatggctgctggtggagcccccaccacctgctagtggaaagctctctggttggcccacctgtcttgctcaggcagaagctggaaactgtggggtttgcagtgtcccggctcctcctttgcctgccacccctacagaattgttacgaagataaagcagtgatctgctgac

SEQ ID NO: 714 - protein, 761 aa, Mus musculus
KFETGVQSKKSSKKKSNATIFCLVSIPVKSESLVLATDTNNNDFKLVADKTRGLCQGSALQEQSLLSMSSTDLELQALMGSMAWRRTSPRQGLRESEDGQIDDPRILHLIKPKELQASSPWPGHQYRDQQTQTSFHEDSKSSQLLPATKPGEASNVAPTPTCPDTTASEVCLHTALAFSDQNQKPSVPHLQGQTSLSPSRNSAFSRTSSAINQASMSKGTSDQLPGANPVPKPEVVKGESTTGQCNSTQLFGQFLLKPVSRRPWDLISQLESFNKELQEEEESHGGSGSEDSEAEQPEDCADSRTKSWALQGTRTAQQPAGLALENVASPDRRLNDSQSWNEEPKPGHSSVHPQSLGPSQEEGSRGVPVQWADGSLTAEQKSQEDLNGMCERDFSPRPVSRIAPIDTKAAPLYCLSEPRGSQELTKFGDAVGSVQLGRETPTQVGNGGDTEVLPCVLLPLADKYRGHSTPDFRSLELTLGQEQNAYKLECLDLENTVEVLPSESLQERAERILGIEVAVESLLPSARRTEQSQLPEPDASACNPSSSREDSSHSLALPVGPKVATDAFYGRRKCGWTESPLFVGERAPQASICSDVDGFPTSQATSPEPGKKDEEAKAPFKSTLFHFMEKSTNVVGPEKRLRNPSKVVENLQEKLVSPPKKADSVHLIRMREVNSLSQMRCLSSKSADSVEEPDPLKVIKSSAWLSEGLTSLGGKDEAWQAGHLPSVSQNENGHPEVPRDKMSDQDLWCADSYDPSRVERV

SEQ ID NO: 715 - DNA, 5451 bp, Mus musculus
atgctcagtgctttaagtcataagcagattgaagttgaggacaaggaggttctgataagtaatgggtggaagaagaaagttcaccctctgcaaaagagacacagctcttgtgcaaccattatagtccagaatgaattgacttcagaaaccccggcaaaggtcattgttacaggctgtgtgaaagaagtgaatgaaatccataggcaactttttgagtatttggaaaacaacatgaaagttgaaagagcacttaaaatcaaaccatccttgattgttgactatttaaggacagacaagaggctattgtcaaagataaagaaggcacatgtgtatgtgcattttaagcctaaagacaatccaaacagcattttgctaactggctgcaagagcaaagttctagagtgcatgaatctagtcaaggaaatccaggattcagtctgtgtccaaagattccagactgacaaagctggcgtcaggcacttcttcaaagataaagaatcgtattacaaaacggagattggtcgtcagttcggatgcgtcattgaattggaggaggatagagaggagaagggtgaagaggaggatggtgaagaggaggagggtgaagaggagggagaaagcagcattaatgagcagaagtgtcacctacagagggacatagcccccggagtcaaactgttcgtcctcgaggaagacctgagtcggtttcccgtcgatgtggtagtgaatgcagcaaatgagaacctgaagcatatcagcggtctcgcacaggctctctcaaaggccgctggccctgaactccaaacagaatgtgaccagatagtaaaagagggcggcgtggtcctacccggcaatgctgttatctcaaaagcaggcaagctcccttgtcaccacgtcatccatgcggtagggcctcgatggaagggagataaagtcctggagtgtgtgagcctgctaaagaaagtggttagacaaagcctcagtttagctgaggagcacaggtgccgctccatagccatgccagcggtcagcgctgggatctttgactttcccttagaactgtgtgtggcaaacattgtttcagccatcaaggaacacttccagcataagcgagacacacacaccttgaaaaagatttacctggtgggcctacctgccaaggttgccagggcctttgctgaagctgtcaagactacatataaagactccctttcccacacagctttcccatccagtttaaaggctttagtaccacttgggaaaacgccccagaaacagggcagtctgctggtgtcaccagaaggcctgagaatccgcctggtagaagaaggcgtgcagaatgctacgacccatgccattgtgaactctatttccccggatcttaaactcaacaaaggacccctttctcaggccttcttggaaaaggctgggccaaaactccaggaggaattgaccaggtcaggacaaggggtctctgttgatgtgggcacaattcttcaaaccagtggctgtaatctcaacagccgccacgtcttccatgtggtgcctccaccttggaaaagcaacaacagtgcatggtcactaaagatcatgaaaaacatcatccgtgactgcctgaagaccaccgagaacctgtctctacaatcgattgcatttccagcaataggaacgggaaatttgaggtttcctaaacctgaatttgctaaattaataatttcagaagtgctcaaatttagtagcaggaaccaactgaaaactttacaagaggttcagtttctgctgcacccgaaagaccatgaaaacattcaggcattttcagatgaatttgacaagagaaataatggagatcctagtgacaaaaatcccaaggctgaagacacacaaggtatctatgggagcctttccagccctactttaggaatgcatgaaatgaatattggtccaatcctcttccaagtggccactgggaacatcatcaaagaagtggcagatgtgattgtcaattcaacaacactcacatttgatctcaaatcaggggtctccaaagcaattttggaaggtgcaggacaaaatgtggagcaagaatgttctctcttggctaaacagagtaaccatgggtatatagtcactggaggtggactattgcaatgtaagaacattattcatgttgttggtgggaatgatgtcaagaaatcggtttcctgtgttttggaagaatgtgaacaacggaattactcatccatttgcctaccagctattggcacaggaaatgctcaacaggacccaaacgtagtagcaaaagcgataatagatgccattgaagaatttgtccagaaaaaatcagtgcaggctgtgaagagagttaaagttgttatcttccagccccatattctgcaatttttttacgacaacatgaaagaaagagaaggctctccagctccccccaagcagtcgcctgccaagcagtcagtgatgtctaagattgcctcctttcttggctttcccaagcaagcttcccccaaaaagaacaccctggttttggaaaagaaaatagagcacacagttttccaggtatgtggttcaggggtagacagtgtgaacaaaacaatctcctggctaaaggaactgattaccaaagagcagctttcctacaccaatgacgatgagtgtgtcagtgactttgacatggaggagtacgagaaactgaatgagattcagaaggaactgaacatcaccattgagatgaaccagaagaaaacttcgattcaagtttcaggaattagcagagacgtgataaaagctagagatgagattgagggcatgatcaagagcattcgattggctaaagaaaaggaaagccaggcagactacatctctacatatgtggaatggcagtatattgataaaaacatcacacagtgttttgacaaaatgaccaacatgaagttggaggttgcatggaaggccaagaagaaggacacggttgtccaaattcacaatcaggatttcacggtggacttgagcacaaacacagccaccgctccccaaggccagactttcactgttcagcgcctcgtcaaagctgaagctgaaatccctgccaattggagtgacatgaagcaggacaaattgcttctggtgaatctgcaaaccagtgatcccgaatacaacatggtggcaagcgccttccgtcagacctgctcaaactttttcatagagaagattgaaaggattcagaatccagctctttggagaaggtatcaggcatacaaaaaaagtatggatgaaaagaatggcaatgtaagaaatgagaagcatctcttccatgggacagaggctagctctctaccacagctcaacagtaatggatttaaccgcagctatgctgggaagaacgctactgcctacgggaaaggaacctattttgctgtcaaagcttcctattctgcctgtgacacatattccagaccagacaccaatgggagaaagtatatgtattatgtgcgggttctcactggaaactacacgaatggaaacgcgtcactgattgtgcccccctcgagggaccctcaaaatgctgctgacttgtatgacaccgtcacagataatgataaaaatccaagtatatttgtagtgttttatgacaaccaaacgtaccctgagtatcttatcacatttaggcagtaacacttcgaaagacatcggtgttcatgaatctgctgtaagacaagttttagctgttttccttcttaagctttctctaagagcacaaggtctttctttgccgtgggtgtgtttcctccacagtgaaaatgaatctacttgagagccaatcgcttgagaatttaaaacaggtaacagctgtaacttcgttcacctcgaatatgtggaaatatgaacctcgaatctgtggaaaagaacagacttttttgttctggaaggacaccttcagaaagccccacaatcccagctaccaccagtggaatcatgtcagtgcgccactgtgctgtgggacacagcaccactgagccaatggggctgctgtcttccttgctgccaactgaacagattccgggacagagaacgtcgctcttcgctaacagagctgtgttgcgtgggttggacagctccagccagggttatgtacaaactgggtgccggcatgtggcccttggtctgtgtgaactgagcccccaaggagaggcacagctcaatccctggccccaactgccagtgggcccttctaatgttgacaccgatgttcaggctacctagggaatggatgggacggtgcccgctacctctccagtggaaacccttcttctaactgtgtgaaagcgagtgaactctaagggtatcggctaacatctttcctgtggcaggccagcttgtgataacttgaaagctttacgtataagtcagtcatttttctaacttactaacagtatctactggatgtgaattatttcttgtggcgccagagattatcctggaccccacacgagccaggcaaacgcaatggaactatattcccagccctcttcttgtttgaaggcaggatcccactaaattgctctggcaggccttgaactcattatcttcctgttttgtctacctattgggggtgggggttgggctctgtactttttaatttcctcctgtacatttcagactcgacgccatttattgagtgcctggacctttttcaggtagaataagaggtatgttcacatacatgattttgtccccatcaacagtgaattgtaagaattattccattatttcaaggcttaggaacgtgctcagagtacaagaaatgtctttgcctgaggtcaccgaggcaggaactgcagaggcagccaggctaagtctggctcaactgagttacccaccacagagcatggccttgagataagtgtgtgctgcttcagaagttatctcagagggtgtgtgaggcaaacccagatttccttggtttttctcctttctggcactggtgtccactctacctcttattaggcgttttctaggccctgaagctagtgctgtgtaatagcttgggtgatgggggaggatttatgttcccaccataggcatcaaccagtgggcttcaagcagagagagggatccacattgctgtcctatcgacactgaagccttgagaccttggctgctgtgtctaagtggactggcagagactgtggcttgggaggtggcctccccagcactggcactaaggatgaccttacgaagatggatgaagagatggaatgaaagggagaggcttgtttccatttgcttctgttctccagtgatttggttaactcagggcaaggctgaataacactgggatgttacattgaagaatgactagccaaccaatgttacagacactttcattcaaagtaaatatgtcattgtcttcacttcctagtaaagttacataattac

SEQ ID NO: 716 - protein, 804 aa, Mus musculus
MLSALSHKQIEVEDKEVLISNGWKKKVHPLQKRHSSCATIIVQNELTSETPAKVIVTGCVKEVNEIHRQLFEYLENNMKVERALKIKPSLIVDYLRTDKRLLSKIKKAHVYVHFKPKDNPNSILLTGCKSKVLECMNLVKEIQDSVCVQRFQTDKAGVRHFFKDKESYYKTEIGRQFGCVIELEEDREEKGEEEDGEEEEGEEEGESSINEQKCHLQRDIAPGVKLFVLEEDLSRFPVDVVVNAANENLKHISGLAQALSKAAGPELQTECDQIVKEGGVVLPGNAVISKAGKLPCHHVIHAVGPRWKGDKVLECVSLLKKVVRQSLSLAEEHRCRSIAMPAVSAGIFDFPLELCVANIVSAIKEHFQHKRDTHTLKKIYLVGLPAKVARAFAEAVKTTYKDSLSHTAFPSSLKALVPLGKTPQKQGSLLVSPEGLRIRLVEEGVQNATTHAIVNSISPDLKLNKGPLSQAFLEKAGPKLQEELTRSGQGVSVDVGTILQTSGCNLNSRHVFHVVPPPWKSNNSAWSLKIMKNIIRDCLKTTENLSLQSIAFPAIGTGNLRFPKPEFAKLIISEVLKFSSRNQLKTLQEVQFLLHPKDHENIQAFSDEFDKRNNGDPSDKNPKAEDTQGIYGSLSSPTLGMHEMNIGPILFQVATGNIIKEVADVIVNSTTLTFDLKSGVSKAILEGAGQNVEQECSLLAKQSNHGYIVTGGGLLQCKNIIHVVGGNDVKKSVSCVLEECEQRNYSSICLPAIGTGNAQQDPNVVAKAIIDAIEEFVQKKSVQAVKRVKVVIFQPHILQFFYDN

SEQ ID NO: 717 - DNA, 2483 bp, Mus musculus
tcctgtcccccaatactctctccttcacttccagtgaccatgaccgctatcccagattggaagctacagttgctagcccggcggaggcaggaggaggcagcggttcgtggccgcgagaaagcagaacgggatcgcttgtcccagatgccagcctggaagaggggaatcctggaacgacgcagagccaagttgggcctgcctcctggagaggggagccctgtgcctgggaatgctgaggctggacctccagacccagatgaatctgctgtccttttggaggctattggaccagtacatcagaatcgattcatccaaaacgaggtgcttggtgataggaaggctgggcctctggaggttctagaaaggagatcaagtcctggtaatttaagagatcagagtcctaagggaagagagtccagagaagagaggctaagtccccgggagtccagagataggaggctggtgatagggggagcccaagagtcaagttcgaggtctcttcgagactggaggcagagcccagcagaggccagagacctgagttccagaccagcagaggctcagaaatggaggctgagccctggagaaactccagaggagagtctgagattagcgggttctggagatgacagtcccaagagaaaggaggtgttggaaagcattctgagccctggggagcctggtgaccagaaggccagcccgacagatgtccataaatggaatcttgactcaagagaaccccagaaacagagcttgatacagctggaggccacagagtggaggctgaagtccggtgaagagaggaaagactacttggaagggtgtgggagagaggaagagaaattgagttcagggattgttccggtgacaaaggaggttcaagacatcacctcgagcgaagtggagactgctgagcagagacccactgaaagctggaaatggaccctaaactctgggaaggctcgagaacggacgaatacacaaactcagaagccagatcctccagcatcttcaccgaagcacccaggaccttctggtatggaggctgaagaggaggctgagaaggaggaggcggaggctcagagcaggcctctgagagcccagcagaacctctgctctgggccctcccccctcccaccagagcactctgggacggaaggctccagacagcaggaagaggaagcggcagaaccctctggggatcccctcatgagccgtctgttctatggggtgaaaccaggaccgggggtgggggccccccgccgcagtggacacaccttcactgtcaacccacggaggtgtgcgccccctgccagcccagcccctccagtcaaccctgctacagctgatgctgcagggtctggatctgggaagaagcggtacccaactgcagaggagatcttggtgctggggggctacctccgtctcagccgcagctgccttgtcaaggggtcccctgaaagacatcacaaacagctcaagatctcctttagtgagacagccctggagaccacataccaatacccttctgagagctcggtactggaggatctaggcccggagcctgagacccccattgcccccttagcaacccagcctgacgaggaggaggaggaggaggaggaagaggaggagttgcttctgcagcctgggctccagggcgggctgcgcaccaaggccctaatcgtggatgagtcctgccggcggtgaccatcttccagtttgggcgcatacctccttccttccttccttcccgtacctgaagcttctggagtctggatgattcagagccgacagacctggcagggagcctgcctggcagggaagggggttgagcatattctgacttgcttttcccatcccatttctggggcagagccagtagcctaaatttacccctaactcagggtgtttcccgtgggtgacctaagagtgagcatcaagtcctgggttggaactcagaagtgatctggaattgagatggagcaccccctagccctgcagccttccttaactcccagcaactcccggggacctacagacacccctttttctaggtcactaccccttcgtttacagcttccttctctcttgatcacagcctggtttacattaccccccccccccagctcccagtcccacctgcgaagtcccaggtttacaagccatgcctacccacggagagcccccgtgggaccctccaccttcccaccgtttcattgagagtgacttgggaaggtgtgtggccttcttcaactttgctcagtattactgtgcctcggtttcccccaagagggaaggctggggatcctaaccctgaaccccatgaaagttatttaattctgtttctctgtgtggttcatattgaattgaactgcagcgtgggggtgctaaggaagtgcttcgcttccctggcgctcctttgtcagctgcctgatttgtatcgtttttgtaactttccataataaaatggagctcttttc

SEQ ID NO: 718 - protein, 534 aa, Mus musculus
SCPPILSPSLPVTMTAIPDWKLQLLARRRQEEAAVRGREKAERDRLSQMPAWKRGILERRRAKLGLPPGEGSPVPGNAEAGPPDPDESAVLLEAIGPVHQNRFIQNEVLGDRKAGPLEVLERRSSPGNLRDQSPKGRESREERLSPRESRDRRLVIGGAQESSSRSLRDWRQSPAEARDLSSRPAEAQKWRLSPGETPEESLRLAGSGDDSPKRKEVLESILSPGEPGDQKASPTDVHKWNLDSREPQKQSLIQLEATEWRLKSGEERKDYLEGCGREEEKLSSGIVPVTKEVQDITSSEVETAEQRPTESWKWTLNSGKARERTNTQTQKPDPPASSPKHPGPSGMEAEEEAEKEEAEAQSRPLRAQQNLCSGPSPLPPEHSGTEGSRQQEEEAAEPSGDPLMSRLFYGVKPGPGVGAPRRSGHTFTVNPRRCAPPASPAPPVNPATADAAGSGSGKKRYPTAEEILVLGGYLRLSRSCLVKGSPERHHKQLKISFSETALETTYQYPSESSVLEDLGPEPETPIAPLATQPD

SEQ ID NO: 719 - DNA, 3301 bp, Mus musculus
atgaccgctatcccagattggaagctacagttgctagcccggcggaggcaggaggaggcagcggttcgtggccgcgagaaagcagaacgggatcgcttgtcccagatgccagcctggaagaggggaatcctggaacgacgcagagccaagttgggcctgcctcctggagaggggagccctgtgcctgggaatgctgaggctggacctccagacccagatgaatctgctgtccttttggaggctattggaccagtacatcagaatcgattcatccaaaacgaggtgcttggtgataggaaggctgggcctctggaggttctagaaaggagatcaagtcctggtaatttaagagatcagagtcctaagggaagagagtccagagaagagaggctaagtccccgggagtccagagataggaggctggtgatagggggagcccaagagtcaagttcgaggtctcttcgagactggaggcagagcccagcagaggccagagacctgagttccagaccagcagaggctcagaaatggaggctgagccctggagaaactccagaggagagtctgagattagcgggttctggagatgacagtcccaagagaaaggaggtgttggaaagcattctgagccctggggagcctggtgaccagaaggccagcccgacagatgtccataaatggaatcttgactcaagagaaccccagaaacagagcttgatacagctggaggccacagagtggaggctgaagtccggtgaagagaggaaagactacttggaagggtgtgggagagaggaagagaaattgagttcagggattgttccggtgacaaaggaggttcaagacatcacctcgagcgaagtggagactgctgagcagagacccactgaaagctggaaatggaccctaaactctgggaaggctcgagaacggacgaatacacaaactcagaagccagatcctccagcatcttcaccgaagcacccaggaccttctggtatggaggctgaagaggaggctgagaaggaggaggcggaggctcagagcaggcctctgagagcccagcagaacctctgctctgggccctcccccctcccaccagagcactctgggacggaaggctccagacagcaggaagaggaagcggcagaaccctctggggatcccctcatgagccgtctgttctatggggtgaaaccaggaccgggggtgggggccccccgccgcagtggacacaccttcactgtcaacccacggaggtgtgcgccccctgccagcccagcccctccagtcaaccctgctacagctgatgctgcagggtctggatctgggaagaagcggtacccaactgcagaggagatcttggtgctggggggctacctccgtctcagccgcagctgccttgtcaaggggtcccctgaaagacatcacaaacagctcaagatctcctttagtgagacagccctggagaccacataccaatacccttctgagagctcggtactggaggatctaggcccggagcctgagacccccattgcccccttagcaacccagcctgacgaggaggaggaggaggaggaggaagaggaggagttgcttctgcagcctgggctccagggcgggctgcgcaccaaggccctaatcgtgggtaagcggctgcggcctggttggcggagggcgccccctggtgtctgtggtgtggtggtactttgaaggagcttggcctaaactccctgattcctgaaagccaagtacacatgggatctccagatttgaaaaccagagctccctcgttctccagctctctaatctggttaaaaacacccgtgttgggtcagacggcgtggagttggaattccagcttgtctgttactcaggcgtgatcctgaatcaatccgagctcaggcttccacttatctttatgtggggggtgcatgcctgcactcaagggtcagatccaaggccttgagcatactaggcgagtgctctgctgttgattggtagccccagccttcatttatcgttctttaaaatcgagttaacgttgtatcctgggcctccgggtgtgtagctcagtgataagattgctgccttgagctgagaataatgtaatcctatcactcaggcagaggtagatctgtctggtctacacagtgagttccagggcactctggactctaacagattgagacccccagcaccacaaacaatttgatactagtaagttgtcctgaggttgttggaagacttgagtggcttttatcaagcacctaggaccatggctaggtattaaattacttcacctttgctgagatgactgtgaaattaaacaagatgcctagcacagactccagttaactgtgatgctactgttcctggtgacaaggcacgcatccagcccgttacaaagacttctctcataccagccactcttcagttctgggatgcatggggaggctgggggccctctccacttctctgccttgatcacttcttttcctgcagatgagtcctgccggcggtgaccatcttccagtttgggcgcatacctccttccttccttccttcccgtacctgaagcttctggagtctggatgattcagagccgacagacctggcagggagcctgcctggcagggaagggggttgagcatattctgacttgcttttcccatcccatttctggggcagagccagtagcctaaatttacccctaactcagggtgtttcccgtgggtgacctaagagtgagcatcaagtcctgggttggaactcagaagtgatctggaattgagatggagcaccccctagccctgcagccttccttaactcccagcaactcccggggacctacagacacccctttttctaggtcactaccccttcgtttacagcttccttctctcttgatcacagcctggtttacattaccccccccccccagctcccagtcccacctgcgaagtcccaggtttacaagccatgcctacccacggagagcccccgtgggaccctccaccttcccaccgtttcattgagagtgacttgggaaggtgtgtggccttcttcaactttgctcagtattactgtgcctcggtttcccccaagagggaaggctggggatcctaaccctgaaccccatgaaagttatttaattctgtttctctgtgtggttcatattgaattgaactgcagcgtgggggtgctaaggaagtgcttcgcttccctggcgctcctttgtcagctgcctgatttgtatcgtttttgtaactttccataataaaatggagctcttttc

SEQ ID NO: 720 - protein, 521 aa, Mus musculus
MTAIPDWKLQLLARRRQEEAAVRGREKAERDRLSQMPAWKRGILERRRAKLGLPPGEGSPVPGNAEAGPPDPDESAVLLEAIGPVHQNRFIQNEVLGDRKAGPLEVLERRSSPGNLRDQSPKGRESREERLSPRESRDRRLVIGGAQESSSRSLRDWRQSPAEARDLSSRPAEAQKWRLSPGETPEESLRLAGSGDDSPKRKEVLESILSPGEPGDQKASPTDVHKWNLDSREPQKQSLIQLEATEWRLKSGEERKDYLEGCGREEEKLSSGIVPVTKEVQDITSSEVETAEQRPTESWKWTLNSGKARERTNTQTQKPDPPASSPKHPGPSGMEAEEEAEKEEAEAQSRPLRAQQNLCSGPSPLPPEHSGTEGSRQQEEEAAEPSGDPLMSRLFYGVKPGPGVGAPRRSGHTFTVNPRRCAPPASPAPPVNPATADAAGSGSGKKRYPTAEEILVLGGYLRLSRSCLVKGSPERHHKQLKISFSETALETTYQYPSESSVLEDLGPEPETPIAPLATQPD

SEQ ID NO: 721 - DNA, 3333 bp, Mus musculus
gtccccacagatatttgacgatgagcgctgccgccatcaggtagaatacctggggctgctggagaatgtgagagtgcgccgggcagggtttgccttccgccagacctacgagaagtttcttcacaggtacaagatgatctctgagttcacctggcctaaccatgaccttccttcagacaaagaggctgtcaagaaactcatagagcgatgtggctttcaggatgacgtagcttatgggaagagcaaaattttcattcgaacaccccgtacactgttcaccctggaagaacttcgtgcccagatgctcgtcagggttgtcctcttcctacaaaaggtgtggcgtggcaccctggcccgcatgcggtacaagaggaccaaggcagctctgacaataatcaggtactacaggcgctataaagtgaagtcgtacatccacgaggtggccagacgattccacggtgtcaagaacatgagggactatgggaagcatgtgaagtggccaaccccaccaaaagtcctgcggcgtttcgaggaggccctgcagtcgatttttaatagatggagagcatcccaactcatcaagaccatacctgcatcagaccttccccaggtcagggcaaaggttgcagccatggagatgctgaaaggtcaaagggcagaccttggactccagagagcctgggaaggcaactatcttgcttcgaagccagacacacctcagacctcaggcactttcgtcccagttgctaatgagctgaaacgcaaggacaagtatatgaacgttctcttttcctgtcacgtccggaaggtgaatcggtttagtaaggtagaagaccgagcaatttttgtcactgaccgtcacctgtataaaatggaccccactaagcagtacaaggtgatgaagactatcccactgtacaacttgactggtctgagtgtctccaatggaaaggaccaacttgtagtgttccatacaaaagacaacaaagacctcattgtctgcctcttcagcaaacagccaacccatgagagtcgtattggagaacttgttggagtcctggtgaatcatttcaagagtgagaagcgccaccttcaagtgaacgtcaccaacccggtgcagtgcagcctgcacgggaagaaatgcaccgtctctgtggagacccggctcaatcagccacagcctgacttcaccaagaaccgctcgggcttcatcctcagtgtgcccgggaactgactgctgcacatcagaggcctggcccaggggagcaagagcctgagcctggcacaaaaggcaggcaggccctcactcgtcctctgcatccccacactcgttccacctcgatcagcatcccaggagctcagctaatcgctgtctgccctctaatgccactagaaatcagcttgtaagggcctctgctaggcagggctcctctgccttctcatggccctgcccatgagttgtcctacctggctttctgcctctgcctctgccctctcaactttccatacccccgctcaggaaaccaaagaccctcttcagccctctgggctgacagctaaaccacttcccacctcacaagcaactggacggtacctgtagttggcaaaaggccactggccactgctgacctcggcaaagggatgagaggcacagagcccaggatgcagttcctggagcccaaagccacattccttcccctagaggtttggatgctgcatccatgggcgtaggacttagtcctcctctgtgaccccctacctgatgcctccttccccgacatgattgcagtccttgggatctagctccgagcccctcagcataagccctacccccagcagccagccaaagccaccaggtgagcagattcatctgcagagcccaccccccagccatgctcagcctggatccctccttcccagagcctgtccctgggagatctttcgccaccaaggttctaaccgcagactttctaagcacttctctcagagagacgccctgctgctactccgaggagtcggcttcactcacagcccatgcccacagccatcgtaacctgctttcttgcagattgccaggttactaatctgacaccccctttgctgtaagcagtgtcaggacctggtgaggaggtgcaaggagaaggccctgcttggcgtgcccgttcccttaaccctctagctgcacctgcctcctccccactggagacctggaactctcagagagccaacgcacgcaggacccagaggtgggaggtagaacaaagctgcagcaaagaacgtggagtcctggcactgcaggccaggccagggtgcccacctatgccacatacctgcctgctggagccttgcctgagccctgctggcaaagtgcagcatgtttgccagtgtctgcccaggagggagcatgcctgcttcagaggtcttcctgagagccctgctcccagcctgagctgttgaggaggaggcctatgccggcacaggcttgctgtggggaaccctaacatggaaggcttgtaaggggcaggagcgagccacagggctctcagagccaggctcacattctcttcactgttggccagtctctgctccctcatcctcaccctgccaccctaacccactaagtgcctgtgcgcatcctcctatgccttgcccggggcctgagggagtcacctggctggccagggtgggtccagcacctggtctcctaccccgtttgcagagctgtggggatgtttacacacaggaaagtttgcaaccaaactcggttgccgtgctgccctccggaaccgttctcattctccaagcctggtcagctgcccctgcagtggctgctgtgccgccagccaggttttgcggatcgatcgctggtggacctgacagaaccatgtgactgggacctcaccttcccaccccatcactgccccagcatattgctttacactagacatgctcaagtgtgttcatgcacaccagagcaggtcatgccaaaagagttgcaggtcagtgggtggggttctcctcccaccctctgatgtcgtctgggacctctgacccaggccagaacctcccactgaggactgccctgtccatacgcactttcttatgacctagaagtcagtgtgtggccactgagggacctggaattcggggtgtgactgaccacagtaacagcagaggagaggacacagtgattgtatgcatggagtaggggtctcttgagttaatgaaatgcagtttatggtttggtgcatatattcctattttccattaaattaactttatttctaaagcatattttgatttaccatcaagagcaataaagcattaaatctt

SEQ ID NO: 722 - protein, 410 aa, Mus musculus
SPQIFDDERCRHQVEYLGLLENVRVRRAGFAFRQTYEKFLHRYKMISEFTWPNHDLPSDKEAVKKLIERCGFQDDVAYGKSKIFIRTPRTLFTLEELRAQMLVRVVLFLQKVWRGTLARMRYKRTKAALTIIRYYRRYKVKSYIHEVARRFHGVKNMRDYGKHVKWPTPPKVLRRFEEALQSIFNRWRASQLIKTIPASDLPQVRAKVAAMEMLKGQRADLGLQRAWEGNYLASKPDTPQTSGTFVPVANELKRKDKYMNVLFSCHVRKVNRFSKVEDRAIFVTDRHLYKMDPTKQYKVMKTIPLYNLTGLSVSNGKDQLVVFHTKDNKDLIVCLFSKQPTHESRIGELVGVLVNHFKSEKRHLQVNVTNPVQCSLHGKKCTVSVETRLNQPQPDFTKNRSGFILSVPGN

SEQ ID NO: 723 - DNA, 3098 bp, Mus musculus
agaggcgggaccagccgccgccgtctccgtctcgccaccacggcccccacacaacccgcagccaccgcgggaggagcggaagccgccggcctcgcccgttcagagccgcgccggctggagctctgaggagtggcggccgtctctctcgctctctctctctctccggcccgaccccgcccaaaggtgccgagcacccccgccccaacccgagcgctcccacctgagccggcgccatggcggagcaggagagccttgagttcggcaaggcggacttcgtgctgatggacaccgtctccatgcccgagttcatggccaaccttaggctcagatttgagaaaggacgcatctacacattcatcggagaagtggttgtttctgtgaatccatacaaggtgctgaacatctatgggagggacactgtcgagcagtataaaggtcgtgagctttatgagagacctcctcatctctttgctattgctgacgctgcttacaaggccatgaagaggcgatcaaaagacacctgtattatgatatcaggggaaagtggagctggtaaaacagaggccagtaagtacatcatgcagtatatcgccgccatcaccaaccccagccagagagcagagatagaaagagtgaagaatatgttgctgaagtcaaactgcgttttggaagcttttggaaatgccaaaaccaatcgtaatgacaattccagcaggtttgggaaatacatggatatcaactttgacttcaagggagaccccattgggggacatattaataactacttgctggaaaagtctcgtgtgattgtgcagcagcctggagaacggagcttccattctttctatcagctcctccagggaggttctgagcagatgctgcactctcttcacctgcagaagtcactctcatcctacaactacatccgtgtgggggcacagctgaagtcttccatcaatgacgctgctgagttcaaagttgtagctgatgccatgaaagtaattggattcaaacctgaggagattcaaactgtgtataaaattttggctgttattcttcacttgggaaatttaaaatttatagtagatggtgacacgccgcttattgagaatggcaaggttgtgtctgtcatagcagaattgctgtctactaaggcagacatggtggagaaagccctgctttaccggacggtggccacaggccgtgacatcatcgacaaacagcacacggaacaggaggccagctacggcagagacgcctttgccaaggcaatatatgagcgcctcttttgttggattgttactcgcatcaatgacatcatcgaggtcaagaactatgacaccacgatacatgggaaaaacacggttattggtgtcttggatatctatggctttgaaatctttgacaacaacagctttgagcagttctgcattaactactgcaacgagaaactgcagcagctcttcattcagctggtgctgaagcaggagcaagaggagtaccagcgggagggcatcccttggaaacacattgattacttcaacaaccagatcattgtggacctcgtggagcagcagcacaaaggcatcattgcaatcctggatgacgcgtgtatgaatgttggcaaagtcactgacggaatgttccttgaggcccttaacagtaaattgggcaaacatggtcatttttccagccgaaagacctgtgcctcagacaaaatcctggagtttgatcgggactttcgaatccgtcattatgcgggtgacgtggtctattctgccatcggttttatcgacaaaaataaagatactttatttcaagatttcaagcgccttatgtataacagctcaaatcctgtgctgaagaatatgtggcccgaaggcaagctcagcattacagaggtgaccaagaggcctctgaccgctgccaccttgtttaagaattctatgattgctttagtagacaaccttgcttcaaaggagccgtactatgtgcgttgcatcaaacccaatgacaagaagtccccacagatatttgacgatgagcgctgccgccatcaggtagaatacctggggctgctggagaatgtgagagtgcgccgggcagggtttgccttccgccagacctacgagaagtttcttcacaggtacaagatgatctctgagttcacctggcctaaccatgaccttccttcagacaaagaggctgtcaagaaactcatagagcgatgtggctttcaggatgacgtagcttatgggaagagcaaaattttcattcgaacaccccgtacactgttcaccctggaagaacttcgtgcccagatgctcgtcagggttgtcctcttcctacaaaaggtgtggcgtggcaccctggcccgcatgcggtacaagaggaccaaggcagctctgacaataatcaggtactacaggcgctataaagtgaagtcgtacatccacgaggtggccagacgattccacggtgtcaagaacatgagggactatgggaagcatgtgaagtggccaaccccaccaaaagtcctgcggcgtttcgaggaggccctgcagtcgatttttaatagcatcccaactcatcaagaccatacctgcatcagaccttccccaggtcagggcaaaggttgcagccatggagatgctgaaaggtcaaagggcagaccttggactccagagagcctgggaaggcaactatcttgcttcgaagccagacacacctcagacctcaggcactttcgtcccagttgctaatgagctgaaacgcaaggacaagtatatgaacgttctcttttcctgtcacgtccggaaggtgaatcggtttagtaaggtagaagaccgagcaatttttgtcactgaccgtcacctgtataaaatggaccccactaagcagtacaaggtgatgaagactatcccactgtacaacatcagccatgcacactcgtcagccctcaccttgcatctacttctgggaagaactaacttcagaacaatggaatggctgcctcctctagtgaggcaaactgggtacaaagggggcctccaaatgtagcctgaaggggtttttaatcttgaagtaaatatggcaat

SEQ ID NO: 724 - protein, 842 aa, Mus musculus
MAEQESLEFGKADFVLMDTVSMPEFMANLRLRFEKGRIYTFIGEVVVSVNPYKVLNIYGRDTVEQYKGRELYERPPHLFAIADAAYKAMKRRSKDTCIMISGESGAGKTEASKYIMQYIAAITNPSQRAEIERVKNMLLKSNCVLEAFGNAKTNRNDNSSRFGKYMDINFDFKGDPIGGHINNYLLEKSRVIVQQPGERSFHSFYQLLQGGSEQMLHSLHLQKSLSSYNYIRVGAQLKSSINDAAEFKVVADAMKVIGFKPEEIQTVYKILAVILHLGNLKFIVDGDTPLIENGKVVSVIAELLSTKADMVEKALLYRTVATGRDIIDKQHTEQEASYGRDAFAKAIYERLFCWIVTRINDIIEVKNYDTTIHGKNTVIGVLDIYGFEIFDNNSFEQFCINYCNEKLQQLFIQLVLKQEQEEYQREGIPWKHIDYFNNQIIVDLVEQQHKGIIAILDDACMNVGKVTDGMFLEALNSKLGKHGHFSSRKTCASDKILEFDRDFRIRHYAGDVVYSAIGFIDKNKDTLFQDFKRLMYNSSNPVLKNMWPEGKLSITEVTKRPLTAATLFKNSMIALVDNLASKEPYYVRCIKPNDKKSPQIFDDERCRHQVEYLGLLENVRVRRAGFAFRQTYEKFLHRYKMISEFTWPNHDLPSDKEAVKKLIERCGFQDDVAYGKSKIFIRTPRTLFTLEELRAQMLVRVVLFLQKVWRGTLARMRYKRTKAALTIIRYYRRYKVKSYIHEVARRFHGVKNMRDYGKHVKWPTPPKVLRRFEEALQSIFNSIPTHQDHTCIRPSPGQGKGCSHGDAERSKGRPWTPESLGRQLSCFEARHTSDLRHFRPSC

SEQ ID NO: 725 - DNA, 3042 bp, Mus musculus
cttttgtgggcccctgccctgacactcaaaaacctcaattactcagtgccagaggagcaaggggccggcacggtgattggcaacatcggcaaggatgcccgactgcagcccgggcttccgccggctgagcgcggcagcggcagcgggaggagcaagtctggcagttaccgggtgctggagaactccgcaccgcatctgctggacgtggacgccgacagcgggctcctctacaccaaacagcgcatcgaccgtgagtccttatgccgccacaatgccaagtgccagctctccctagaggttttcgctaacgacaaggagatttgcatgatcaaggtagagatccaggacatcaacgacaacgctccctctttcccctcggatcagatagaaatggacatctcagagaacgcggcacccggcacccgcttccccctcacgagcgcacacgacccagacgctggcgagaacgggctccgcacctatctgctcacccgcgatgatcatggcctctttgccctggacgtcaagtcccgcggcgacggcaccaagttcccagagctggtcatccaaaaggcactggaccgcgagctgcagaaccaccacactctggtgctgaccgccctagatggcggggagcctccacgctccgccaccgtacagatcaatgtgaaggtgatcgattccaatgacaacagtccagtcttcgaggctccgtcatacttggtggaactgcccgagaacgctccactgggtaccgtggtcattgatttgaacgccactgatgctgatgaaggtcccaacggagaagtcctctactccttcagcagctatgtgcccgaccgcgtgcgggagctcttctccatcgatcctaaaactggcctgatccgcgttaagggcaacctggactatgaggagaacggcatgttggagatcgacgtgcaggccagagacctaggacctaacccaatcccagcccactgcaaggtcacagtcaagcttatcgaccggaacgataacgcgccgtccattggtttcgtctccgtgcgccagggggcgctgagtgaggccgccccgcccggcacagtcatcgccctagtgcgggtcactgaccgggactcaggcaagaatgggcagcttcagtgtcgggttctaggtggaggagggactggaggtggcctggggggtcccggttccgtccccttcaagcttgaagagaactatgacaacttctataccgtggtgactgaccgtccactggaccgtgagacacaagacgagtacaatgtgaccattgtggcccgggacgggggctcccctccacttaactccaccaagtccttcgccgtcaagattctggatgagaatgacaatccgcctcggttcaccaaaggactttacgtgctccaagtacacgagaacaacattccaggagaatacctcgggtcagtgctagcccaggatcccgacctgggccaaaatgggacagtgtcatactccattcttccttcacacatcggcgacgtgtctatttacacctatgtgtccgtgaaccccactaacggggccatatatgccctacgctcctttaactatgaacaaacgaaggcttttgaattcaaagtactggctaaggactcaggggcgccagcgcacttggagagcaacgccacggtgagggtgacggttttagacgtgaacgacaacgctccagtgattgtgcttcccacgctacagaatgacacagctgagctgcaggtcccgcgcaatgctggcctggggtacctggtaagcaccgtgcgcgccctggacagcgactttggagagagcgggcgcctcacctatgagatcgtggatggcaacgatgaccacctgtttgagatcgatccgtccagcggcgagatccgcacgctgcaccccttctgggaggatgtgaccccagtggtggagcttgtggtgaaggtgaccgatcatggcaagcccaccctttccgctgtggccaaacttatcatccgctcagtgagcggctccctgcctgaaggggtaccgcgagtgaatggcgagcagcaccactgggacatgtccctgcctctcatagtgacactgagcacgatttctatcatcctcctagcggccatgatcaccatcgctgtcaagtgtaaacgggaaaacaaggagattcgcacttacaactgccgcatcgccgagtacagccaccctcagctaggcggggggaagggcaagaagaagaaaatcaacaaaaacgatatcatgctggtgcagagcgaggtggaggagaggaacgccatgaacgtcatgaacgtggtgagcagtccctccctggccacctcccctatgtacttcgactaccaaacccgcctgcccctcagctcgccccggtcagaggtgatgtatcttaagccagcctccaacaacctgactgtcccgcaggggcacgcaggctgccacaccagcttcaccggacaagggactaattcgagcgagacccctgccactcggatgtccataattcagacagacaattttcccgcagagcccaattacatgggcagcaggcagcagtttgttcaaagtagctccacgtttaaggacccagaaagagccagcctgagagacagtgggcacggggacagcgatcaggcggacagtgaccaagacactaacaaaggctcctgctgtgacatgtcggttagggaggcactcaagatgaaaactacttcaactaaaagtcagccactcgaacaagaaccagaagagtgcattaattgcacagatgaatgccgagtgcttggtcattctgataggtgttggatgccacagttccctgcagccaatcaggctgaaaatgcagattaccgcacaaatctctttgtacccacagttgaagctaatgttgagactgagacttacgaaactgtgaatcccactgggaaaaagactttttgtacatttggaaaagacaagcgagagcacactattctcattgccaatgtgaaaccttatttaaaagccaaacgtgccctg

SEQ ID NO: 726 - protein, 1014 aa, Mus musculus
LLWAPALTLKNLNYSVPEEQGAGTVIGNIGKDARLQPGLPPAERGSGSGRSKSGSYRVLENSAPHLLDVDADSGLLYTKQRIDRESLCRHNAKCQLSLEVFANDKEICMIKVEIQDINDNAPSFPSDQIEMDISENAAPGTRFPLTSAHDPDAGENGLRTYLLTRDDHGLFALDVKSRGDGTKFPELVIQKALDRELQNHHTLVLTALDGGEPPRSATVQINVKVIDSNDNSPVFEAPSYLVELPENAPLGTVVIDLNATDADEGPNGEVLYSFSSYVPDRVRELFSIDPKTGLIRVKGNLDYEENGMLEIDVQARDLGPNPIPAHCKVTVKLIDRNDNAPSIGFVSVRQGALSEAAPPGTVIALVRVTDRDSGKNGQLQCRVLGGGGTGGGLGGPGSVPFKLEENYDNFYTVVTDRPLDRETQDEYNVTIVARDGGSPPLNSTKSFAVKILDENDNPPRFTKGLYVLQVHENNIPGEYLGSVLAQDPDLGQNGTVSYSILPSHIGDVSIYTYVSVNPTNGAIYALRSFNYEQTKAFEFKVLAKDSGAPAHLESNATVRVTVLDVNDNAPVIVLPTLQNDTAELQVPRNAGLGYLVSTVRALDSDFGESGRLTYEIVDGNDDHLFEIDPSSGEIRTLHPFWEDVTPVVELVVKVTDHGKPTLSAVAKLIIRSVSGSLPEGVPRVNGEQHHWDMSLPLIVTLSTISIILLAAMITIAVKCKRENKEIRTYNCRIAEYSHPQLGGGKGKKKKINKNDIMLVQSEVEERNAMNVMNVVSSPSLATSPMYFDYQTRLPLSSPRSEVMYLKPASNNLTVPQGHAGCHTSFTGQGTNSSETPATRMSIIQTDNFPAEPNYMGSRQQFVQSSSTFKDPERASLRDSGHGDSDQADSDQDTNKGSCCDMSVREALKMKTTSTKSQPLEQEPEECINCTDECRVLGHSDRCWMPQFPAANQAENADYRTNLFVPTVEANVETETYETVNPTGKKTFCTFGKDKREHTILIANVKPYLKAKRAL

SEQ ID NO: 727 - DNA, 2805 bp, Mus musculus
aaaaacctcaattactcagtgccagaggagcaaggggccggcacggtgattggcaacatcggcaaggatgcccgactgcagcccgggcttccgccggctgagcgcggcagcggcagcgggaggagcaagtctggcagttaccgggtgctggagaactccgcaccgcatctgctggacgtggacgccgacagcgggctcctctacaccaaacagcgcatcgaccgtgagtccttatgccgccacaatgccaagtgccagctctccctagaggttttcgctaacgacaaggagatttgcatgatcaaggtagagatccaggacatcaacgacaacgctccctctttcccctcggatcagatagaaatggacatctcagagaacgcggcacccggcacccgcttccccctcacgagcgcacacgacccagacgctggcgagaacgggctccgcacctatctgctcacccgcgatgatcatggcctctttgccctggacgtcaagtcccgcggcgacggcaccaagttcccagagctggtcatccaaaaggcactggaccgcgagctgcagaaccaccacactctggtgctgaccgccctagatggcggggagcctccacgctccgccaccgtacagatcaatgtgaaggtgatcgattccaatgacaacagtccagtcttcgaggctccgtcatacttggtggaactgcccgagaacgctccactgggtaccgtggtcattgatttgaacgccactgatgctgatgaaggtcccaacggagaagtcctctactccttcagcagctatgtgcccgaccgcgtgcgggagctcttctccatcgatcctaaaactggcctgatccgcgttaagggcaacctggactatgaggagaacggcatgttggagatcgacgtgcaggccagagacctaggacctaacccaatcccagcccactgcaaggtcacagtcaagcttatcgaccggaacgataacgcgccgtccattggtttcgtctccgtgcgccagggggcgctgagtgaggccgccccgcccggcacagtcatcgccctagtgcgggtcactgaccgggactcaggcaagaatgggcagcttcagtgtcgggttctaggtggaggagggactggaggtggcctggggggtcccggttccgtccccttcaagcttgaagagaactatgacaacttctataccgtggtgactgaccgtccactggaccgtgagacacaagacgagtacaatgtgaccattgtggcccgggacgggggctcccctccacttaactccaccaagtccttcgccgtcaagattctggatgagaatgacaatccgcctcggttcaccaaaggactttacgtgctccaagtacacgagaacaacattccaggagaatacctcgggtcagtgctagcccaggatcccgacctgggccaaaatgggacagtgtcatactccattcttccttcacacatcggcgacgtgtctatttacacctatgtgtccgtgaaccccactaacggggccatatatgccctacgctcctttaactatgaacaaacgaaggcttttgaattcaaagtactggctaaggactcaggggcgccagcgcacttggagagcaacgccacggtgagggtgacggttttagacgtgaacgacaacgctccagtgattgtgcttcccacgctacagaatgacacagctgagctgcaggtcccgcgcaatgctggcctggggtacctggtaagcaccgtgcgcgccctggacagcgactttggagagagcgggcgcctcacctatgagatcgtggatggcaacgatgaccacctgtttgagatcgatccgtccagcggcgagatccgcacgctgcaccccttctgggaggatgtgaccccagtggtggagcttgtggtgaaggtgaccgatcatggcaagcccaccctttccgctgtggccaaacttatcatccgctcagtgagcggctccctgcctgaaggggtaccgcgagtgaatggcgagcagcaccactgggacatgtccctgcctctcatagtgacactgagcacgatttctatcatcctcctagcggccatgatcaccatcgctgtcaagtgtaaacgggaaaacaaggagattcgcacttacaactgccgcatcgccgagtacagccaccctcagctaggcggggggaagggcaagaagaagaaaatcaacaaaaacgatatcatgctggtgcagagcgaggtggaggagaggaacgccatgaacgtcatgaacgtggtgagcagtccctccctggccacctcccctatgtacttcgactaccaaacccgcctgcccctcagctcgccccggttaaaactggtagagacaacaccctctcctctttttcttcatgtgtatttcagtagctccacgtttaaggacccagaaagagccagcctgagagacagtgggcacggggacagcgatcaggcggacagtgaccaagacactaacaaaggctcctgctgtgacatgtcggttagggaggcactcaagatgaaaactacttcaactaaaagtcagccactcgaacaagaagagtgcattaattgcacagatgaatgccgagtgcttggtcattctgataggtgttggatgccacagttccctgcagccaatcaggctgaaaatgcagattaccgcacaaatctctttgtacccacagttgaagctaatgttgagactgagacttacgaaactgtgaatcccactgggaaaaagactttttgtacatttggaaaagac

SEQ ID NO: 728 - protein, 935 aa, Mus musculus
KNLNYSVPEEQGAGTVIGNIGKDARLQPGLPPAERGSGSGRSKSGSYRVLENSAPHLLDVDADSGLLYTKQRIDRESLCRHNAKCQLSLEVFANDKEICMIKVEIQDINDNAPSFPSDQIEMDISENAAPGTRFPLTSAHDPDAGENGLRTYLLTRDDHGLFALDVKSRGDGTKFPELVIQKALDRELQNHHTLVLTALDGGEPPRSATVQINVKVIDSNDNSPVFEAPSYLVELPENAPLGTVVIDLNATDADEGPNGEVLYSFSSYVPDRVRELFSIDPKTGLIRVKGNLDYEENGMLEIDVQARDLGPNPIPAHCKVTVKLIDRNDNAPSIGFVSVRQGALSEAAPPGTVIALVRVTDRDSGKNGQLQCRVLGGGGTGGGLGGPGSVPFKLEENYDNFYTVVTDRPLDRETQDEYNVTIVARDGGSPPLNSTKSFAVKILDENDNPPRFTKGLYVLQVHENNIPGEYLGSVLAQDPDLGQNGTVSYSILPSHIGDVSIYTYVSVNPTNGAIYALRSFNYEQTKAFEFKVLAKDSGAPAHLESNATVRVTVLDVNDNAPVIVLPTLQNDTAELQVPRNAGLGYLVSTVRALDSDFGESGRLTYEIVDGNDDHLFEIDPSSGEIRTLHPFWEDVTPVVELVVKVTDHGKPTLSAVAKLIIRSVSGSLPEGVPRVNGEQHHWDMSLPLIVTLSTISIILLAAMITIAVKCKRENKEIRTYNCRIAEYSHPQLGGGKGKKKKINKNDIMLVQSEVEERNAMNVMNVVSSPSLATSPMYFDYQTRLPLSSPRLKLVETTPSPLFLHVYFSSSTFKDPERASLRDSGHGDSDQADSDQDTNKGSCCDMSVREALKMKTTSTKSQPLEQEECINCTDECRVLGHSDRCWMPQFPAANQAENADYRTNLFVPTVEANVETETYETVNPTGKKTFCTFGKD

SEQ ID NO: 729 - DNA, 3343 bp, Mus musculus
cccgctcgccgttagggaggctctgcgcctcagccgccaccgcctccgcctccgcctccgccgctcccgcccacttctccgcgtctgccgccgccgctgcccggggtctccggggggtcgctaccgggctggccccgcgccactgcagtcgcttcagcctcgcgctagaggccgcttcaggaggagacccgccggccgccgtgccacttagggcctcagttctcgcctcgtcgacgtcgccaagggttctggaaaagcggccaaggccggggaacggggcttcgcggttccaacgattaagttctgaagtactgatcgagttctgcgtttcttcaatgaggaactacaggctgatcttctgccataatctcaaacagccataaatgacagaacgatgcttgctcagtgagggaagctggtgcagaagccgtgttttaaacttaggtgtttaagtactcaaagaaaagacagctttgatttctggctgcaaaaaagctatgaggaagagctcctccccttccttgagtaactgcaactccgatcttgctagcaaaatatttggaattccacttgatgagctgcagcagggaggacatccagacaatgaggttccgttcatagtccgccacgttgtggactatattgaggaacatggaggtctggagcaacaagggctgtttcaagtcaatgggaatgctgagacagtggagtggcttcggcagagatacgacagtggagaagaggtggacttggttaaggaagcggacgtcccctcagccattagtctccttaggtttttcctgcaggagctccctgagcccgtcatacctggcagcttgcatattcacttgctgcagctttctcaagattataataatgaagatgaatttggaagaaagttgaggttcctcttgcaacagcttccacctgttaattacagtttgttaaagtttctgtgtaggtttttagccaatgtagcatcacatcatgaagaaatttggtctgcaaattctttggctgctgtttttggtccagatgtcttccacatttacacggatgtggaagatatgaaagagcaggaaattgtgagcaggataatggcgggacttctagaaaattattacgagttttttgagaatgaagaggaagatttttcatcaaatgatttgagttcaattactgagcaggttaatgaactttctgaggaagaagaggaagatgaaaagctggagcatatagaagaacttccagaagaaggtgtagaaaagtcagctggcatgccagaggtgctgcagttaaggatgactgaaaaccttctggactcagacagtgttacagcatcaacaaggattgatgctgctgctgctactactactaatgccagtgatggtaacattaagtgttcaaaacctgtggctggtactactgcagataatgaagtcatgcagcaagattttgtatttgaggatcagaaaaataatgagtctgtaggtatactgttagagccttgtagtgaccacggggatagtgaagatggctgtcctgagaggaaggaatatttattatgtgacagtgataaattgccgcacttgattctggattctagtagcaagatacgtgatttgaatgccaacactgaattggaagtaacggaaggtcagagtgttggtgttcaaggagaagcagcgtgtatacagattgcgcagttagatctgaagaacgtttctgatggtgataaatgggaagagccgtttcctgcatttaagtcttggcaggaagactgtgagtctggagaagctcagctgtctccacaggctgccaggatgactcaccaccccctgggagaggactgccctccagtattatctcatcgtagtttagattttgggcaaagccaacgtttcctacatgatccagaagcgttggatttctcgtcaaaggcactttccttcactagaattcgaaggtcatccttcagttcaaaagatgagaaaagagaagacagaacaccatatcagttggtcaagaaacttcagaaaaaaatcagacaattcgaggagcaatttgaaagggaaagaaatagcaagccctcctacagcgacattgcagccaatccgaaggtattaaaatggatgacagagcttacgaaattgcggaagcaaattaaagatgcaaaacacaaaaactctgatggagaatttgcgcctcagacacgtcctcggagtaacactctgccaaaaagttttggctcttctctagaccatgaggacggcgagagtgaaggtgagcccagagtcattcagaaagagaagacgccatcgaaagaagcaactcttgagctgattaccaaacggttgaaggagaaccgtgccgagcggcaccttcctgaggatatcaagaaaatgacaaaagatcatttgatagaagagaaaacgtctctgcagaaaagtctgctttactatgaaagtcaacacggaaggccggtgaccagggaagaaaggcacattgttaagcctctctatgatagatacaggcttgtaaaacagatgctgacaagagctagcattactcctgtccttggttctccttccacgaagcgccggggtcagatgttacagccaatcatagaaggagaaacggcacacttttttgaagaaatcaaggaagaagaagaagatggtgtcagcctctcctctgagttaggtgacatcttgagcacaagcgtgcacacacagtcgtccttggaaaacttagaatctgatgctgaagaaaatcaagaaaaactggctcgggatctctgcttatcaagtacccgggcagcttctgtgcctgaattactggaacaactttggaaagccagagctgagaaaaagaaactacgtaagatgctacgggagtttgaagaagcgttctatcaacaaaatggaaggaatgcccagaaggaggatcgtgttccggtgcttgaggaatataaggaatacaagagaatcaaagccaagcttagacttcttgaagttcttatcagcaaacaagactcttcaaaatccatataaaatatgttccttgaaagttgacgccataaagtgcttgtgttccctgacagttcaccatgtgtgcttggctgtacttgcgttcactttgtcaggcactcagagagtcccattgtgtgcttgtttgtggttccagtaggcaaggaaagctgttccacattcccgcagatcctctccacacttaggaaacacgcaggctccttcattgttttactgcagacacggctgttagcaaaggacaagagttttactcttttacttcaagaactttgaaataaaaagctcttctgttt

SEQ ID NO: 730 - protein, 851 aa, Mus musculus
MRKSSSPSLSNCNSDLASKIFGIPLDELQQGGHPDNEVPFIVRHVVDYIEEHGGLEQQGLFQVNGNAETVEWLRQRYDSGEEVDLVKEADVPSAISLLRFFLQELPEPVIPGSLHIHLLQLSQDYNNEDEFGRKLRFLLQQLPPVNYSLLKFLCRFLANVASHHEEIWSANSLAAVFGPDVFHIYTDVEDMKEQEIVSRIMAGLLENYYEFFENEEEDFSSNDLSSITEQVNELSEEEEEDEKLEHIEELPEEGVEKSAGMPEVLQLRMTENLLDSDSVTASTRIDAAAATTTNASDGNIKCSKPVAGTTADNEVMQQDFVFEDQKNNESVGILLEPCSDHGDSEDGCPERKEYLLCDSDKLPHLILDSSSKIRDLNANTELEVTEGQSVGVQGEAACIQIAQLDLKNVSDGDKWEEPFPAFKSWQEDCESGEAQLSPQAARMTHHPLGEDCPPVLSHRSLDFGQSQRFLHDPEALDFSSKALSFTRIRRSSFSSKDEKREDRTPYQLVKKLQKKIRQFEEQFERERNSKPSYSDIAANPKVLKWMTELTKLRKQIKDAKHKNSDGEFAPQTRPRSNTLPKSFGSSLDHEDGESEGEPRVIQKEKTPSKEATLELITKRLKENRAERHLPEDIKKMTKDHLIEEKTSLQKSLLYYESQHGRPVTREERHIVKPLYDRYRLVKQMLTRASITPVLGSPSTKRRGQMLQPIIEGETAHFFEEIKEEEEDGVSLSSELGDILSTSVHTQSSLENLESDAEENQEKLARDLCLSSTRAASVPELLEQLWKARAEKKKLRKMLREFEEAFYQQNGRNAQKEDRVPVLEEYKEYKRIKAKLRLLEVLISKQDSSKSI

SEQ ID NO: 731 - DNA, 4617 bp, Mus musculus
gcagctggggtggtgggcactgtgcgatggcgggggctgagggactcatggctgaagtaagctggaagctcttggaacgaagagcccgggccaagcgctcaggttttaaaattggtgtagtttagcgtgcaacgcttatgataagaatcaacagtttgaaatggccaactcacctgatgcagccttctcttcacctgctttgttaaggtctggctcagtttatgaacctcttaaaagcattaatcttccaagacctgataatgaaactctatgggataagttggatcattattacagaattgtcaagtcaacgatgctgatgtatcaaagtccaactaccggtctctttcctactaaaacatgtggtggagaagagaagtccaaagtgcacgagagtctgtactgtgctgcgggtgcctgggccttggcgctagcatacaggcgcattgatgatgacaagggacggacccatgagctggagcactcggccataaagtgtatgagaggaattctctactgctacatgcggcaggctgataaggtccaacagtttaaacaagatccccggcccacaacatgtcttcactctgttttcagtgtgcacactggggatgagttgctcagctatgaagaatatggccatcttcagataaatgcagtctcactctttctcctttacctggtagaaatgatttcctcaggcctccagataatctataacacggatgaggtttcttttattcaaaaccttgtattttgtgtagagagagtttaccgtgttcctgactttggtgtctgggaaagaggaagcaaatataacaatggtagtaccgaactgcactcaagctctgttggtttagcaaaagcagccttagaagcaattaatggatttaacctctttggaaaccaggggtgttcctggtcagttatatttgtggatctcgatgctcacaaccgcaacaggcagacattgtgctcactgttacccagagaatcacgctctcataacacagatgctgccctgctcccgtgcatcagttaccctgcgtttgccttggatgatgaagcactgttcagccagacacttgataaagtgataagaaaattgaaaggaaaatatggatttaagcgtttcttgcgagatgggtacagaacgccattggaagatcccaacagacgctattacaaaccagcagagattaagctgtttgatggcattgaatgtgaatttcccatattcttcctttacatgatgatcgatggtgtttttagaggcaatcttgaacaagtcaaggaatatcaggaccttttgacacctttgcttcatcagaccacagaaggatatcctgttgtgccaaagtactattatgtgccagctgactttgtagaatgtgaaaaaagaaaccctggtagtcagaagcggtttccaagtaactgtggccgtgatgggaagttgtttctttggggacaagctctttatatcattgcaaaactcctagctgatgagttaatcagccctaaagacattgaccctgtccagcgctttgtcccacttcagaatcaacgtaacgtgagcatgagatactccaatcagggcccactggaaaatgacttggtggttcatgtagcacttgtagcagaaagccaacgccttcaagtttttctcaatacatatggtattcaaacccaaactcctcagcaggtggaacccattcagatctggcctcagcaggagcttgtaaaagcttatttccacctgggaatcaatgaaaagttgggtctgtctggaaggccagataggcccattggctgccttggtacatcaaagatttatcgcattctaggaaagactgtggtttgttaccctatcatctttgacctgagtgatttctacatgtctcaggacgttctgctgctcatagatgacataaagaacgcactacagttcattaagcaatattggaaaatgcatggacgcccactttttcttgttctcatccgagaagacaacataagaggtagcagattcaacccaatattagacatgctggcagcctttaaaaagggaataattggaggagtcaaagttcatgttgatcgtttacagacattgatatccggagctgtagtagagcagcttgactttctacgaattagtgacacagaaaagcttccagaatttaagagctttgaagaactagaatttcctaagcattcaaaagtcaaacggcagagcagtaccgcagatgctcctgaggcgcaacacgagccaggcatcaccattaccgagtggaaaaacaaatccacccacgaaatccttcagaagctgaatgactgcggttgtctggctggtcaaaccatcctgctgggtatactgctcaaaagagagggccctaactttatcacaatggaaggaactgtgtctgatcacattgagagagtgtatagaagagctggcagcaaaaagctttggtcggttgtacgccgtgcagcaagtcttttaaataaagtagtggacagcctggccccatccattactaatgttttagtgcagggcaaacaggtaactctaggtgcctttggacatgaagaggaggtcatctctaacccactgtctccaagagtgattaagaacataatctattataagtgcaatacccacgatgagagggaggcagtcattcagcaagaactggtcatccacatcggctggatcatctccaacagccctgagttgttcagcggcatgctgaaaatacgcattgggtggatcatccacgccatggagtatgaactgcaggtccggggcggggataagccagctgtggacttgtaccagctctcgcccagtgaagtgaagcagctgctgctagacattctccagcctcaacagagtggaagatgttggttgaatagacgtcagattgatgggtcattgaatagaacacccccggaattctatgaccgagtgtggcagatcctggaacgcacacctaatggtatcgttgtagctggaaagcatttgccacagcaaccaactttgtcggatatgaccatgtatgagatgaatttttctctccttgttgaagatatgctgggaaacattgaccagccaaagtatagacagatcatagttgagttactaatggtcgtatccattgtgctggaaagaaaccctgaactggagtttcaagacaaagtggatctggacagactggttaaagaagcgtttcatgagtttcaaaaagatgagagtcggctaaaagaaatcgaaaaacaagatgatatgacttccttttacaacacgcccccactgggaaaaagaggaacctgcagctacttgacgaaggttgtgatgaactcactgctcgagggagaagtcaagcccagcaatgaggactcctgcctggttagctagtgcggctggtcctgtagggagcataggtgatggttttccagctgtgccttttgtgttgacattaaccagacagccattagtgagtgaacagatgtgttagtgtggtgggtgctgtattctgtttgtcatgattggacctttgcatgcaggtggcattcgaatggtaagcaatgattgaaatcaagcggaacccgtttccatgatttgtaccagcaactctaatcttcactgaaccatagaaatagtttatgaatcgaaaattcacaactgcatgttttgtgatcaaatattccatcaaaattctgagtcttcgcttctttagacttcattttgaccttcctgtattagaacaagcctggcaagggctgatgctgtcctgggactcacaaggtactggaggatggtgatggctatgcctctgttgtaccacaaaaccgagacgtgtaacacacatcagaaaaacaaaattagcccctggtatttaacttaagaagcttcattgttaataataccatgttgtacagaactgttagatggtttttaccttgtaaacatgactgtagttttgtattgagctgcatataagggttggactaaaatataatatatcaagcattttctgagcatctgttaaatataggaatacagaagtgccagtcagacagagctgggaatcatgatacaatccagccttaaaaattagacaaagataagaagtagattacttgtcttagtgtgttaagagaagttatgataagatggtccggatgaagccatctgtaaaacctaagcctgaaaaaacagtcatgaagcccatgcagaaagagtaacttctggtggttgatgggcagggaagagaaattaaagaacgagagggaggaaaagcccttgaaatatttaaaacttgttaaaattcagaagaaagtaaacacttgtatccttaagaattaaattttttgattagctgagcaaagttgcaagggaaacgctgtcttagttaaaatagacatcacttgcaagtctgtttctgaatgagcagttagcttcctattacatatgcaaagtttggagctttcttctgctgcttgaaagcattcgaaatcagcaactgtgcgtcagctttttaaattgtgaaatgcaaaatttattgttctgcaagatattttgggatgatcaataaatcttgatgttcctccatc

SEQ ID NO: 732 - protein, 1085 aa, Mus musculus
MANSPDAAFSSPALLRSGSVYEPLKSINLPRPDNETLWDKLDHYYRIVKSTMLMYQSPTTGLFPTKTCGGEEKSKVHESLYCAAGAWALALAYRRIDDDKGRTHELEHSAIKCMRGILYCYMRQADKVQQFKQDPRPTTCLHSVFSVHTGDELLSYEEYGHLQINAVSLFLLYLVEMISSGLQIIYNTDEVSFIQNLVFCVERVYRVPDFGVWERGSKYNNGSTELHSSSVGLAKAALEAINGFNLFGNQGCSWSVIFVDLDAHNRNRQTLCSLLPRESRSHNTDAALLPCISYPAFALDDEALFSQTLDKVIRKLKGKYGFKRFLRDGYRTPLEDPNRRYYKPAEIKLFDGIECEFPIFFLYMMIDGVFRGNLEQVKEYQDLLTPLLHQTTEGYPVVPKYYYVPADFVECEKRNPGSQKRFPSNCGRDGKLFLWGQALYIIAKLLADELISPKDIDPVQRFVPLQNQRNVSMRYSNQGPLENDLVVHVALVAESQRLQVFLNTYGIQTQTPQQVEPIQIWPQQELVKAYFHLGINEKLGLSGRPDRPIGCLGTSKIYRILGKTVVCYPIIFDLSDFYMSQDVLLLIDDIKNALQFIKQYWKMHGRPLFLVLIREDNIRGSRFNPILDMLAAFKKGIIGGVKVHVDRLQTLISGAVVEQLDFLRISDTEKLPEFKSFEELEFPKHSKVKRQSSTADAPEAQHEPGITITEWKNKSTHEILQKLNDCGCLAGQTILLGILLKREGPNFITMEGTVSDHIERVYRRAGSKKLWSVVRRAASLLNKVVDSLAPSITNVLVQGKQVTLGAFGHEEEVISNPLSPRVIKNIIYYKCNTHDEREAVIQQELVIHIGWIISNSPELFSGMLKIRIGWIIHAMEYELQVRGGDKPAVDLYQLSPSEVKQLLLDILQPQQSGRCWLNRRQIDGSLNRTPPEFYDRVWQILERTPNGIVVAGKHLPQQPTLSDMTMYEMNFSLLVEDMLGNIDQPKYRQIIVELLMVVSIVLERNPELEFQDKVDLDRLVKEAFHEFQKDESRLKEIEKQDDMTSFYNTPPLGKRGTCSYLTKVVMNSLLEGEVKPSNEDSCLVS

SEQ ID NO: 733 - DNA, 1257 bp, Mus musculus
atcatctttgacctgagtgatttctacatgtctcaggacgttctgctgctcatagatgacataaagaacgcactacagttcattaagcaatattggaaaatgcatggacgcccactttttcttgttctcatccgagaagacaacataagaggtagcagattcaacccaatattagacatgctggcagcctttaaaaagggaataattggaggagtcaaagttcatgttgatcgtttacagacattgatatccggagctgtagtagagcagcttgactttctacgaattagtgacacagaaaagcttccagaatttaagagctttgaagaactagaatttcctaagcattcaaaagtcaaacggcagagcagtaccgcagatgctcctgaggcgcaacacgagccaggcatcaccattaccgagtggaaaaacaaatccacccacgaaatccttcagaagctgaatgactgcggttgtctggctggtcaaaccatcctgctgggtatactgctcaaaagagagggccctaactttatcacaatggaaggaactgtgtctgatcacattgagagagtgtatagaagagctggcagcaaaaagctttggtcggttgtacgccgtgcagcaagtcttttaaataaagtagtggacagcctggccccatccattactaatgttttagtgcagggcaaacaggtaactctaggtgcctttggacatgaagaggaggtcatctctaacccactgtctccaagagtgattaagaacataatctattataagtgcaatacccacgatgagagggaggcagtcattcagcaagaactggtcatccacatcggctggatcatctccaacagccctgagttgttcagcggcatgctgaaaatacgcattgggtttgggcaagaaattgaaaggtgccagttgtccaaacatccctaaccaagggtttcatggagaaggacgaggagtgtgacaagctctgtggtgctgctccttagtgttctttcgccctgggtggctcagtactccaagtgagaagggaatacttcaaaggctagggcaacccagaaagcatattacaagtggcatataaatatgccctaatccaaaacactctggttgacttctgagcataaagagtaacaaactgttgggaagaatatacagttattatttgttgaatatacagttattatttgtttgctgcagatgcatgggtgtgtaattatgaataaatacagtttctactct

SEQ ID NO: 734 - protein, 314 aa, Mus musculus
IIFDLSDFYMSQDVLLLIDDIKNALQFIKQYWKMHGRPLFLVLIREDNIRGSRFNPILDMLAAFKKGIIGGVKVHVDRLQTLISGAVVEQLDFLRISDTEKLPEFKSFEELEFPKHSKVKRQSSTADAPEAQHEPGITITEWKNKSTHEILQKLNDCGCLAGQTILLGILLKREGPNFITMEGTVSDHIERVYRRAGSKKLWSVVRRAASLLNKVVDSLAPSITNVLVQGKQVTLGAFGHEEEVISNPLSPRVIKNIIYYKCNTHDEREAVIQQELVIHIGWIISNSPELFSGMLKIRIGFGQEIERCQLSKHP

SEQ ID NO: 735 - DNA, 1416 bp, Mus musculus
tcagtcccagtctggactttggcagtggaggttcctgtgctctccggtcgctggaatcgggaacctcgcccgcttcggttcctggtcgcagagaaaggtgcccgcttggcctctctcgccctcgcgagctcttcatccgtttaagttcctagacgccgttgcgtttgcggaccgatctccgttttcagaagggagccatgtcctcggccgccatgtctaaatacgtgaacgacatgtggcccggctctccgcaggagaaagcctcgccgtccacctcgggctcgggccgctccagccgcctgtcgtcgcgctcccgcagccgctcttcgtcccgcagctcccgacgcgactcccgcagctctagccgctcgtcctcgcgcagccacagccggccgcggaggagcagacggtcccgatcccggtcccgcaggcgccaccagcgcaagtacaggcgctactcacgctcgtactcacgcagccggtcgcgctcccgcagccaccgctatcaccgcgacagccgttacgagcggccgcggaggtactacaagtcgccgtcgccctaccgctcccggagcaggtcgcgctcccgcgggaggtcgcagcaccggtggtcgtactacgcgatcactagagggcggcgctactacggcttcggccggacggtgtaccccgaggatcgccccaggtggagggaaagatccagaaccaggtcgcgcagcaggagtagaaccccatttcgcctgagtgagaaagatcgaatggagctactagaaatagcaaaagccaacgcagcaaaagctctgggaacagccaacttcgacttgccagcaagtctccgagccaaggaggcaagccaggggacagctgtttccagcagtgggccaaaggtggagcattcagaaaagcagactgaagatgcaactaaaaataccagtgaaaagtcttctacacaaagaaacatagccttcagctccaataattccgtagcaaagccactgcagaaaacaactaaagctgctgttgaagagaagtcttcaggatcaccaaaaatagataagaaaaaaagtccttacggactgtggatacctgtctaaaggaaaactaagggctggggttgccaaaactgcactttactgaggggtttgtgtccagcattagatcgtctgcctgagtgatcacagcagtaaatgtgattaaaatccattacagaaagagacttaatggggacgttcatggttgaggtttctcttgaagataggaggacacagatgacccagagaattgcatacaggtgggaatcttgtatatatctgtaagtattgtatagaattgcttatatacaaaggtgaattttttaaagacacagttgtacactgaattttgtatatttgttaataaactttttattatttgtct

SEQ ID NO: 736 - protein, 282 aa, Mus musculus
MSSAAMSKYVNDMWPGSPQEKASPSTSGSGRSSRLSSRSRSRSSSRSSRRDSRSSSRSSSRSHSRPRRSRRSRSRSRRRHQRKYRRYSRSYSRSRSRSRSHRYHRDSRYERPRRYYKSPSPYRSRSRSRSRGRSQHRWSYYAITRGRRYYGFGRTVYPEDRPRWRERSRTRSRSRSRTPFRLSEKDRMELLEIAKANAAKALGTANFDLPASLRAKEASQGTAVSSSGPKVEHSEKQTEDATKNTSEKSSTQRNIAFSSNNSVAKPLQKTTKAAVEEKSSGS

SEQ ID NO: 737 - DNA, 2718 bp, Mus musculus
agtcccagtctggactttggcagtggaggttcctgtgctctccggtcgctggaatcgggaacctcgcccgcttcggttcctggtcgcagagaaaggtgcccgcttggcctctctcgccctcgcgagctcttcatccgtttaagttcctagacgccgttgcgtttgcggaccgatctccgttttcagaagggagccatgtcctcggccgccatgtctaaatacgtgaacgacatgtggcccggctctccgcaggagaaagcctcgccgtccacctcgggctcgggccgctccagccgcctgtcgtcgcgctcccgcagccgctcttcgtcccgcagctcccgacgcgactcccgcagctctagccgctcgtcctcgcgcagccacagccggccgcggaggagcagacggtcccgatcccggtcccgcaggcgccaccagcgcaagtacaggcgctactcacgctcgtactcacgcagccggtcgcgctcccgcagccaccgctatcaccgcgacagccgttacgagcggccgcggaggtactacaagtcgccgtcgccctaccgctcccggagcaggtcgcgctcccgcgggaggtcgcagcaccggtggtcgtactacgcgatcactagagggcggcgctactacggcttcggccggacggtgtaccccgaggatcgccccaggtggagggaaagatccagaaccaggtcgcgcagcaggagtagaaccccatttcgcctgagtgagaaagatcgaatggagctactagaaatagcaaaagccaacgcagcaaaagctctgggaacagccaacttcgacttgccagcaagtctccgagccaaggaggcaagccaggggacagctgtttccagcagtgggccaaaggtggaggtaagtgccttcaggaagctgctgccagcatttattaccctttgccagtgaacacaaccctcctggggttctttatatcatttgtccagaacaaaaccttaatctgacaagtatcagcctgtctcacaggaaactgggagacgatggactactttcgtgtcgacacttggacacttggtttgctctttacactacagtaaaaacagtacattgttggtaatactttctctccctctagtctctagagactggagtgttgtcagtagttttcatgtacaccattatgttcccaagtctgtgctcagcatacagtatagtttatctgctttatttctgtcttatagaaatcatgaatgtggtctccagacagtgatgaagaaaatctgttggtaattgatgatgggttcaagtgtcagagtttatgtttacagactaaagcttagccattgttgaagggagttggtgtgcatgctagagttttgggctagggactgtttgtgtaaggcagtgacagctcagcagcctagaggcactgtcatggtgggcatctgtgatctagacgtccttcacatgatatatgcaatatattccagatgttttgagagattacagaagaagaggcctgcttcccttgcagataagtttattacgattctccagaactacagagggtgtgcattggcacactgcagtatataagttaaacctggatcttaaggttaataatttgggctgggatgtaactcagttgtagagaactttgtcagggtgcatagtacctggggttagctcccagcactgtgtagactgggtttagtaccccgctcctatgatcccagcacttgggaggctgtccttggacagctaggggatagatacaagagacttggtctcagaaactgctttatagaaacataaggtaaaaaataactataatgaaggtggtttgtctgtccattgctgagacctcaggggctgcctggtctttgctcaggcaaagaggggctccttgatgagtggattgcaaaagcctcacttctttagatgaagcattttttattgtacttactcaaaatgaggtatatctacaacaggagtcgggtattcgtggggaactgcgcctcccaagtcattctggctaattggaaaacaggctttttttgttgattagctctttaactgtgacaatagatggaatttggtttgtgtatctacagctacatttgtgtacgttgggctttttttttttaaatacaatattttaaaagttaaggctatgtttaaaattctcttcctctttagcattcagaaaagcagactgaagatgcaactaaaaataccagtgaaaagtcttctacacaaagaaacatagccttcagctccaataattccgtagcaaagccactgcagaaaacaactaaagctgctgttgaagagaagtcttcaggatcaccaaaaatagataagaaaaaaagtccttacggactgtggatacctgtctaaaggaaaactaagggctggggttgccaaaactgcactttactgaggggtttgtgtccagcattagatcgtctgcctgagtgatcacagcagtaaatgtgattaaaatccattacagaaagagacttaatggggacgttcatggttgaggtttctcttgaagataggaggacacagatgacccagagaattgcatacaggtgggaatcttgtatatatctgtaagtattgtatagaattgcttatatacaaaggtgaattttttaaagacacagttgtacactgaattttgtatatttgttaataaactttttattatttgtcttg

SEQ ID NO: 738 - protein, 248 aa, Mus musculus
MSSAAMSKYVNDMWPGSPQEKASPSTSGSGRSSRLSSRSRSRSSSRSSRRDSRSSSRSSSRSHSRPRRSRRSRSRSRRRHQRKYRRYSRSYSRSRSRSRSHRYHRDSRYERPRRYYKSPSPYRSRSRSRSRGRSQHRWSYYAITRGRRYYGFGRTVYPEDRPRWRERSRTRSRSRSRTPFRLSEKDRMELLEIAKANAAKALGTANFDLPASLRAKEASQGTAVSSSGPKVEVSAFRKLLPAFITLCQ

SEQ ID NO: 739 - DNA, 2794 bp, Mus musculus
acccagagcaggccagatacctccacctcctcccctgcctggtttctctgtcccctccatgatgggtggtgtggaggagatcattgtggcccaggtcgaccacagcctgggctcagcctgggtccccagtcaccgcagagtgaatccacccacactgagaatgaagaagctgaactggcagaagctgccatccaatgtggcacgagagcgcaactccatgtgggccacactgggcagcccctgcacagccgcagtggagcccgacttctccagcattgagcagctgttctccttccccacggctaagcccaaggagccctctgctgcccccgccaggaaggagcccaaagaagtcacttttctggactccaagaagagcctgaacctcaacatcttcctgaagcaatttaaatgttccaatgaagaagtcaccagcatgatccaggctggagacaccagcaagtttgatgtggaggtcctcaaacagcttctaaagcttcttccagagaagcatgagattgagaacctacgggcgttcactgaggagcgagccaagttgtccaatgctgaccagttctatgttctgctcctggacattccctgctacccgctgcgggtggagtgcatgatgctgtgtgagggaacggccatcgtcctggacatggtgcggcccaaggcccagctggtgctcactgcctgcgagagcctgctcaccagccagcggttgccagtcttctgtcagctgatcctcaaaatcgggaatttcctcaactacggcagccacacgggagatgcagatggtttcaagattagcaccttgctgaagctcacagagaccaagtcccagcagagtcgcgtgacgctgctgcaccacgtgctggaggaagtggagaagagccacccggacctcctacagctatcccgggacctggagccaccctctcaagctgcaggaatcaacgtggagatcatccactcagaggccagtgccaacctgaagaagcttctagaagcggagcggaaggtgtccgcttccatccctgaggtgcagaagcagtacgctgagcgcctccaggccagcattgaggcctctcaggagctggacaaggtattcgacgccattgagcaaaagaaactggagctggctgactacctgtgcgaagacccccagcagctgtccctagaggacacgttcagcaccatgaagaccttccgagacctcttcacccgtgccctgaaggagaacaaggaccggaaggaacagatggcaaaagcggaaaggaggaaacagcagctggcggaggaggaggcccggaggccgagggacgaggatgggaagcctatcaggaaggggcctgggaagcaagaagaggtgtgcgtcatcgatgccctgctggccgacatcaggaagggcttccagctacggaagacagcccggggccggggagacactgaagcaagtggcagagtggcccccgcagatcctccaaaggccacagagcctgcaactgccagcaatcctacccagggcacaaaccaccctgcttcagagcccttggataccacagcagctgacgagccgcagggctgggaccttgtggatgctgtaacccccagcccccagccctccaaggaggaagatggtcctccagccctggagaggcgctcctcctggtatgtggatgccattgacttcctggaccctgaagataccccggatgcccagccctctgagggggtctggccagtgactctgggagatggtcaagctctgaatcccctcgagttctctagcaataagcctcctggagtcaagagctcgcaccaggacgctacggatcctgaagccttgtggggcgtccaccgaaccgaggcagacagcaccagtgagggaccagaggatgaagctcagcgaggacagagcacccacctaccccgcacaggccccggagaggatgaggatggagaggacacagccccagaatctgcacttgacacgtccctggacaggtccttctctgaggacgcagtgacagattcctcagggtctggcaccctccccagggtccaaggccgggtctcaaaggggacgagcaagcggaggaagaaacgtccctcaaggaaccaagaaggcctcaggtccaggcccaaagccaagtgagtgctctcgtcggctcagcacatcggctggatgtgttgcctggagaggctcttcggggccaggctgggactgggcccccgagaaacccaaactccgtgccttacccagccaggatccttgggagccttgggcattgatgctgggacctggcctggcaccctgggccacctgcacgctcttagcccctgcttttgcaaaccactcccaccccctatcgcatgcaccacaggggtggacgggagcctcctgcctggctctagggagatggatcacagacacctgcactggggctgaaacatcccctctcccccaacccccatggctcagttgatttttagctgagtgctgttttctgcatctttattctgctatggctgagttgaggttagtgagggactgagggaatgctcgttggaagtgctgtgggtaggacctggcaggtaggctctagggaacaaataaacaaaaagttcatgtgcacaatgagtggtgaccagaccactgcagctgtcatctcccttggtgtgtgcccagtggggaacaagctgcccctgctcagcccctctcatgtgtgcactgttgagtctgcaggccagcagggattttaaccaataaagagcaaccttgtctgtc

SEQ ID NO: 740 - protein, 666 aa, Mus musculus
MKKLNWQKLPSNVARERNSMWATLGSPCTAAVEPDFSSIEQLFSFPTAKPKEPSAAPARKEPKEVTFLDSKKSLNLNIFLKQFKCSNEEVTSMIQAGDTSKFDVEVLKQLLKLLPEKHEIENLRAFTEERAKLSNADQFYVLLLDIPCYPLRVECMMLCEGTAIVLDMVRPKAQLVLTACESLLTSQRLPVFCQLILKIGNFLNYGSHTGDADGFKISTLLKLTETKSQQSRVTLLHHVLEEVEKSHPDLLQLSRDLEPPSQAAGINVEIIHSEASANLKKLLEAERKVSASIPEVQKQYAERLQASIEASQELDKVFDAIEQKKLELADYLCEDPQQLSLEDTFSTMKTFRDLFTRALKENKDRKEQMAKAERRKQQLAEEEARRPRDEDGKPIRKGPGKQEEVCVIDALLADIRKGFQLRKTARGRGDTEASGRVAPADPPKATEPATASNPTQGTNHPASEPLDTTAADEPQGWDLVDAVTPSPQPSKEEDGPPALERRSSWYVDAIDFLDPEDTPDAQPSEGVWPVTLGDGQALNPLEFSSNKPPGVKSSHQDATDPEALWGVHRTEADSTSEGPEDEAQRGQSTHLPRTGPGEDEDGEDTAPESALDTSLDRSFSEDAVTDSSGSGTLPRVQGRVSKGTSKRRKKRPSRNQEGLRSRPKAK

SEQ ID NO: 741 - DNA, 1677 bp, Mus musculus
ggcatttgcatcaggagcgggtctcagctggagccacaggccggagcctccttgttgctcctctggctcagtggtggcggggacccgagctgctggggcccacgccccgcgcccgccagtcatggtgggtcacctgcatctgcaggccatgggggacacgcgggagcagagccgcgacggcttgctggacagtcccgattcaggactgccccccagtcccagtcctagcccgcccttctacgccctgtcgccaggcaccctggacacccggaccaccactgaagctccagcggctccttccctcttccaaactcccccagctctggagatgaggtcacggttgctgcctgtgttctttggggagagcatcgaggtggacccagaacccgcacatgaaatccgctgcaactctgagatcacctacgcctcagagagatacttccgagacaagatcttctacgctccagtgcccacggtcacggcctacagtgagaccatagtggcggcgcccaactgcacctggcggagctaccgcagccagctgaccctggagcctcgcccacgggccctgcggttcgggagcaccgccatcatcttccccaaactggcccgcagctccttccgcaccaccctgcactgcagcctcggccagcctcggcactggtactcctccagcctgcagctgcggcggtgcggggaccctacgcccggtcccagctgtcctgatgtactctgaggagtccagtctctgaggaggacctgagtgtgggagaggttcaggaaagatggcccggctaccaccacaggttaggctggctgtgccggagctccagcctagaggagtctgtgaatgcatctttcattagcctttagaggctctatggccttaagggcagggccaaacatgtcctggtgtgcccttgaggcaaagatggccctatgtagcacagggcactcagccatggcctggctcgaaacctcattcttggagaggcttgtttccaaaataggccattaaaaaaaaaaaaaaaacgctcattccagctgagaaccgcaggtgcgtgcggaggggttgagctaactttaccttgacctgagatggcaaaggctgggggtacccagaacacattgtctgctgtgcagggcgcagccctccagggcggcccacatgtgccccacaagacgcattccagactagcttagaactcttgagcctcaaagctctctggcaggtgccctgggaggcgtcaaagcaaatgaggggacacggccaataactgcctatggctgactctggacttgagcctatggcagggctcagaaccccaagagaagcggagtctgtttttcttggcctcccgttcttgcttaggatggatcctacagttacaccagtttcccacaacctggtgctgtcccatggtgcccaggctaaaatgagtccccgagtctactttagaggtggagatgtccctttgtctcaattgtccagtagctagaaacctacctactgccgctgtggtggcccagagggaagggacattctttgtggggcaaacagaacctaaatgactgatagatttctgttcatctattagcttatctgaggtgctccctggttaaaagaacagcctaagaaattagtgaattatcttaataaaatatacccacacagcc

SEQ ID NO: 742 - protein, 204 aa, Mus musculus
MVGHLHLQAMGDTREQSRDGLLDSPDSGLPPSPSPSPPFYALSPGTLDTRTTTEAPAAPSLFQTPPALEMRSRLLPVFFGESIEVDPEPAHEIRCNSEITYASERYFRDKIFYAPVPTVTAYSETIVAAPNCTWRSYRSQLTLEPRPRALRFGSTAIIFPKLARSSFRTTLHCSLGQPRHWYSSSLQLRRCGDPTPGPSCPDVL

SEQ ID NO: 743 - DNA, 3696 bp, Mus musculus
cttggtttgcgtggagcgctgcagtcactgtctgtttttctgggcgcgttcggccttttgtggtgggatggctctcggagaggaggcagcgggcggccgccgcagaggggttgtcgtcaccccgggatgcctgtaggaggggtccaagggtcctcacggcttcggtgccttcgttttcctccgtcacagtcgccctgcccgtggaaagcatgagctcggcccgggactccgctttcgagaagcagcatctctggatgtacctgcaggcgctgggcttggatccgagctccagcatcacgttcggcgggaagatggtgccgcacgcgcaccttggagagaatatgtttgacaaactgaaccgtgatgcctttcatatagtttcttattttttgtttaaaacattggatgaggctcttgccaaagaagttttcagagattgctggcctccatttgaccaaaaacttgacatggaattccggaaacattgctgtgaatggttaaaagagatttctgctgaatgtgggagtagttttcctcaagttgttggctcattgcttatgtctcctggtggccctaagtttattcatctgatgtatcattttgcaagatatgttgcaatcaaatatattaaaacaaaatctaacaattctctacattttgcagaaacatttaatgtaaagccacaagatatgcacaagtgccttgccagaagccatgtagcacgtaacagatttttacagattttgcaaagagaacattatgttatgcaaaaataccaggaaaatgtaaatctgtctgttaagcaagtacgaaatgcaagatcagagtgcatgagtctacagaaccaaattaaaaggcaaatggagccatatgatgagaagagtaatacacaagagaagattcaaaaggttcggtccttgtgggcttcagtgaatgagacactcatggttgtggaaaaggagagagacgttattagttcactctttggctttgtcaaccagtatgctttggatggagctcatgttgctgttaatattccaaggctcttacttgacagacttgaggagcagatatgtcggttgcagataggaaatgtttatgaggctggaaaattgaacctcttaacaattattcacttgttaaatgaagtcttgaaaataatgaaatatgaacattgtaaggctggccaagcaggattgacaataaatctccactaccttgaaaaagaaaccaaatttcagagggaaagattatcacatatgaagcatatgaggcataaagtaaaagagaccgtcactgcagtgagacagtctattgctgacaaggagggaaagtggcatatgaagtggaaaggctttcttggcctgtctcctttcagactaattaaagacagacctgcagctgtggatcttttgcctcccatgtctcctcttacgtttgatcctgtgtcagaggaagtatatgcaaagagtatactttttaagtatcctgcttcacttccagattcacataaagaacctaaacaagaaagtggtagcagaagagaagtggataccccaggaagtgtgtgtgatggagctaacagccctgtgccttttcccttacagtgtgccgcgtcctcagatacaaacagttccacactccttgagaaggatccaaatatgaggactcccatagagaaaaccttgacatataagacaatagcagactctgaagaggaagactctcctctatcagatactgcaaagaattcacaaagtagtgtttccagagggactctgccggtgaagaggagtgagccattccagaaagagcaagcccgtctggtagatgaggttgccagagtagttctgtctgattccccacagctctctgagagaaaagaagttgaattggaggagctgattgacactttaatttctaatcccttcttaaccaggaagcaaattccccggactccagagaacttgataactgatattaggagctcatggagaaaagctgttgaaactgaagataacagaagttcagatgggattctagtggatgccagtgctagagaagtgtcgtcagagtcttcatctacactgcataatcagagggaatttagcctggctattttttccccagattttgatcggtcttattttcctgaagagaaagctgtctcagatcagcttaaaggtttacctcagaaacatctggtaacaagtcagatcagagaacccccaacagaagatgtgtcagacttggtaaataagaaaatgatttggaagcaagatttagaatgtgcaaccaccaggctttcagaaactagtcacatggatgtattctcccctgttgtgggcagtggaatagatgtgatgagtagaagtaaagaggactgtgttccagtaccgccggaccactcacaagcttcttgcattgagccttccacacataaaactctgttatgggattcttttcagaggttgagtggtattggtatattacatgaaactcttccagaagttggtcgcctaagtcttaatagttctactagttcagagactagttttaatctggaaccaaagagttatgtgcacagtgatgcttttgcagatgatgtgggaaaaggacaagctattccagaattagattctaatttacaggctcgtctcactagttatgaggctctgaagaaatctcttagcaaaatcagggaagaatcttacctgtctaatcccaagacacttgaacaacacaaagtagaactgagccctgtagccaaagctgtgcaagcagatgatgcacacactgtttgggacactcaggatttgtttattgactacgcaaagccatcttccctcgtgccacttgatggaaaaacacagactgtatcactaactaaagcttttctggtggagcaaaaattgaagaccacagtaccatgtagccttggagaatttctgcctagtttaaaagaagaagaaatctcaagtaagagccttgaagcaagagactctctgatttgacaagatgaagcattttcaagttgatttagctgtgatgcacttaccctgaagtcttgtcactgaactgcagctgatatcatacattggaagtgaattcttttgtcagcatcaaaggagttcagaatgtacttggcttcttataagtgtttaggtctttttttttttttttggtaaatgttatgagtttgaaatatgaagtatttaagaacagaaaatgtcaaattttagaaaacaattttgattcctagaataatcttataagtgaatgacaaatatcatagttatgttaaaaatatctgtcgttaacatgagttagtgcctaacctaatggccactgaataactgcatctttcattttagagaaataaaccattttattggatcttaatggaatattctggtaataacacaaagtgtagtacctttacctttggatggatatttagtcaaagcagcacaccttagattgtaagcaggcttaatgaattctaagtctattggtcctgcagagtgatgttgatgggataaaatgcatgtggttggtgaagaagattggagaaactgacgaaaatgggtaaatagagatgggcagacctttaaagaacactgtcaaactctgtgtactttagactgagaatttaattctatttatatttaacaagaatataaatgcaaaatttac

SEQ ID NO: 744 - protein, 934 aa, Mus musculus
MSSARDSAFEKQHLWMYLQALGLDPSSSITFGGKMVPHAHLGENMFDKLNRDAFHIVSYFLFKTLDEALAKEVFRDCWPPFDQKLDMEFRKHCCEWLKEISAECGSSFPQVVGSLLMSPGGPKFIHLMYHFARYVAIKYIKTKSNNSLHFAETFNVKPQDMHKCLARSHVARNRFLQILQREHYVMQKYQENVNLSVKQVRNARSECMSLQNQIKRQMEPYDEKSNTQEKIQKVRSLWASVNETLMVVEKERDVISSLFGFVNQYALDGAHVAVNIPRLLLDRLEEQICRLQIGNVYEAGKLNLLTIIHLLNEVLKIMKYEHCKAGQAGLTINLHYLEKETKFQRERLSHMKHMRHKVKETVTAVRQSIADKEGKWHMKWKGFLGLSPFRLIKDRPAAVDLLPPMSPLTFDPVSEEVYAKSILFKYPASLPDSHKEPKQESGSRREVDTPGSVCDGANSPVPFPLQCAASSDTNSSTLLEKDPNMRTPIEKTLTYKTIADSEEEDSPLSDTAKNSQSSVSRGTLPVKRSEPFQKEQARLVDEVARVVLSDSPQLSERKEVELEELIDTLISNPFLTRKQIPRTPENLITDIRSSWRKAVETEDNRSSDGILVDASAREVSSESSSTLHNQREFSLAIFSPDFDRSYFPEEKAVSDQLKGLPQKHLVTSQIREPPTEDVSDLVNKKMIWKQDLECATTRLSETSHMDVFSPVVGSGIDVMSRSKEDCVPVPPDHSQASCIEPSTHKTLLWDSFQRLSGIGILHETLPEVGRLSLNSSTSSETSFNLEPKSYVHSDAFADDVGKGQAIPELDSNLQARLTSYEALKKSLSKIREESYLSNPKTLEQHKVELSPVAKAVQADDAHTVWDTQDLFIDYAKPSSLVPLDGKTQTVSLTKAFLVEQKLKTTVPCSLGEFLPSLKEEEISSKSLEARDSLI

SEQ ID NO: 745 - DNA, 3691 bp, Mus musculus
cttggtttgcgtggagcgctgcagtcactgtctgtttttctgggcgcgttcggccttttgtggtgggatggctctcggagaggaggcagcgggcggccgccgcagaggggttgtcgtcaccccgggatgcctgtaggaggggtccaagggtcctcacggcttcggtgccttcgttttcctccgtcacagtcgccctgcccgtggaaagcatgagctcggcccgggactccgctttcgagaagcagcatctctggatgtacctgcaggcgctgggcttggatccgagctccagcatcacgttcggcgggaagatggtgccgcacgcgcaccttggagagaatatgtttgacaaactgaaccgtgatgcctttcatatagtttcttattttttgtttaaaacattggatgaggctcttgccaaagaagttttcagagattgctggcctccatttgaccaaaaacttgacatggaattccggaaacattgctgtgaatggttaaaagagatttctgctgaatgtgggagtagttttcctcaagttgttggctcattgcttatgtctcctggtggccctaagtttattcatctgatgtatcattttgcaagatatgttgcaatcaaatatattaaaacaaaatctaacaattctctacattttgcagaaacatttaatgtaaagccacaagatatgcacaagtgccttgccagaagccatgtagcacgtaacagatttttacagattttgcaaagagaacattatgttatgcaaaaataccaggaaaatgtaaatctgtctgttaagcaagtacgaaatgcaagatcagagtgcatgagtctacagaaccaaattaaaagaatggagccatatgatgagaagagtaatacacaagagaagattcaaaaggttcggtccttgtgggtcagtgaatgagacactcatggttgtggaaaaggagagagacgttattagttcactctttggctttgtcaaccagtatgctttggatggagctcatgttgctgttaatattccaaggctcttacttgacagacttgaggagcagatatgtcggttgcagataggaaatgtttatgaggctggaaaattgaacctcttaacaattattcacttgttaaatgaagtcttgaaaataatgaaatatgaacattgtaaggctggccaagcaggattgacaataaatctccactaccttgaaaaagaaaccaaatttcagagggaaagattatcacatatgaagcatatgaggcataaagtaaaagagaccgtcactgcagtgagacagtctattgctgacaaggagggaaagtggcatatgaagtggaaaggctttcttggcctgtctcctttcagactaattaaagacagacctgcagctgtggatcttttgcctcccatgtctcctcttacgtttgatcctgtgtcagaggaagtatatgcaaagagtatactttttaagtatcctgcttcacttccagattcacataaagaacctaaacaagaaagtggtagcagaagagaagtggataccccaggaagtgtgtgtgatggagctaacagccctgtgccttttcccttacagtgtgccgcgtcctcagatacaaacagttccacactccttgagaaggatccaaatatgaggactcccatagagaaaaccttgacatataagacaatagcagactctgaagaggaagactctcctctatcagatactgcaaagaattcacaaagtagtgtttccagagggactctgccggtgaagaggagtgagccattccagaaagagcaagcccgtctggtagatgaggttgccagagtagttctgtctgattccccacagctctctgagagaaaagaagttgaattggaggagctgattgacactttaatttctaatcccttcttaaccaggaagcaaattccccggactccagagaacttgataactgatattaggagctcatggagaaaagctgttgaaactgaagataacagaagttcagatgggattctagtggatgccagtgctagagaagtgtcgtcagagtcttcatctacactgcataatcagagggaatttagcctggctattttttccccagattttgatcggtcttattttcctgaagagaaagctgtctcagatcagcttaaaggtttacctcagaaacatctggtaacaagtcagatcagagaacccccaacagaagatgtgtcagacttggtaaataagaaaatgatttggaagcaagatttagaatgtgcaaccaccaggctttcagaaactagtcacatggatgtattctcccctgttgtgggcagtggaatagatgtgatgagtagaagtaaagaggactgtgttccagtaccgccggaccactcacaagcttcttgcattgagccttccacacataaaactctgttatgggattcttttcagaggttgagtggtattggtatattacatgaaactcttccagaagttggtcgcctaagtcttaatagttctactagttcagagactagttttaatctggaaccaaagagttatgtgcacagtgatgcttttgcagatgatgtgggaaaaggacaagctattccagaattagattctaatttacaggctcgtctcactagttatgaggctctgaagaaatctcttagcaaaatcagggaagaatcttacctgtctaatcccaagacacttgaacaacacaaagtagaactgagccctgtagccaaagctgtgcaagcagatgatgcacacactgtttgggacactcaggatttgtttattgactacgcaaagccatcttccctcgtgccacttgatggaaaaacacagactgtatcactaactaaagcttttctggtggagcaaaaattgaagaccacagtaccatgtagccttggagaatttctgcctagtttaaaagaagaagaaatctcaagtaagagccttgaagcaagagactctctgatttgacaagatgaagcattttcaagttgatttagctgtgatgcacttaccctgaagtcttgtcactgaactgcagctgatatcatacattggaagtgaattcttttgtcagcatcaaaggagttcagaatgtacttggcttcttataagtgtttaggtctttttttttttttttggtaaatgttatgagtttgaaatatgaagtatttaagaacagaaaatgtcaaattttagaaaacaattttgattcctagaataatcttataagtgaatgacaaatatcatagttatgttaaaaatatctgtcgttaacatgagttagtgcctaacctaatggccactgaataactgcatctttcattttagagaaataaaccattttattggatcttaatggaatattctggtaataacacaaagtgtagtacctttacctttggatggatatttagtcaaagcagcacaccttagattgtaagcaggcttaatgaattctaagtctattggtcctgcagagtgatgttgatgggataaaatgcatgtggttggtgaagaagattggagaaactgacgaaaatgggtaaatagagatgggcagacctttaaagaacactgtcaaactctgtgtactttagactgagaatttaattctatttatatttaacaagaatataaatgcaaaatttac

SEQ ID NO: 746 - protein, 713 aa, Mus musculus
MMRRVIHKRRFKRFGPCGSVNETLMVVEKERDVISSLFGFVNQYALDGAHVAVNIPRLLLDRLEEQICRLQIGNVYEAGKLNLLTIIHLLNEVLKIMKYEHCKAGQAGLTINLHYLEKETKFQRERLSHMKHMRHKVKETVTAVRQSIADKEGKWHMKWKGFLGLSPFRLIKDRPAAVDLLPPMSPLTFDPVSEEVYAKSILFKYPASLPDSHKEPKQESGSRREVDTPGSVCDGANSPVPFPLQCAASSDTNSSTLLEKDPNMRTPIEKTLTYKTIADSEEEDSPLSDTAKNSQSSVSRGTLPVKRSEPFQKEQARLVDEVARVVLSDSPQLSERKEVELEELIDTLISNPFLTRKQIPRTPENLITDIRSSWRKAVETEDNRSSDGILVDASAREVSSESSSTLHNQREFSLAIFSPDFDRSYFPEEKAVSDQLKGLPQKHLVTSQIREPPTEDVSDLVNKKMIWKQDLECATTRLSETSHMDVFSPVVGSGIDVMSRSKEDCVPVPPDHSQASCIEPSTHKTLLWDSFQRLSGIGILHETLPEVGRLSLNSSTSSETSFNLEPKSYVHSDAFADDVGKGQAIPELDSNLQARLTSYEALKKSLSKIREESYLSNPKTLEQHKVELSPVAKAVQADDAHTVWDTQDLFIDYAKPSSLVPLDGKTQTVSLTKAFLVEQKLKTTVPCSLGEFLPSLKEEEISSKSLEARDSLI

SEQ ID NO: 747 - DNA, 4242 bp, Mus musculus
ctcagagggtccaggggatcggggagccctcacccggcagaggcaggaccttgctgtctgctgtccctcagctctttgacacccggttgtttttgccccacagttgggctttggcccaggatcacaggtgactggggtcggggagggagtttggccgccagccggggagtcgcgcgcgtgcgcacgacaccaaccggctcccacgcgccggaactacgctcctggactagagggatggaagagctccgctgccccgaagccaagctggcgccaccagaggtagtcatagctaccgaagccccgccaccctcccttgtggatcgatacttcactcgctggtataaagcggatgttaaaggaaaaccctgtgaggaccactgtatactccagcactccaaccgaatctgtgtcatcacactggcaggatcccatccagttcttcaaagtggcaaagccattcaaaggatttcctatcagatcagtaacaattgcagcagacttgagaacaaagtatctgggaaatttaagcggggggcacagtttctaacagagcttgcacctctgtgtaagatatactgctctgatggagaggaatataccatatctagctgtgttagaggtcgattgatggaggtgaatgaaaacattcttcatcagccatctcttcttcaagaaaagccgtccactgaaggctacattgcagttgtattacccaaatttgaagaaagtaaaagcgtaacagaagggttgctgacacagcaacagtatgaagaggttgtggtaaaacgcactaatgccacagccaccacgccctgagtctttcgatggaggcagcactggattctcagcctacccggcctaacccatcagtgccctgaagacagccagtgtgtatgaagcattcctcgcagccgcctagccgagagagaagcctaaaccttcacctaacctaatttccctcctttgtcttacatcacaagccttgttcccatctgtattcaggctctcagacctgccttgcccaggctcttgctttgtgtgctgggaagcgcacttgtgggtgttcacttgcgtatacgtcagaaaacaacttcaagtgctttttttaaccacagtttctcattggcttggaactttgccagatagctcatgtacttccagggaggtacctgtgttctctgcctcccaccttcccaggctggtattacaagtacacaccaccatgccctcctttatatgggcctggaaacccaaactctgggcttcatgctttcaagttgtattagttactgttcagttgctgtgacaaaataccacaaccaaaagcaacttcacaaagactttatctgggcttgtagtccagaggactagatgactatagcagtgggaaggcaaggtagccagggcaggaagctaagagatcccatccctaccacacaccaagactgctcttggtgaactggaaggagaatgaggttataaacaggccctggtgatacaattccccatcaagactttctgtcctaaaagtcccataagcccccccaaacagtaccaatgactggggaccaagtgttcaaatacctaagtctaaaggggtcatttttcattcaatctacaacattcttcccataatggctataggctcatagtcaggtcatgcaaaatgtagttagtccaatatcaaaagttcccatagccgttaatagtctcagtgctgttccaagatctcttcagagactcaatgcaatgtcttatctcccctgtgaatcagagagccaggaacatacttccaacacacaatggcacagaatatacattcccattccaaaaggaaggggtgatgacatagtgagggaatattggaccaaagagtaaaagcatgatgaaagccagaccctgcagctccatattctctatctaagggtttagtttctgagatgcctctgacccgtccacactgctgcctgtaacagatcattctctggtgattctgctctgtgcagctcttccttggcagatgtctcacaacttgtatttccagtgtcttgggatttgtgccacaacccaaattttaccttgacagcttcacagtggcctctcatggccttgcagaaactctgtctctgccacatgtttcctcagtgactttctgaagccaggaagaatccacttttcattcttgcatcttttatgcctgcaaagctagtaccatgtggaaaataacttgaaaaatagactgtcagcttacagtgcctttcacgtccacggcagctcttgtatggtggtgctttctccaagcgaacagccaggttcttaatgctgtctttcagagtggaggtttatctgaaaggattctctccttgaccaacttccactgtcccagtgttgagcaagagacactttaaaaaactttattgattctctgtgagtttcatatcatgcaccccagtcccactcatctccctgtccctcataatagcccttcacccttgcaatctcctcccaaaataaaagccacacacacacacgaacaaaacaaagcttagataatatctcgtggaaagtagaatatcagagtgtgtcccacagtctatacgtctgtctgtgcatcctcacttgcaaatgttcattgcagtgaatggttggtctggttcgagatctctgactttgtgacaccatcaatattgtatcctcagccaggcgtgatggcgcacacctttaatcccagcactcaggaggcagaggcaggtgggtttctgagttcgaggccagccttgtctacgaagtgagttccaggtcagccagggctatacagagaaaccccgtcttgaaaaaccaaaaagatatattgcatcctcctcgggactcctcccagttattctgttgttgctctgtgtcatggaggtcctgcagctttggagccgcaggactggtcccttcacagattgaggagatttgggggtgggccaattcagagtcctagacctgagcctggcggtagctgagctggccaagaggccacctcttccttatctgtaccacctggaggagccctttttctttcttaaatgtgtgagtgctttgtctgcatgtacattcgcatactagaagagggcatcagattcctttacagatagtcatgagccatcatgtggttgctgggaatttaactcagaacctctggaagaacagtcactgtccttaatcactgagccatctctcctgcccaaaccaggggacttcttaatagccccagtctctaataatagcagcctttctcagtacatgcctcccaggtcattaagtcaatattgagcttctctgtgttctcttcaccaagctgtacacttggtatttacccccaacgtgcttgttttcactgatcaagtctatactgtcttgaaatagctagtggcagagaaatcagaccattactttttaattcagcgtcatgccaaatctcaggacttggatagaaagcaggcagattcttcgtcaagggtcacataaatggcctccagctactttgctaacagagactgtttgcctctaaagccccaggagccagggcctctactgtcaatattattccaagcactatagtcttctaggcttaaaacagcaagtgctgttccacagtgctctcagcattcacccatttttctggtccaaagttccagagttccacatttaaaaaaaaatgccctcatggtcacatttttttcacagcaacactctcacttgttggtagcttctgtattagttgcctatctgttgctgggataaaacaacgtgaccaaaagcttacggcctcagggagctagatgctcatggcagcaggcacaagaagctgcaagaccacacatcagcacaccctgggagcacacagtgaagtagaccttggctgtaaacacaaagcctgcccccaatggcatgcctcctccagcaactctgtatcttaaaagttcataacatcccccaacaacagcgccaccagctagggaccaagtgttcagttacttgagaccaaggcacttttcctccagtctacagcagaaggcaagccctacactgacggagccttttctccagcctcactcttcctctcttgctgctctaacaagtggcaaataaggaatgcttttctgatgagaaaacacaaagctcctgagaaagattgtggttttacagttctgtcaccagggagtaaactgttaataaaccgttcctcgacttttt

SEQ ID NO: 748 - protein, 271 aa, Mus musculus
LRGSRGSGSPHPAEAGPCCLLSLSSLTPGCFCPTVGLWPRITGDWGRGGSLAASRGVARVRTTPTGSHAPELRSWTRGMEELRCPEAKLAPPEVVIATEAPPPSLVDRYFTRWYKADVKGKPCEDHCILQHSNRICVITLAGSHPVLQSGKAIQRISYQISNNCSRLENKVSGKFKRGAQFLTELAPLCKIYCSDGEEYTISSCVRGRLMEVNENILHQPSLLQEKPSTEGYIAVVLPKFEESKSVTEGLLTQQQYEEVVVKRTNATATTP

SEQ ID NO: 749 - DNA, 1293 bp, Mus musculus
atggagtgcgccctggacgcccagagcctgatcagcatctccctgcgcaagatccacagctcccggacccagcgcggcggcatcaagctgcacaagaacctcctggtgtcctacgtgctccgcaacgcgcgccagctctacctgagcgagcgttacgccgagctctaccggcgccagcagcagcagcagcaacagcagccgccccaccaccagcaccagcacctcgcttacgcggcgcccggaatgccggccagcgcggccgacttcggcccgctccaacttggcggcggcggggacgcggaggcgcgcgagccggttgcccggcaccagctgcaccagctccaccagcttcaccagctgcacctccagcagcagctgcaccaacaccaacacccggcgcccaggggctgcacggcggcggcgccggtggcggtggccggggcgcccgcgggctgcgcgggggcgctctcggagctgcccgggtgcgctgcgctccagccgccgcacggcgcgccccaccgcgggcagcacttggagccgctgcagccgggtcccgcgccgctgccgccgcccgcgcccgccgcgctctgcccgcgggaccctcgcgtcccggccgcttgctctgcgccctcggtgcttccgggggctgccccttcgaccgtcgctgcctcctctccgcccgcctctacagccccttcctcatccactggcttctaccggggcgcgtacccggccccctcggacttcggcgtgcactgcagcagccagaccaccgtgctggacctggacactcacgtggtgaccacggtagaaaacggctacttgcaccaggactgctgcgcctccgcccactgcccctgctgtggccagggcgctccgggacccggtctggcgtccgccgctggttgcaagcgcaagtattaccctggccaggaggaagaggacgacgaagaggacgcgggcgacctgggagccgagccccccgggggtaccccattcgccccctgtaagcgcgcccgcttcgaggacttctgcccggactcgtccccggacgcgtccaacatctcaaacttgatctccatctttggctcgggcttctcggggctggtgagccgacagccggactcctcggagcagccgccgccgctcaacgggcagctgtgcgccaagcaggcgctcgccagcctcggcgcctggactcgagccattgtccttctagggacccccgagggcatggggaccctgggccccgcggggctggggccagacaaagactcggccaaggggcgatag

SEQ ID NO: 750 - skipped

SEQ ID NO: 751 - DNA, 1116 bp, Mus musculus
aagccgggcgccctggggttgagcgggcgacgcactatagccgggatgcgcacctgtctgcggttcccgctcccgagcctgcgaagcgaccccatggcaggtagcggtggcctgggcggcggggccggtgacctccagggtgcggggacgggccaggggactgcactgcgtgctctccgtgctccgctggcgctcgtagttctgttgctaagcgcctactgcctcttcgccctccccggccgctgtccacctgccgcccgcgcccctgctccggttcctgcacccgccgagccgccccacacctccctccgtctgagagcacccggcctgccggtggccagcggcccggggcgccggcgctttcctcaggcgctcattgtgggtgtgaagaaaggcggcacgcgcgcattgctggagttcctgcggttgcaccccgacgtccgtgcacttggctctgaaccccacttcttcgacaggtgctatgatcgcggcctcgcctggtaccggggcctaatgccacggaccctggatgggcagatcaccatggagaagacgcccagctactttgtgactcaggaggctccccgccgaatccatggcatgtccccagataccaagctgattgtggtggtgcggaaccccgtgacccgggccatctctgattatgcacagacactctccaagaccccaggcttgcctagcttccgtgccctggccttccgccacggcctgggtcccgtggacacagcctggagtgctgtgcgcattggcctctatgctcagcacttggacaactggctccgctactttcctctgtcccacttcctgtttgtaagcggtgagcgcctggtcagtgatccagctggcgaagtgggccgtgtacaggactttctgggtctcaaacgggttgtcactgacaagcacttctacttcaatgctactaagggcttcccctgcctcaaaaaggcccagggtagtgggagaccccgctgcttgggtaaatccaagggccggcctcacccccgagtgccggaggcagtggttcagcgcctgcaggctttctaccggccattcaaccgcaagttctaccagatgactggccaggactttggctgg

SEQ ID NO: 752 - protein, 372 aa, Mus musculus
KPGALGLSGRRTIAGMRTCLRFPLPSLRSDPMAGSGGLGGGAGDLQGAGTGQGTALRALRAPLALVVLLLSAYCLFALPGRCPPAARAPAPVPAPAEPPHTSLRLRAPGLPVASGPGRRRFPQALIVGVKKGGTRALLEFLRLHPDVRALGSEPHFFDRCYDRGLAWYRGLMPRTLDGQITMEKTPSYFVTQEAPRRIHGMSPDTKLIVVVRNPVTRAISDYAQTLSKTPGLPSFRALAFRHGLGPVDTAWSAVRIGLYAQHLDNWLRYFPLSHFLFVSGERLVSDPAGEVGRVQDFLGLKRVVTDKHFYFNATKGFPCLKKAQGSGRPRCLGKSKGRPHPRVPEAVVQRLQAFYRPFNRKFYQMTGQDFGW

SEQ ID NO: 753 - DNA, 1548 bp, Mus musculus
atgttcagctggctgaagaagggcggggcccggggccagcgacctgaggccatccgcaccgtgacctcatccctcaaggagctgtatcgcacgaaacttcttcccctggaggaacactaccgttttgggtctttccattcaccggcccttgaagatgctgacttcgacggcaaacccatggtgctggtggccggccagtatagcaccggcaaaaccagcttcatccagtaccttctggagcaggaagtccctggctcccgcgtgggtcccgagcccaccaccgactgcttcgtggctgtcatgcatggcgagacagagggcaccgtgcccggaaatgctctcgttgtggacccagagaagcccttccgcaaactcaacccttttggaaacacttttctcaacaggtttatgtgcgcccaactccccaaccaggtcctggagagcatcagcatcatcgacacgcctggcatcctatcaggtgcaaaacagagagtgaaccgtggctacgacttcccagctgtcctgcgctggtttgctgaacgcgtggacctcatcattctctttgatgcccacaagctggagatttccgatgaattctcggaggccatcggtgccttgcgtggccacgaggataagatccgcgtggtactcaacaaggcagacatggtggagacacagcagctgatgcgcgtctacggggcgctcatgtgggcgctgtgcaaggtggtgggcacgcctgaggtccttcgcgtctacattggctccttctggtcccagccgctccttgtgccggacaaccggcgtcttttcgagctggaggaacaggacctcttacgagatatccaaggcctaccgcgccatgcggcgctgcgcaagctcaacgacctagtgaaacgggcgcggctggtgcgggtgagcacatcgggtccgacggaggacccggggaatttaagggaggggcgtggccttgcgaacgtggccctgacctgtgagcttttccattcctcccaccaggagctgttgatggcacatgacttcaccaagttccactcgctaaagccgaagctgctggaggcgctagatgacatgctggcccaagacattgccaagcttatgccgctgcttcggcaggaggagctggagagtgtcgaggctggagtgcagggcggtgcgtttgagggcacccgcatgggccccttcgtggagcggggccctgatgaagcaatagaggatgatgatgccgaatgggtggtgaccaaggacaagtccaaatacgatgaaatcttctacaacttagctcctgctgatggcaagctgagtggctctaaggccaaaacctggatggtgggcacaaagctacccaactctgtgctggggagaatctggaagctgagcgatgtcgaccgacacggcatgctggatgatgaggagtttgccttggccagccacctcattgaggctaagctcgaaggccatggtctacccaccaacctaccccgccgcctggtgccgccttctaagcgacgacagaagggctctgctgaatga

SEQ ID NO: 754 - protein, 515 aa, Mus musculus
MFSWLKKGGARGQRPEAIRTVTSSLKELYRTKLLPLEEHYRFGSFHSPALEDADFDGKPMVLVAGQYSTGKTSFIQYLLEQEVPGSRVGPEPTTDCFVAVMHGETEGTVPGNALVVDPEKPFRKLNPFGNTFLNRFMCAQLPNQVLESISIIDTPGILSGAKQRVNRGYDFPAVLRWFAERVDLIILFDAHKLEISDEFSEAIGALRGHEDKIRVVLNKADMVETQQLMRVYGALMWALCKVVGTPEVLRVYIGSFWSQPLLVPDNRRLFELEEQDLLRDIQGLPRHAALRKLNDLVKRARLVRVSTSGPTEDPGNLREGRGLANVALTCELFHSSHQELLMAHDFTKFHSLKPKLLEALDDMLAQDIAKLMPLLRQEELESVEAGVQGGAFEGTRMGPFVERGPDEAIEDDDAEWVVTKDKSKYDEIFYNLAPADGKLSGSKAKTWMVGTKLPNSVLGRIWKLSDVDRHGMLDDEEFALASHLIEAKLEGHGLPTNLPRRLVPPSKRRQKGSAE

SEQ ID NO: 755 - DNA, 1581 bp, Mus musculus
atgttcagctggctgaagaagggcggggcccggggccagcgacctgaggccatccgcaccgtgacctcatccctcaaggagctgtatcgcacgaaacttcttcccctggaggaacactaccgttttgggtctttccattcaccggcccttgaagatgctgacttcgacggcaaacccatggtgctggtggccggccagtatagcaccggcaaaaccagcttcatccagtaccttctggagcaggaagtccctggctcccgcgtgggtcccgagcccaccaccgactgcttcgtggctgtcatgcatggcgagacagagggcaccgtgcccggaaatgctctcgttgtggacccagagaagcccttccgcaaactcaacccttttggaaacacttttctcaacaggtttatgtgcgcccaactccccaaccaggtcctggagagcatcagcatcatcgacacgcctggcatcctatcaggtgcaaaacagagagtgaaccgtggctacgacttcccagctgtcctgcgctggtttgctgaacgcgtggacctcatcattctttttgatgcccacaagctggagatttccgatgaattctcggaggccatcggtgccttgcgtggccacgaggataagatccgcgtggtactcaacaaggcagacatggtggagacacagcagctgatgcgcgtctacggggcgctcatgtgggcgctgtgcaaggtggtgggcacgcctgaggtccttcgcgtctacattggctccttctggtcccagccgctccttgtgccggacaaccggcgtcttttcgagctggaggaacaggacctcttacgagatatccaaggcctaccgcgccatgcggcgctgcgcaagctcaacgacctagtgaaacgggcgcggctggtgcgggtgagcacatcggagagaaggtggaacagaaagctgggcaaaaaaggccaagaaggttctaggtggtataagcatccgaggtgtggtttaaggagctggagaggggtgagtcaccacctccaaccccaccgcaggaatcctctaaggcagcaccaggagctgttgatggcacatgacttcaccaagttccactcgctaaagccgaagctgctggaggcgctagatgacatgctggcccaagacattgccaagcttatgccgctgcttcggcaggaggagctggagagtgtcgaggctggagtgcagggcggtgcgtttgagggcacccgcatgggccccttcgtggagcggggccctgatgaagcaatagaggatgatgatgccgaatgggtggtgaccaaggacaagtccaaatacgatgaaatcttctacaacttagctcctgctgatggcaagctgagtggctctaaggccaaaacctggatggtgggcacaaagctacccaactctgtgctggggagaatctggaagctgagcgatgtcgaccgacacggcatgctggatgatgaggagtttgccttggccagccacctcattgaggctaagctcgaaggccatggtctacccaccaacctaccccgccgcctggtgccgccttctaagcgacga

SEQ ID NO: 756 - protein, 527 aa, Mus musculus
MFSWLKKGGARGQRPEAIRTVTSSLKELYRTKLLPLEEHYRFGSFHSPALEDADFDGKPMVLVAGQYSTGKTSFIQYLLEQEVPGSRVGPEPTTDCFVAVMHGETEGTVPGNALVVDPEKPFRKLNPFGNTFLNRFMCAQLPNQVLESISIIDTPGILSGAKQRVNRGYDFPAVLRWFAERVDLIILFDAHKLEISDEFSEAIGALRGHEDKIRVVLNKADMVETQQLMRVYGALMWALCKVVGTPEVLRVYIGSFWSQPLLVPDNRRLFELEEQDLLRDIQGLPRHAALRKLNDLVKRARLVRVSTSERRWNRKLGKKGQEGSRWYKHPRCGLRSWRGVSHHLQPHRRNPLRQHQELLMAHDFTKFHSLKPKLLEALDDMLAQDIAKLMPLLRQEELESVEAGVQGGAFEGTRMGPFVERGPDEAIEDDDAEWVVTKDKSKYDEIFYNLAPADGKLSGSKAKTWMVGTKLPNSVLGRIWKLSDVDRHGMLDDEEFALASHLIEAKLEGHGLPTNLPRRLVPPSKRR

SEQ ID NO: 757 - DNA, 1908 bp, Mus musculus
gcccacgggataacccttcgacaacactgctgagacacggagagcacacacacttgggaaacccagaaagaggcgtactgaaatatggctcagagtgacttcctctacccacaaaacccaaggaggcgacaggaagtaaaccgccttcaccagcagctgctggactgcttgtctgacagcttccaggtcaccaacaagctcacaggggttcttaatacccacttgggttgcaggctggccttcattgaaatgaaaagcgatggaaccatcaaagaaaactgtgacatcattatccaagccatgacaaaaatccaaaaggaactgcaaaagattgacgaggcactgaaagaccaactagagccaaccctttataggaagctgcaggatattaaggaaagggagacggagaagattgccatcgtgcagaaggtcatttctgtcatcctgggagaagctacatctgcagccagtgcagtggctgttaaactggtgggctcaagtgtcacaactggcataattagcaagctggtctctgtgctagctcacatcgggacttctctccttggaagcattggcgttgccgtgctcagcctcgggatagatatgatcattcaagccatcttgggagcagtggagaggacacagcttcaggcagccatcaaaagttatgagaagcacctggaggagttcaaggctgcctcagcaaagtaccatcatgctatcactgaggttgccactgctgtgaagcgccagctaagatgaacaggcaggtgtctacactgggatactttgtgctgccctctctggcaccatgcttatttctttagggtaattttccatttgtctccaacaacgtggatacagataaacaatttggggtgcttgggtcttaggtcaacagtgagtgtccaaaccagctgtagtagaccctcaggggataaagctctatccagttttcttaccctgttgtcagaaccactgaggtgtaaaggcatcatagaccagcaggcacaggctattgcttccttgttcgcagcaaatgtcttcaaatattcctgctaaatggagagaccattcccatttcctgtttcaaacatcacttaatgtctaataagacagacttaataacatctgactagacacagacctgtgaccttcaagtaaaacatacatagtgctgttatttttacccccagatcaaaaacagttgtttgtgaactggaaaagactgcaaaatcatatcaacattttcttccaccagattaaatacaattgtctgccacccggaaatgaaggcagagcaacctcaacaacattatgttccagaatgaacgaaagccatgcatctgcgaggttctcctcagttcaaagcgtggctggatggattgggaaaggatgagataataaatgttgtctgtaatgcagtcaatattgaccacctgtttgtcatctatctcttgagtggtcaaagtgtgtggaacattgtaaacaaaacaaggcataaaatgcagtgatccctgcataaaatatgttagagtgaagaaaaaggctcactccctgttaagaatttgttgattaaaggaaagtaattaatttctatttttcagggggataattttattttcagtaccaccaaaaagaggcagctccctctgccccataaagcatttgcagacctatgttaattgcctcctgaactcaggaaaaggagaggccatggaggcctattgatggaacttagtttctctagatacagcatttgttttctaaacctttatctaaccattctcactaagccgtttttagggtctacttcaaaaaccattgtatgtaacaatgttgagatagtcctggttatagtcgtttggtttttaacgcaaagacaaaaataaatcattggtataaagt

SEQ ID NO: 758 - protein, 225 aa, Mus musculus
MAQSDFLYPQNPRRRQEVNRLHQQLLDCLSDSFQVTNKLTGVLNTHLGCRLAFIEMKSDGTIKENCDIIIQAMTKIQKELQKIDEALKDQLEPTLYRKLQDIKERETEKIAIVQKVISVILGEATSAASAVAVKLVGSSVTTGIISKLVSVLAHIGTSLLGSIGVAVLSLGIDMIIQAILGAVERTQLQAAIKSYEKHLEEFKAASAKYHHAITEVATAVKRQLR

SEQ ID NO: 759 - DNA, 936 bp, Mus musculus
tccgtttgtctttggggcttatttctatccagagcagtgcctgcgtggagcttccacgttgcgactcagccgaccttcttccttactcctgcacgacctggtgtgactgtgagcagccgtctctcaacttttccttctgaggatctagcagcagaaagcagctctacttccctgcaaaggagctgggcaccgtcgccatgaagttcatgctgaacctctatgtgctgggcatcatgttgaccctgctttccatctttgttagagtgatggagtctctgggaggcttactggagagcccactgcccgggagctcctggatcacgaggggtcagctagccaacacacagcctcctaagggcctgccagaccatccatcccgaggagtgcagtgaacctccctccctgcaggcatcacagcttcagcatgtccaaccacacgttccatttctcgggaggcagcatcaagtgtctccaaaggactcttactaggcctggaagggctgttcccttaccctggaaaagagcctatttcccctagagctgtgagtgggctgtctgtggctctgggatggaggtgtaccagttccagctgttgggagaatggattttggtttcgtttgtttcagacctctgtcctaaaggactcttttggacctaagtatcttctgttggtttaccattgagtctcttccctgagagttgtttggatggcatcaaaggggttgtggtttgactgtgaagacagagggtggactatccagtgtccaggtcaagttgtacatttaagttctttctccagtgtaatgcacatgtgtttgtatataatgtctaaagggctatgggatgatcaggcctgcttagggtatgggagttccagccactgtgtggcttaaacatgaatttttctaatgcaataaatgtgaatatatatgtttc

SEQ ID NO: 760 - protein, 64 aa, Mus musculus
MKFMLNLYVLGIMLTLLSIFVRVMESLGGLLESPLPGSSWITRGQLANTQPPKGLPDHPSRGVQ

SEQ ID NO: 761 - DNA, 747 bp, Mus musculus
cagggcatggagaagcgggcggcctgggagccgcagggcgccgatgcgctgcggcgcttccaaggattgctgctggaccgccgtggccggctgcacagccaagtgctgcgcctgcgcgaagtggcccggaggctggagcggctacgcaggcgctccctggcggccaacgtggcgggcagctctctgagcgccgctggtgccctggcagccatcgtggggttgtcactcagcccggtcaccctgggagcctcgctcgtggcgtcggccgtgggcttaggggtggccaccgccggaggggcagtcaccatcacgtccgacctctctctgatcttctgcaattcccgggaggtgcggagggtgcaggagatcgccgccacctgccaggaccagatgcgcgagcttctgagctgcctggagttcttctgtcagtggcagggacgcagggaccgccagctgctgcagagcgggagggacgcctccatggccctttacaactctgtctacttcatcgtcttcttcggctcacgtggcttcctcatccccagacgtgccgagggggccaccaaagtgagccaggccgtcctgaaggccaagattcagaaactgtcagagagcctggagtcgtgcactggcgccctggatgaacttagtgagcagctggagtcccgggtccagctctgcaccaaggccggccgtggccacaacctcaggatctccactgatctggacgcagcgttgtttttctaa

SEQ ID NO: 762 - protein, 248 aa, Mus musculus
QGMEKRAAWEPQGADALRRFQGLLLDRRGRLHSQVLRLREVARRLERLRRRSLAANVAGSSLSAAGALAAIVGLSLSPVTLGASLVASAVGLGVATAGGAVTITSDLSLIFCNSREVRRVQEIAATCQDQMRELLSCLEFFCQWQGRRDRQLLQSGRDASMALYNSVYFIVFFGSRGFLIPRRAEGATKVSQAVLKAKIQKLSESLESCTGALDELSEQLESRVQLCTKAGRGHNLRISTDLDAALFF

SEQ ID NO: 763 - DNA, 3093 bp, Mus musculus
atgctatctggtgaacgaaaggagggcggaagcccccgcttcgggaagctccatcttccagtgggcctgtggatcaattccccaaggaaacagctcgccaaactggggcggcgctggcccagcgctgcctctgtcaagtcctcgtcctccgacacggggagccgaagcagcgagcccctgccgccgccgccgccgccgccgcacgtggagctgcggcgcgtaggtgcggtgaaggcggcggggggagcgtcgggcagccgagccaagcgcatctcgcagctgtttcggggctcaggggccggcggcgccgggggtcctggcacgcctgggggcgcgcagcgctgggccagcgagaagaagctgcctgaactggcggcgggtgtagctccggagcccccgttgcccacgcgtgccgcggtgcccccgggagtgctcaagatcttcgcttctgggctggcgtcgggcgccaactacaagagcgtgctggctacggagcgatccaccgcgcgcgagctggtggcggaggcgctggagcgctacgggctgacgggcggccgcggagcgggcgacagcggctgcgtggacgcctacgcgctttgcgacgctctgggccggcccgcggtcggcgtgggcggaggcgagtggcgtgccgagcacctgcgggtgttggccgacgcggagcgccctctgctggtgcaggacctgtggcgcgcccgtccgggctgggcgcggcgctttgagctgcgcggccgcgaggaggctcgacggctggagcaggaggccttcggggctgcggatgcagacggcacaaacgccccatcttggcggacccagaagaataggtctcgggcagcatctggcggggcagctctggccagtcctggtccaggatcaggatccgggacccccactgggtccgggggcaaggagcgatctgaaaatttgtctctgcgtcgaagcgtgtctgagctgagtctacaggggcggaggcgaaggcagcaggaacgcaggcagcaggcccttagcatggccccaggggcagctgatgctcagatggtaccaacggaccctggagacttcgatcagttgactcagtgcctcattcaggcacccagcaaccgtccctacttccttctgctccagggctaccaggatgctcaggacttcgtggtgtatgtcatgacacgagagcagcacgtgttcggccggggtgggccctcctcgtcccgcgggggatccccagccccatatgtggacaccttcctcaacgccccagacatcctgcctcgacattgcacggtgcgcgcgggccctgagcccccggccatggtgcgcccatcccggggcgcccccgtcacacacaatggctgtcttttgctgcgggaggcagagctgcaccccggagacctgttaggcctaggagagcatttcctgttcatgtacaaggacccccgctccgggggttctgggcccgctcggccatcttggctgccagcgcgccccggggccgcgccacccggaccgggctgggccttttcttgtcgtttgtgtggccgtggcctgcaggagcgcggcgaggcgctggccgcctacctggatggccgcgagccggtgctgcggttcagaccacgagaggaagaggcgctgttgggcgagatcgtgcgagctgcagcctcgggagcaggggacctgcccccgctcgggccagccactctgctggcactgtgtgtgcagcattctgcgagggagctggagctgggccacctgcctcgcttgctgggccgcctggcccggctcatcaaagaagccgtttgggaaaaaattaaagaaattggagaccgccagccagagaaccacccagagggagttcccgaggtgcctctgacccctgaggctgtgtctgtggagctgcgaccactcatactatggatggccaacaccacagagctgttgagctttgtacaggagaaagtgctagagatggagaaggaggctgaccaggagggcctgtcctcggacccacagctctgcaatgacttggaactgtgtgatgaggccttggccctcctggatgaggtcatcatgtgtactttccagcagtcggtctactacctcaccaagactctttattcaacactgccagctctcctggacagtaaccctttcacagctggagcagagctgccagggcctggcgcagagctggaggccatgccgcctgggctcaggcctactctgggtgtgttccaggcagctctagaactgaccagtcagtgtgagctgcatcccgacctcgtgtcccagacttttggctatttgttcttcttctccaatgcatcccttctcaactcactgatggaacgaggtcaaggccgacctttctatcaatggtctcgagccgtccaaatcagaaccaacttggatcttgtgttggattggcttcagggggccgggctgggtgacattgccactgagttcttccggaaactttccattgctgtgaacctgctatgtgtgccccgcacctccctgctcaaggcttcatggagcagcttacggactgactaccccaccctgactccagctcagctccaccatctcctcagccactaccagttgggtcctggccgtggtcccccaccagcctgggacccaccacctgcagagcgggatgctgtggacacaggggatatctttgaaagtttttcctcgcaccctccgctcatcctgcccctgggcagctcacgcctgcgcctcaccggccctgtgacagatgacgcattgcatagagaactgcgcaggctccgtcgcctcctctgggatcttgaacagcaggagctgccagccaatcatcgccatggacccccggtggcttcgacaccttgaaaaccaatgagaaaggaacgcgcgcagcttgaaactgcatcgcttcttaaaagggagcccgcctgggcgtagagcattttgggagttgtagttttccctgcgtagacggctgagagtttgagttgttgggttggtagacgatgggacagtgggaagatgggcttgggatgtgaatgccaagaagtaataaaaatatctgtggtattg

SEQ ID NO: 764 - protein, 516 aa, Mus musculus
MLSGERKEGGSPRFGKLHLPVGLWINSPRKQLAKLGRRWPSAASVKSSSSDTGSRSSEPLPPPPPPPHVELRRVGAVKAAGGASGSRAKRISQLFRGSGAGGAGGPGTPGGAQRWASEKKLPELAAGVAPEPPLPTRAAVPPGVLKIFASGLASGANYKSVLATERSTARELVAEALERYGLTGGRGAGDSGCVDAYALCDALGRPAVGVGGGEWRAEHLRVLADAERPLLVQDLWRARPGWARRFELRGREEARRLEQEAFGAADADGTNAPSWRTQKNRSRAASGGAALASPGPGSGSGTPTGSGGKERSENLSLRRSVSELSLQGRRRRQQERRQQALSMAPGAADAQMVPTDPGDFDQLTQCLIQAPSNRPYFLLLQGYQDAQDFVVYVMTREQHVFGRGGPSSSRGGSPAPYVDTFLNAPDILPRHCTVRAGPEPPAMVRPSRGAPVTHNGCLLLREAELHPGDLLGLGEHFLFMYKDPRSGGSGPARPSWLPARPGAAPPGPGWAFSCRL

SEQ ID NO: 765 - DNA, 3033 bp, Mus musculus
ggcaatgatgtgaagcgagcaagtcggctaccgcgcgcacgaccacagagggcgcgctgcagatcgccgagaaccccgaagcggagccggacacccccggagggaagcaatgaggtagcggcagtccccggagcggacgatgtgcgcgtcctgccctccgaaccccgcgctaccttggccgagacggccgagcgcgagtctccggcgtcccctcggagcgaggatgcagtgagctgcgggaccgctgtgcttggcccgccgcggccagccagacctctcggaccacacttggggcaagctgcttattcagggaccagtccagccaaggggctcgccctcttctgcacccactgggggtggggagcaccggcccctgggcgcactgctgtagtttccgcggctcctggccctggcccaagacttgtgtgtgtgtcacgttcgctgaagaagagttccagcttatttctctcaccatcccggttgctttggccgagccgcccacctttatttatttgtacgcactcatttggcctttttctaaaatattttccgctccgctctcttattttgttgcttgtttgagacttttgtcctggtcctcctcatctaggcttctctctctctctctctctctctctctctctctctctctctttcctgaatatttttttctaatatcctaccccagtccctgcggggttcccaagcactatctggcctctcctgcctccatctccctgccccggaggtcctcccagcctgagttttatttttcgagcttgcccgggccaagcgtagcctgggttggtggccctgcggggctctcaccccgcgctcggccaccgccgccccagccactcccgggcgtcctccggagatgctgccgtggaagaagcacaagttcgagctgctggccgaggcgccgccgcggcaggcgtccaagcctaagggctacgctgtgagcctgcactactccgcgctcagctccttggcgagagcctgcccggaaggcgcgctcagccgggtgggcagcatgttccgctccaagcgcaagaagctgcacatcaccagcgaggaccccacttacactgtgctctacctggggaatgccaccaccatccaggcgcgcggggacggttgcactgacctagcggtgggcaagatctggagcaagagtgaggccggccgtcaagggactaagatgaagctgaccgtgagtgcgcaaggcatccgcatggtgcatgccgaggagcgagcgctgcgacgtcccggccacctctacctgctgcaccgcgtcacctactgtgtggcagacgcgcggctacccaaagtcttcgcctgggtataccggcatgagctgaagcacaaggcggtaatgctacgctgccacgcggtgctggtgtccaagccggagaaggctcaggccatggctctgctgctttaccagacatcagccaacgctctggcagagtttaaacgtctcaagcggcgggatgatgcgcgtcaccagcagcaggagttggtgggcgcacacaccatcccactagtgccgctgcgcaagctgctcttgcacggaccttgctgctacaagccgccagtggagcgcagccgcagcgctcccaagctgggctccatcaccgaggacctgcttggggaacagcaagaggaggagctgcaggaggaagaagaggagcatctggaggactgcctggaggaggaggaagaagaggacggtgtgggggatggggatccagcagaggaagaggctgaggcgcagagggcgctggtggtggccatgcagttggaatgtgaggacttgctggacccgctggaaaatggccacgaggaggcgttgggggacggcggggtctcgctgggccccagctcggggacatcacttcctctgtcagtctgtgcctcagacatgaaggcccaactgtcacagcttattagtgacctgggcgaccttagctttggcaatgacgtgagcaccctggagaccgatttaagggtgacacgcctgctgtcgggcgagagcacaggcagcgagagctccatcgagggcggaggcctggatgccacccctgtcagccctggcaacccatcgggccctgctgacagcaccagcctagatgagccctactcgggctaagctgccagaagacttctctgtgcgcccctcccaacatacacatagtggctccccaacagtagttctattccccctaacctccaggaaagggaaaatgatgcacttgaagcccagacccgactttggagttttctggggaagctattccctcttgctagttgccccagcgctttggctcagaggtggctcaggttgtgaacagggggatggggggcagggagggcgagaagcactacaaaggtgggtgagggagagctggctgaagttggaaaaggccaagggcgggctggaggtgcccagcagccggtttcctgtttgtgaggcagctggggctagggaaggaggggttaacttcctctccagaccccctgactggaaggcctctttctgtcatcaatatctcattaacaaagtcactttcaaaacgttggaggcttcaatgccactttacctgcccccagttctttcggataggggagcttgggctgtttacctcagactcaaactcttgaaagtttgccaaatttctcaaataactcttcttgggggggggggcagtgtatgaaagtcgtgttttgtttacagttaaagaaacctaatatctaaaaaacaaaaaaggaattttcctttagaaatacacaccttcctctggccccaaagctcctactccatgatgctatgtaaaatatttttgcactgttgtgaagtatttttgactttttgttttttgtacataactgtgttctcggagctgaatgtttatatctcttttgctgtgcaaaagatacctgtaaaatgttgtacggttgtatatatggaaatgtgtataaaacattttgttatttttttgagcagccttgtttcagttctgttggcatgtc

SEQ ID NO: 766 - protein, 424 aa, Mus musculus
MLPWKKHKFELLAEAPPRQASKPKGYAVSLHYSALSSLARACPEGALSRVGSMFRSKRKKLHITSEDPTYTVLYLGNATTIQARGDGCTDLAVGKIWSKSEAGRQGTKMKLTVSAQGIRMVHAEERALRRPGHLYLLHRVTYCVADARLPKVFAWVYRHELKHKAVMLRCHAVLVSKPEKAQAMALLLYQTSANALAEFKRLKRRDDARHQQQELVGAHTIPLVPLRKLLLHGPCCYKPPVERSRSAPKLGSITEDLLGEQQEEELQEEEEEHLEDCLEEEEEEDGVGDGDPAEEEAEAQRALVVAMQLECEDLLDPLENGHEEALGDGGVSLGPSSGTSLPLSVCASDMKAQLSQLISDLGDLSFGNDVSTLETDLRVTRLLSGESTGSESSIEGGGLDATPVSPGNPSGPADSTSLDEPYSG

SEQ ID NO: 767 - DNA, 2853 bp, Mus musculus
ccgccattcccgaggccgcacagccagcccagagtttcctgtgggcgtttcctcctcttcacttcaggacgcctcgccggatgcactgttgaagtctttcaagtgcagttctacggcgtgtgacagaagatggaagtgtgtcaggaattgaggaaaccagcgctaagcctggagtgtgggcactgcagtttcagaggcaccgattatgagaatgtgcagctccacatgggctccattcatcctgagttctgtgatgatatggatgccgggggcctgggcaagctcatcttttaccagaagagtgcaaagctcttccattgccataagtgcttcttcaccagcaagctgtacgccaatgtgtactatcacatcacggccagacacgcagcctcggacaagtggagtgagcagccgaaagagcagccgagcaaagacaccgagtctgggaaaagcccttcccctcctgagcggcagaacccagcctttgacccagcagaggcgaggcccactccagccctccccatggaagcacagaaaacgagcccgagcttgtgtccagagtcacaggcttctggtcctccagttctggagcctcagggcgctggtcctcttatttcgcccgagccccaagccccttgtcttcctgctgaggcctcaaaagctgctcctgttccttgccctgagcgtgtagacccaccctgtgagcttcctgagctggagaagcctgagcgaggcccttctcctgagtcagtcaagtctgctcttgtcagctccaaacccccaaagcactcttcctttgcagacacaggggctgccccttcagctttgtctccagagtcaccagtactggccacttcccctgaaccttggggaccatccctcagtgcatctccagagtctcggaagccagcgaggactgcctcccctgagccaaggaagccatccccagcagagtctcctgaactttggaagccattccctgccatcgcttcagagcctcggagaccaaccccagcagtgtcgccaggttcctggaagccagggccgcctggttctcctaggccttggaaatccagtccttcagcaacatcaggaccgtggaagtcatctaaacctgttcaacctatgtctcctggaccttggaaaccaataccttctgtatcacctgggccttggaaacctgccccatctatgtccactgcatcctggaagtcttcagtctcatctggttcctggaaaacaccacccacatctccagagtcatggaagtctggcccacctgaactccggaagacagcccttcccttgtctcctgagcactggaaggcagtgcctcccgtgtctcctgagctccgcagaccaggcccaccactttccccagagatccgaagtccagcaggttctccagagctcaagaagccttcaagctcaccagacctttggaaggtttctcctgaccagcggaaaacttctcctgcttcacttgatttccctgagccccagaaaagttcttgtggtagtcctcctgatctctggaagtcttccttcattatggagtctcagaaacctaacgtcttctctgagacgaggaagcacactgcttcgggctcatctgagtcaccgaaggtagcgtcagacatatggaagcctgtcttgtctatcgatgctgagcctaggaagtccacactgtttcctgagcccaccaaagcagtccttcctgcttctcccgagccacggaaacgcgcacttttcccagagtcccggaagcacgtgtttctacctgaacttcccaaatccgctgtgttctcagacgcccagaaggcccctgagcttagtgaggagatacaacttgaagctgtggataatgcaaaatgcgatagtctggcccaggaagggcttctggccacccccaagaaactgttagacgaggctttatctccttcttcaaagaagctcaagaaggacagccaggagaactcggatgccgagctcagtagcagtgaatacatcagagcagatttagacacgttggacacgaagggccaggagtcaagcagcgatcaggaacaggtggatgtggaatcgattgattttagcaaagagaacaaaatggagatgggtagtacagagcaagccaaaaatgtgcttcagttcaccgaggagaaggaggccttcatctctgaggaggagatcgcaaagtacatgaagcgtgggaaagggaaatactactgcaaaatctgttgctgtcgggccatgaaaaagggcgctgtcttgcaccacttggttaataagcacaatgtccacagtccatataagtgcacaatttgtggaaaagcgtttcttttggagtctcttcttaaaaaccacgtagcagcccacgggcagagtttacttaaatgtccacgctgtaattttgaatcaaatttcccaagaggctttaagaaacacttaactcactgtcagagccggcataatgaagaggtgaataagaagctgatggaagccctggagtcgccattggaggagcagcagatttgatcttcagacagtggcccttgctctacagtgttgcttgccagactcttaggttgttgagtagcctagatggaccagtagccagtatgtgtgtagtggtgtatcctggtctgtaagtagtgttacaaaaaataagtacttggttattttttcatatgatccgttgtttatgtggatggctattttataagtcttaatacatttctgttatagattccagatggatataactcattttccttaagttttatttttgttataatacaaggagtgggggaaaataggcaggccatttaataaacaagtaagtttaaacct

SEQ ID NO: 768 - protein, 802 aa, Mus musculus
MEVCQELRKPALSLECGHCSFRGTDYENVQLHMGSIHPEFCDDMDAGGLGKLIFYQKSAKLFHCHKCFFTSKLYANVYYHITARHAASDKWSEQPKEQPSKDTESGKSPSPPERQNPAFDPAEARPTPALPMEAQKTSPSLCPESQASGPPVLEPQGAGPLISPEPQAPCLPAEASKAAPVPCPERVDPPCELPELEKPERGPSPESVKSALVSSKPPKHSSFADTGAAPSALSPESPVLATSPEPWGPSLSASPESRKPARTASPEPRKPSPAESPELWKPFPAIASEPRRPTPAVSPGSWKPGPPGSPRPWKSSPSATSGPWKSSKPVQPMSPGPWKPIPSVSPGPWKPAPSMSTASWKSSVSSGSWKTPPTSPESWKSGPPELRKTALPLSPEHWKAVPPVSPELRRPGPPLSPEIRSPAGSPELKKPSSSPDLWKVSPDQRKTSPASLDFPEPQKSSCGSPPDLWKSSFIMESQKPNVFSETRKHTASGSSESPKVASDIWKPVLSIDAEPRKSTLFPEPTKAVLPASPEPRKRALFPESRKHVFLPELPKSAVFSDAQKAPELSEEIQLEAVDNAKCDSLAQEGLLATPKKLLDEALSPSSKKLKKDSQENSDAELSSSEYIRADLDTLDTKGQESSSDQEQVDVESIDFSKENKMEMGSTEQAKNVLQFTEEKEAFISEEEIAKYMKRGKGKYYCKICCCRAMKKGAVLHHLVNKHNVHSPYKCTICGKAFLLESLLKNHVAAHGQSLLKCPRCNFESNFPRGFKKHLTHCQSRHNEEVNKKLMEALESPLEEQQI

SEQ ID NO: 769 - DNA, 4109 bp, Mus musculus
ggatcctcccgctgttttcaagcggcctggaaaaaaaaaaaaaatccagaacgaggaagtgctgacgcacggggccccacagatactccccgaggctagccgcccggacggcccaaagatctagggcgaggaccagaccggaaatggtggtttctatggtaacccctgagcgggttgcctgggagatgaccccttttggtctctttgaatcttagctgtaggattacctcgaaggaggattgaacatcctggactgtctcctgccatgattcccggaaaatatcgctccgtttctggccgagctgcaaataacgtgaactgtggacttcatctggttattcaaacgtcgtcactttctgacaaaaacaaagttgaattcaggcttaacagagaaacaccaccatttcctggtagactgttacagcatgacctggagaggaactactcaagcaggcaaggtgaccacattagtctggtgagctcatccatgccggcgtttcctattctccagcgctcttctgaagagaaaacactttactcagacaggctgaccctagaaagacaaaagttgactgtgtgccctatcatcgacggggaagagcaccttcgtttgttgaactttcagcacaattttataactcggatccaaaatatttctaatctacagaggctaatattcttggacttatatgataaccagattgaagaaattagtggactttctactctgaaatcccttcgtgtcctcctgttagggaaaaacagaatcaagaaaatctcaaatctggagaatctaaaaaatttagatgtcttggaccttcatggaaatcagattaccaaaattgaaaatgttaatcatttgtgtgatttgagagttctaaaccttgccaggaatctcttgagtcatgttgacaatctcaacggcctggattcactaacggaacttaaccttcggcacaaccagatcacctttgtgagagatgtggataatttgccctgcctccaacgcctcttcctcagcttcaacaatataactagctttgaaagtgtttcctgccttgccgagtcaacttccctctcggacatcacctttgatggcaacccaatagctcaagagtcatggtacaaacacacggtccttcagaatatgatgcagctgcgccagctagacatgaagagaatcacggaagaagaaagacgcgtggcatctgttgtggccaaaaaagaggaggagaagaagagggagagtcacaagcagtccttgctgaaggagaagaaaaggttaaccattaacaatgtcgctcgaaagtgggacttgcagcagcgagtagccaacattgccagcactcaggacagaaaggactcggagtctccgcctcaggaatcctgtcagctcgacggaggcaacatctctgcctttccagaggaagcagggtctctagatgcagggctcagcagtgcgttacaaggcttgtctgtcacagaaacacacttggtggagatagacggagaaaccctctcactgtacggctcaggggcgctggaatgcctggatcgaaactggagtgttcaaacagccggcatggtcaccacggtctcattcacgttcatcgagtttgatgaaattgtccaagtacttcccaaactgaagatgaagtttccaaattctctgcaccttaaattcagggagaccaaccttgtgatgctgcagcagttcaatgccctggcacagctgcgtcgggttgaccagttgacaatcgatcctcagggaaacccagtggtcaactttacactctggaagtactacgtgctgttcaggctcagccacttcagcatgcagaaaataaatggaacagaggtgactcaaaatgacatgataatggctgaaaggctctttggaatcttagcacatgtagcatcctccgagctgccccagtaccgcatgatttcaattctgggtgatgccaggaaaaagcaattccgatatctactggaaagcaaaggtaaaaagcctggcatcatctgtgaggagaccagtgacagcaagaggttcttgggggaaaacacgaaccgcgctaccctgaattacaccacccgagaattctaccacgagaagctggaagaaataaaggacaagaagaagttctgcaggttgtatgtagaagacctggtgaaggaagccacagccatcaacatgaaaaacgaggctctgcagaagctgtggccacagatgttcatcgagcttgtgagagacgctgtcatagagatccgcagcaaggattcctacatgaaactctgcctgcagcagatcactgaccagaaatagggatggctgctacttcagacttgggcaattggagctttttcgaagtttggcttacaaggacaccttggcagctcatcgcaagtctccatcagctctgcccatctcattcaacagtggctgggtacctgtcctgagaacttacgttggtgatggtgaccgtttcaagggagctatgcaagacacaagcagcacttggttcagaattggcaagacgctttcctaagggttggccaagattgatttgttaccctgagaaacatttcttgaagactggcctgggaatgccttcctcagagcattgctcttagatgagctatgagaagtctttaatttgagctgtctgtctccataccaacctgtgaacaggctcctggaggagtcttctgcctagcacattttgagaccagtgttttgaccaatggtgtcatttgagtcaagtgcctccgagccagtccctgaagtcaggtaaggaggccctgcaacacgacccacctacaccgccgatgttacttgatcagatgccaaatgatataggcctgtattaatatgaggaaatggttttgcaacaagaagaaacattcaaagaaagcttgtctaaaaagctttaaagtagtcacttcacccatcttcagatgtcaagggtttatacctgtcttcccacactacaatgaggcagcagacttgggcagccactattctaatggacttcttcacctgtttgttaacctggctgttggtgtatggtacaaagtgtttgtgccaggagacgccacccactgtatgaaaagttgggttttgtgatatagcatctttctggttttatttggatacagcctagtgtgaggctcaaactcactatgtagctagcattgaacttccactcttcctgccgccacatcttaagtgctgggattacaaatgctcactgtcatacctggttttgtgcagtgctggggaacccagggcttcctgcatgctaggcaagcactctgccaactcagccacatcctcagccccatatagcatcaaacacagtggaaaccatgatttatctgagaagtcattttccaaagcagatggctctgcagccttggcaggattcccctgggtctcctttcatctacgtcctcccaggcccactgtttgaagtaaaagaaaccaggacccctcagagacagatgggcctgtgttcagagagtcaaaatgagtctggaatagcctcttgtaaccagaaagtcaggattttatttaaaaacttgttagaggcagtagctgaggaccaaaggacccaacttaagggtctttgtgggtgatgttgcgactgttcaagcacacagtattcatggtttttgagggaagttgaaataagatagggctttgaaggatcaatgttttcataattataggccaaaagaaaaattaaagttagtataaaatatgaacatttatataaaattaaaccttagtagtaattgttttaagatttacttttgttttcatttctgtggtatgtatatgtggtgtgtgagtgtgtgcacatgtgtgcatgtgtgcatatgtgtgtgagagacacatatacaagtgtgcttgtgcaaatgggaactgtctttgaaaagcagtgaatgctcttaactgctgagacatctctccagccctggtggtaattttttaaaaaaaggtattcagttctggatatatttcttgatatgaatttttaaattgtcatcaagttttatacatttttatacaggtattttgttactcccactaaattactattcat

SEQ ID NO: 770 - protein, 686 aa, Mus musculus
MIPGKYRSVSGRAANNVNCGLHLVIQTSSLSDKNKVEFRLNRETPPFPGRLLQHDLERNYSSRQGDHISLVSSSMPAFPILQRSSEEKTLYSDRLTLERQKLTVCPIIDGEEHLRLLNFQHNFITRIQNISNLQRLIFLDLYDNQIEEISGLSTLKSLRVLLLGKNRIKKISNLENLKNLDVLDLHGNQITKIENVNHLCDLRVLNLARNLLSHVDNLNGLDSLTELNLRHNQITFVRDVDNLPCLQRLFLSFNNITSFESVSCLAESTSLSDITFDGNPIAQESWYKHTVLQNMMQLRQLDMKRITEEERRVASVVAKKEEEKKRESHKQSLLKEKKRLTINNVARKWDLQQRVANIASTQDRKDSESPPQESCQLDGGNISAFPEEAGSLDAGLSSALQGLSVTETHLVEIDGETLSLYGSGALECLDRNWSVQTAGMVTTVSFTFIEFDEIVQVLPKLKMKFPNSLHLKFRETNLVMLQQFNALAQLRRVDQLTIDPQGNPVVNFTLWKYYVLFRLSHFSMQKINGTEVTQNDMIMAERLFGILAHVASSELPQYRMISILGDARKKQFRYLLESKGKKPGIICEETSDSKRFLGENTNRATLNYTTREFYHEKLEEIKDKKKFCRLYVEDLVKEATAINMKNEALQKLWPQMFIELVRDAVIEIRSKDSYMKLCLQQITDQK

SEQ ID NO: 771 - DNA, 2759 bp, Mus musculus
agctgtaggattacctcgaaggaggattgaacatcctggactgtctcctgccatgattcccggaaaatatcgctccgtttctggccgagctgcaaataacgtgaactgtggacttcatctggttattcaaacgtcgtcactttctgacaaaaacaaagttgaattcaggcttaacagagaaacaccaccatttcctggtagactgttacagcatgacctggagaggaactactcaagcaggcaaggagacggaagagtaataagtccttcgcctcgtaataagtcatcatgcatctcatccacaactaacgtgacagacctctgtgggctggacatgagagctgccacaacctccttgtcagcatttggagactcttccattcagacaccttcaaagccgagaatccggcagggctgtcatagtgctggccccaatgtatctggtgaccacattagtctggtgagctcatccatgccggcgtttcctattctccagcgctcttctgaagagaaaacactttactcagacaggctgaccctagaaagacaaaagttgactgtgtgccctatcatcgacggggaagagcaccttcgtttgttgaactttcagcacaattttataactcggatccaaaatatttctaatctacagaggctaatattcttggacttatatgataaccagattgaagaaattagtggactttctactctgaaatcccttcgtgtcctcctgttagggaaaaacagaatcaagaaaatctcaaatctggagaatctaaaaaatttagatgtcttggaccttcatggaaatcagattaccaaaattgaaaatgttaatcatttgtgtgatttgagagttctaaaccttgccaggaatctcttgagtcatgttgacaatctcaacggcctggattcactaacggaacttaaccttcggcacaaccagatcacctttgtgagagatgtggataatttgccctgcctccaacgcctcttcctcagcttcaacaatataactagctttgaaagtgtttcctgccttgccgagtcaacttccctctcggacatcacctttgatggcaacccaatagctcaagagtcatggtacaaacacacggtccttcagaatatgatgcagctgcgccagctagacatgaagagaatcacggaagaagaaagacgcgtggcatctgttgtggccaaaaaagaggaggagaagaagagggagagtcacaagcagtccttgctgaaggagaagaaaaggttaaccattaacaatgtcgctcgaaagtgggacttgcagcagcgagtagccaacattgccagcactcaggacagaaaggactcggagtctccgcctcaggaatcctgtcagctcgacggaggcaacatctctgcctttccagaggaagcagggtctctagatgcagggctcagcagtgcgttacaaggcttgtctgtcacagaaacacacttggtggagatagacggagaaaccctctcactgtacggctcaggggcgctggaatgcctggatcgaaactggagtgttcaaacagccggcatggtcaccacggtctcattcacgttcatcgagtttgatgaaattgtccaagtacttcccaaactgaagatgaagtttccaaattctctgcaccttaaattcagggagaccaaccttgtgatgctgcagcagttcaatgccctggcacagctgcgtcgggttgaccagttgacaatcgatcctcagggaaacccagtggtcaactttacactctggaagtactacgtgctgttcaggctcagccacttcagcatgcagaaaataaatggaacagaggtgactcaaaatgacatgataatggctgaaaggctctttggaatcttagcacatgtagcatcctccgagctgccccagtaccgcatgatttcaattctgggtgatgccaggaaaaagcaattccgatatctactggaaagcaaaggtaaaaagcctggcatcatctgtgaggagaccagtgacagcaagaggttcttgggggaaaacacgaaccgcgctaccctgaattacaccacccgagaattctaccacgagaagctggaagaaataaaggacaagaagaagttctgcaggttgtatgtagaagacctggtgaaggaagccacagccatcaacatgaaaaacgaggctctgcagaagctgtggccacagatgttcatcgagcttgtgagagacgctgtcatagagatccgcagcaaggattcctacatgaaactctgcctgcagcagatcactgaccagaaatagggatggctgctacttcagacttgggcaattggagctttttcgaagtttggtaagatgcaggttagacatgatgagacaccaccactaccgcacagtctagaaagagtggcatcaaagcctgccccccccccccccccgcactgtggagaaaggagggaggcaggagagagggggactctttcccgtgcatgctgaccacacaaccttgggaaaccaagcagcgactggaggaggcctggctgctgggtcagaaatgcttcttcggctcccgctctgactggtgagtctgccccagtcccaagctcgctgtgtgctgatgggctagcatgagatgcctccaccaacctccagctgagactttcctctttttttgcctttttattttatgtcatgatttcaaagccaagcatatgtctttttttaatgagtgaagaataaatacattagt

SEQ ID NO: 772 - protein, 752 aa, Mus musculus
MIPGKYRSVSGRAANNVNCGLHLVIQTSSLSDKNKVEFRLNRETPPFPGRLLQHDLERNYSSRQGDGRVISPSPRNKSSCISSTTNVTDLCGLDMRAATTSLSAFGDSSIQTPSKPRIRQGCHSAGPNVSGDHISLVSSSMPAFPILQRSSEEKTLYSDRLTLERQKLTVCPIIDGEEHLRLLNFQHNFITRIQNISNLQRLIFLDLYDNQIEEISGLSTLKSLRVLLLGKNRIKKISNLENLKNLDVLDLHGNQITKIENVNHLCDLRVLNLARNLLSHVDNLNGLDSLTELNLRHNQITFVRDVDNLPCLQRLFLSFNNITSFESVSCLAESTSLSDITFDGNPIAQESWYKHTVLQNMMQLRQLDMKRITEEERRVASVVAKKEEEKKRESHKQSLLKEKKRLTINNVARKWDLQQRVANIASTQDRKDSESPPQESCQLDGGNISAFPEEAGSLDAGLSSALQGLSVTETHLVEIDGETLSLYGSGALECLDRNWSVQTAGMVTTVSFTFIEFDEIVQVLPKLKMKFPNSLHLKFRETNLVMLQQFNALAQLRRVDQLTIDPQGNPVVNFTLWKYYVLFRLSHFSMQKINGTEVTQNDMIMAERLFGILAHVASSELPQYRMISILGDARKKQFRYLLESKGKKPGIICEETSDSKRFLGENTNRATLNYTTREFYHEKLEEIKDKKKFCRLYVEDLVKEATAINMKNEALQKLWPQMFIELVRDAVIEIRSKDSYMKLCLQQITDQK

SEQ ID NO: 773 - DNA, 327 bp, Mus musculus
gcatggcaggacagagctggggccactgctgtgagaagtgtcagctctgtggctcttgcctaccacccaccatactttctgggccaggttgacatgcctctccctccatgtttaaaaagcaggaagtgggcagcacaagatgcctgcgtggtccctttctaccttcttctgtctcccagccatagctcccctggctccagggtcccggagggcagtctacccaagggtcctggggcccctacttatctgccacttaaggaggctagggtggcctggggacaggcccgccattcccctggtctgctgctcaggtgtctgctgctctcc

SEQ ID NO: 774 - skipped

SEQ ID NO: 775 - DNA, 615 bp, Mus musculus
aatccgcagcggcttctgagcagatcagactctcctcgttcgcgcagctcgctcgggctccttccagcaaccatgtctgacaaacccgatatggctgagatcgagaaattcgataagtcgaagttgaagaaaacagaaacgcaagagaaaaatcctctgccttcaaaagaaagcaattgaacaagagaagcaagctggcgaatcgtaatgaggcgagcgccgccaatatgcactgtacattccacgagcattgccttcttattttacttcttttagctgtttaactttgtaagatgcaaagaggttggatcaagtttaaatgactgtgctgcccctttcacatcaaagaatcagaactactgagcaggaaggcctcccctgcctctcccacccatctgatggtctggctagcagagagggaaaagaacttgcatgttggtgaaggaaaaagctgggtgggagatgatgaaatagagaggaaaattcaagatggtcaaagatgtcctgcaggatgtaaaatgcagtttaatcagagtgccatttttttttgttcaaacaattttaattattggaatgcacaatttttttaatatgcaaataaagttttaaaacctg

SEQ ID NO: 776 - protein, 88 aa, Mus musculus
LCCPFHIKESELLSRKASPASPTHLMVWLAEREKNLHVGEGKSWVGDDEIERKIQDGQRCPAGCKMQFNQSAIFFCSNNFNYWNAQFF

SEQ ID NO: 777 - DNA, 3108 bp, Mus musculus
tgtctgctcgtgggcttgctacgttggggcccggcgggcgcgcagcagcctggggaatactgccacggctgggtggacgcgcagggcaactatcacgaggggttccagtgccccgaggacttcgacacgcaggacgccaccatctgctgcggctcgtgtgcgctgcgctactgctgcgcggcagccgacgccaggttggagcaggggggctgcaccaacgaccgcggagagctggagcatcctggcatcaccgcgcaacctgtctatgtccccttcctgatcgtcggctccatcttcatcgccttcatcattttgggctctttagtggctatctattgttgcacctgtttgagacccaaggagccctctcagcagcccatccgcttctcgctccgaagctatcagacagagaccttgcccatgatcctcacctccaccagcctcagagcagcttccaggcagtccagcaccgctaccagctccagctccacgggaggatctgtgcggaggttctcctttgccagggctgagccaagctgcctggtgccctcatcacccccaccttacaccactggtcacaccatacacctaacccaaccgtccggtttcctggtatcaccccagtattttgcataccctctccagcaggagcccccattacctgggaagagctgtccagatttcagttccagttgacggggcgatggctgtgaataggccacacagggaaacggcagccagccaggtggagtgctgctgtctcggccaagccacgctcacttctgaagagatgtgtggtaacccaccatgctcatggaagaaagggctggaaagactcagcactttctggtcttgagattcttggctacaatgacaggaggtctgacttagcaatcatggcgaacgtgacaacctagtcaccttttgttaaaatagtcagcagcttgatgttcagtttgcaagttgaaagaaaatattttaccagacaattcatctaccctttgtagaaaaacaccctgtgttccttttcctgagttgaattgtagtacaaatatatacataaataaggacatacacttaactgtaattataaaggttcacttaaaaattaactattaagtaaactcgaagggccagtgaactacctatttataatttttggagcaacctaactataagcaatattagtatgatgagaacagttacttcttaaattaataacaaactttgttttaaaatatgagttttctttttccaaaatacaaggtttcactaaccacctgggaagcttagagttttaaatataaactcagacatgcgctgtaacccagattaaagttttaaatatctactcagacatgcgttgcaacccagattctaggtaaaaacacctcccccgccaacctgagggaatatttattgcagactttttgttcagcaatattagtgtttaaatagaagttggacaattgggtcttaaaacatttatttgtacaaagaattatatataaacgtgaagatttgtaatttaatttacttaccacattgacggtactaattatttagaagtcatactgtaattttgctcgaagtcaaagggaggggagacattagtgtaagcattcagtattccacattttatgtgccactgtgtttgatgtctggtgacgacacataaggaccaggctagaaaataaataaataaatttatccagtttcctgaactctatttggggttttcaaatcaggattcttgatttgaaattcatccagtcatctatcaccttcagtatccctgtaccaagtcaacagaggtagaggagggttaattggctcccttgttttccagttgagggtcagagaaaaccagttcgaaggcattgctccttagccaggaagttagagtggtgccaacttccagtcgcttctctcttccacatgcaaatctggtctttcttccaagtattcaagattatataaaaatcaacttaagagataattggatgtaaagaacaaatgtctgagactgtgctcaaacccacacaacgggatcaccatcctggttgtagtagctcttctgtcctgtttcgttgacagttttaagttaacttccgctgagttctctgttctaacacaagtcaagtgcagtgctgagcagttgtgtgttaacttatccaatcctccaaacaactcagaggtattgtaactaccatcttacaaaattggaaacggaggaaaagactaaagtgttcaactttctacagcaagttaatactggagtcggtgtgtagagaatgcctcaaacaccagattggcacctgctttaaaatttatttagcttctttttgagatagagtgtccctacatagcaaggctgctctagaactcacgatcccgccgcctcagcacccctgtacccacatactggggttatggttgtgtgacgtcataccctgctttaatgtgctgattcttggtcctactaagtgtggtgaatgtttcttattttgtaatctcctttagttgttgaaaaaatgaattacaggcaatatacctgtaattaaaataaacccattcagtgtgctaatgagagggagagagagcaagaacaagagccagagggagcagcaagagagagagagagaatcaaagcttcagtagactctgaaggactcacagagaggtgactgagctaatttcaccctcccatacccagttccacagtgcctgctagagtatggaaatgccccctcccatgctaagcacgattctagtttgtcagtggctgtattttctgtttcctgctgctttggagaacagaatgcattctttaggcgcaccgatgttgagtgactcaccgagtgctcacatctatatttccctgctgctgtgggattctccaaccaatcacctggccatatagtatttaaaactaggatggtgttgtctatgtaatttattgtaacgtggcattcagtgacattgagtcaaatcatatactcatgtacttggcgacacaaaaatgtatctttgtacaagccttctctttggaagctaagtggctgctaatactatttatgatcttaacataataaagccatcccatgg

SEQ ID NO: 778 - protein, 231 aa, Mus musculus
CLLVGLLRWGPAGAQQPGEYCHGWVDAQGNYHEGFQCPEDFDTQDATICCGSCALRYCCAAADARLEQGGCTNDRGELEHPGITAQPVYVPFLIVGSIFIAFIILGSLVAIYCCTCLRPKEPSQQPIRFSLRSYQTETLPMILTSTSLRAASRQSSTATSSSSTGGSVRRFSFARAEPSCLVPSSPPPYTTGHTIHLTQPSGFLVSPQYFAYPLQQEPPLPGKSCPDFSSS

SEQ ID NO: 779 - DNA, 1689 bp, Mus musculus
agatcccccccagcgcacttcggtcccagccttgagcccaggtggaagcacacgtgtgactctgggcaggtccggctagcaaagcaagcgaggctgttccctagcgccgaggcccccgctggggtctgcaatatgctgggacctggctcaccgccgagtccgacaatcattaaccttgggtgaccacagcagctggacacactcagccagggcactgggaggaggggctgagagatcccttctccgaggaaaaccaataaggacgcgggggtgccggctgcctctactaggtctaggaaggtctggaaggatgaaggggtttggacccgcctcatcccaggaggagccaggcacaggaaagtagtttggagcctgcgcgctagagtaagagcgttgtgggttcaaatcctgaccgtgtggcaaaggtcttcaagatctttgactcagtttacttcatttgcaaattggagatttaatggtagccacattccagggttggctggcttaaatgaagggatgtctacgggaagcgggaggggaggtaacctgccgccaggggctccaggccttagggatgtttagtaactaatgttgttgttagtactggcgggggcggaccctgtgagcgccctccccagcggcttcctgtaggggagcaggggccgccccctctccccttcctccaggcgctcttcctccccgcctctcctccccgccccgccccgtccctcctctttcctcggaggaaactttccgccggctggtccgtcgcggtgtccggccgcaccgccgtgcgaacctggtaaggcggacggggcggcccggcctgggtgtatgcggccaccggggagacgccactgccggggcgaggctgcgggacgctgacggggtggaggagctacgcgaggagcgagcgccttgggctctggaagacctgacctgggtgacctcgcaggctgacaggcgagctgcatcccagcagcatggatgccccaagaagggacatggagctactcagcaacagcctggcagcctatgcgcacatcagagctaaccccgagagcttcggcctctacttcgtgcttggcgtctgcttcggcctgctgctgaccctatgcctgctggtcatcagcatctcctgcgcgcctcgctcgcgaccccggacccctgctccgcgccgggacccccggagcagcaccctagagccggaagacgaggacgatgaggaagatgaggacaccatgacgaggctgggtcccgatgacacgctgcagggccaggagctgtccacagagcccgacgggccccttagtgtcaatgtcttcacgtcagcagaggagctagagcgggcacagcggctggaggagcgtgaacgaatcctgcgggagatctggcgcactgggcagccagacctgctgggcagtggcacgctcgggcccggagccacggccacgctgggacgaatgcactattactgacacccggcccctcagcgtggggccagagtactggatatgggactgcctcagggccttcaaaaaactgcctctgcccccaaatctctttggtgctattgggcgtcacatcgccgcctgctaagcactcttcatagggcaggtgtgggtgggaaaagaatgccagctcccaccttctcccgataataatgaccaatgaaaggtagtcttggcg

SEQ ID NO: 780 - protein, 164 aa, Mus musculus
MDAPRRDMELLSNSLAAYAHIRANPESFGLYFVLGVCFGLLLTLCLLVISISCAPRSRPRTPAPRRDPRSSTLEPEDEDDEEDEDTMTRLGPDDTLQGQELSTEPDGPLSVNVFTSAEELERAQRLEERERILREIWRTGQPDLLGSGTLGPGATATLGRMHYY

SEQ ID NO: 781 - DNA, 857 bp, Mus musculus
cctcacatacccatctgctcactcagcctggcacacttagcgtccctcacccaccttctcaattcagcacacactcttggcacattcttttcaacctcatcttctttcacttctcacacggccaaatagccagcctttcccttactgtcccgttggtcaccacagacctaccatgtccctagggccgctgaaattccaggcagtgggagagaagggtgaggaggatgaggaagagagcttagattctctgaaggccctgactgccaagcttcaactgcagacccgacggccctcatacctcgagtggactgccagagtccagagccgggcttggtacagagcccaagctagacctgagccagtcggacccggggccatctgtggctttgactccatggattctgcgcttgagtggctcagacgggagctgcaggagatgcgggctcaggaccggcagctggcagggcagctgctcaggctgcgggcccggctgcacagactgaaagtggaccaagtctgtcacctgcaccaggagcttctggatgaggctgagctggagatggagttagagtctgggactggcttgcctctggccccaccgctgcggcatctgggactcacgcgcatgaacatcagtgccagacgcttcaccctctgctgacagcagacttgggtgtctcttgcagtatctggggagaaagaaggaaggaagagggaccccggaggctctggctacctgctggggaaggtgggcacacttaggtttccaaaagctgaatttagagagcacaggatggaggggaggaggagaggaaactcgggccccaaatgtcttaataaaaaatgcattgaatccc

SEQ ID NO: 782 - protein, 74 aa, Mus musculus
MRAQDRQLAGQLLRLRARLHRLKVDQVCHLHQELLDEAELEMELESGTGLPLAPPLRHLGLTRMNISARRFTLC

SEQ ID NO: 783 - DNA, 3081 bp, Mus musculus
gcggccttgaagtcctccgtccattatcagggtcagaagttagccctgtgtctgctcagtaagatgaaagaaaaccacgggagggcagcgggtggtggagaactacgctgggctcgtgggcctgaaagtgaattttagctgctgtatgcaaagtccttggtgtgtggacagaagggagccggtaagaaggttacaacaggtcaggaataaataaccagcaggcggaggatcccggatcccgtcctgccttttgttgggtgaggagcgccaggcaagcgcgtccaccttggcttaggaaggaggcgattggaccgtccgcccgcagccgcagccccgggtgacgttgcacaggcatggacgggaagaaatgcagcgtgtggatgtttctacctctcgtgtttactttgtttacttcagctggcttgtggatagtgtactttatagccgtggaagatgacaaaattttgccattaaattcagctgcaaggaaatcgggtgcgaagcatgctccatacatcagttttgcaggtgacgaccctcctgcgagctgtgtgttcagtcaagtaatgaacatggccgccttcctagccctcgtggtagctgttctgcgcttcatccagctaaaaccaaaggttttaaacccatggctgaatatcagcggtctggcggcgctgtgtctggcttcctttggaatgaccttacttggtaatttccagctcacaaacgatgaagaaatccacaacgtggggacatccctgaccttcgggtttggcactctgacctgctggatccaggccgcactgacactcaaagtcaatatcaagaacgaggggcggagagctgggatcccgagagtcatcttgtcagctgtcattaccctctgcgtagtcctgtatttcatcctgatggcccaagatatccacatgtacgcagccagggtccagtggggcctggtcatgtgcttcctggcgtactttggcaccctggctgtggagttccggcactaccgctatgagattgtgtgctccgagtaccaagagaacttcctgagcttctcagaaagcctgtcagaagcttctgaatatcagacggatcaggtgtagcaacagtttgtccttgggggtgcggtgggtgtggcaacaggggaggggccaggaggatacactcacgggactcgacacatcacctcacgatgcttttcacacacacacacacacacggatgcacactcacggccatatctgacagaagagcttttcagggcaggttacttctttcttgaacaagcacaagccctcatgtatggaaatacacgctgtcacaccgaaaacatgcacgacagagccagaagcttgtgcatgaccacctccccgccccccacgccctcccagcaggccttgcgcttctcatccttttcccggttccaacctggcatcttcctcctgcaaagtaaggccggccgaatgtaaagtgagagtcaagccagctccctaagtcgccttcaggttggaagggtttgaggcgagcacgaggggaacttgagtggaaacctaggagcatctggctgcatgcaccccgcactaaagctggccgtggcctgagaggcgtgggcagagctttcccatcagtctgacatcatcactgttcagcggtcggctttgtggatccagagagagaagcatgctacagagagtgagcgggaaagaagccggccaccagcatttggacttgagtcactctgcctgaggaagatctccaaacgtgaatgctaccggggacagtcagccgcgaatggcacgaggtacggctgagagggcgtggcttggtttttccttccacagtgcatcacccacagttccagtttgcattttctttttgaagtgccactctcacgggtctatgtaggcctcgtgggcaaaggtgtggaccaaaggcaagaaccttgttttggcttcaagtatgaaaggggtatacgtgcaagcttaatttatatctgaagaaataataagaaaaaaagattctcgaagaatcgcaaaagaaatctacatggaggtgaaaggtatgagggctctgaggaaagacaggaggttagccctcttgctgctagtccaacccaggggagattttaacatccgtgtgttgctcaaattttatagtttgaggactggggactttaaattaaatttggaagttatagaagcaaattaaaaacatcgccctcccgcaaatcacattggcacaaatggagctgcaatactgctaagctgttcggagatgagcccagaggtgcaggagttcaaggccatcctagatccctgtgccaacaacagagtgccaagtgcacaagcaccccctcccccaaccaagtgcacaagcaccccctccccaaccaagtcacaagcaccccctccccaaccaagtcacaagcaccccctcccacattgtttcaaaaaactctccaaactcctagggggctcagacagcccggaatgtaatgtggaaaacgttgttttgtaaattcaccctgaagtatagcttcccaaggaagggttcaaatgctaaatctccgccccccagcatagcgccgagcacgagcacacagtaaatgtccaaatgaacagatttgctgctcgtttctgagtggaggtgaggagcatcaaagagattcagagacaaacgacagagtggaagacagagtgaagaaggagggggaggactcatcactacagggcagggcagggcagggagtgaaaagcccccagtggtgtgagaaagcctcgagtagagtattctcttattaaaaaaggcgtcttaccgtaaatactccagggggatgtctgttagttttgaaactgctatgaggtttctcttctttcctccttttcacttttctattttaaagatttttatcaaagaacaaacggttttattttactctccacactccaagtaaagagctttcggtgacacacttctctgcgttcttaagagtgtgcagcagcagcagcggcagcagcagcatccagccaatactgacattactcactgggacctggccactgaataaaggggttttatgct

SEQ ID NO: 784 - protein, 249 aa, Mus musculus
MDGKKCSVWMFLPLVFTLFTSAGLWIVYFIAVEDDKILPLNSAARKSGAKHAPYISFAGDDPPASCVFSQVMNMAAFLALVVAVLRFIQLKPKVLNPWLNISGLAALCLASFGMTLLGNFQLTNDEEIHNVGTSLTFGFGTLTCWIQAALTLKVNIKNEGRRAGIPRVILSAVITLCVVLYFILMAQDIHMYAARVQWGLVMCFLAYFGTLAVEFRHYRYEIVCSEYQENFLSFSESLSEASEYQTDQV

SEQ ID NO: 785 - DNA, 957 bp, Mus musculus
gtgtttaccgagaaagtgctgaagaggcttttccctaatgtttcaaatggtcaagaaaaggggactccccagcctccagcctccgagacaccatccaaggatgtgacccctgaagcagtacagcagaaggatgctcacagtctgacagctgaacgtcggctctacactgtgagtttgcctcctcaagggtatatcccctgtttgcccgaaccgaccagctgtgcggattctgagaatgcctccagcggtggtgacacagaagatctggaacttcctgagcaaccaaaaagacgaagaattagaagacacaaatcaaagaagaatattacaaacctcagtgacgttattgtaaggcaaaccgaactagagacccaacaaaagaaaatgcacccacagcatccagacccccctgccctgagcaaaaataaaagaagaaaactaaagacgaagctgcggcttaggaggaagagagaagccggcctagccacgaaggcctctggggtcagcttcacctaccagcccgagagcagcgaggaggcagaggctgaagatgatgtgggaggagaggaggaaggtgatccggagcgctcggtcacagacatcacccaggaagacattgagctggccagcagcagggcggagggcgtactgagttttctgaagtcaacacaagaactttatttctacgatgatactcccagagacgatccagctgtgtgcccagagaccgctgaagagctgcttcacctccttgagtccggaggcatgcctcccgcggacgtgctcatcctggaccacatgaaaaccctgctgcttctgcaggacactgagagactgaagagcgccctggagatgttcccagagcactgtacgatgcctccagaccatgccaagataatcacagccttctttaattattggatcacgcagattcttcctgaaaaaagcagcgaataa

SEQ ID NO: 786 - protein, 318 aa, Mus musculus
VFTEKVLKRLFPNVSNGQEKGTPQPPASETPSKDVTPEAVQQKDAHSLTAERRLYTVSLPPQGYIPCLPEPTSCADSENASSGGDTEDLELPEQPKRRRIRRHKSKKNITNLSDVIVRQTELETQQKKMHPQHPDPPALSKNKRRKLKTKLRLRRKREAGLATKASGVSFTYQPESSEEAEAEDDVGGEEEGDPERSVTDITQEDIELASSRAEGVLSFLKSTQELYFYDDTPRDDPAVCPETAEELLHLLESGGMPPADVLILDHMKTLLLLQDTERLKSALEMFPEHCTMPPDHAKIITAFFNYWITQILPEKSSE

SEQ ID NO: 787 - DNA, 5274 bp, Mus musculus
atggccaagttggggcgggagaaggacgagttggagcaggaactgcagaagtataagtccctctatggtgatgtggacagtcccctcccaacaggggaggctggtggtccccccagcaccagggaggcagagctgaaactgcggctgaagttggtggaggaggaagccagcatcttgggcaggaagatcgtggagctggaggtggaaaaccgtggcctcaaagcagagatggaagacatacgggttcagcatgaacgcgagggaacaggcagggaccacgtgccaagcactcctacctcacccttcggagactcaatggagtcctccacggagctccgccggcacctgcagtttgtggaagaagaggctgagctgctgaggagatccatctctgagattgaagatcacaaccggcagttgacccacgagctgagcaagttcaagtttgagcctcaccaggagtcagggtggcttggggacggtgtgtctaagggccccgcggccagcgttcccctgcaggaggagctgaagtcagccaggctacagatcgatgagctgagcgggaaggtactgaagctgcagtgtgagaaccggctgcttctgtccaatgcccaacggggtgacctcgccgcacatctggggctgcgcgctcctagcccccgggacagtgatgccgagagtgacgcgggcaagaaagagagcgatggggaggagggccgccttccccagccaaagcgagaaggccctgttggtggggagagcgactcggaggacatgtttgagaagacctcgggcttcggaagcggaaagccgtcggaggctagtgagccatgcccggcagagctgctaagggtccgggaggataccgagtgcctggtgaccataaagctggaggctcagcggcttgagcggactgtggagcgcctcatctctgatacagatggtttcatccacgactcaggactgcggggcaatggattggcctcacctggagtccaaggcggaggaggtgagggcaacagcccgagtgagccccacttgttggagaccatcaatgtgaggatgaaggctttcaggaaagagctgcaggccttcctggagcagatgtcccggattgtggatggtctctcgcccttatcccacctcacagagtcatccagcttcctctccactgtgacttctgtgtcccgggactcccccatcgggaccctgggaaaggagttgggcccagacttgcagtccaaactgagagagcagctggaatggcagctcaatcaggatcgaggggacgagcgagagggcctgcgtctccgagccactcgggagctgcaccggcgcgcggatggggattccgggagccaccatgggctgggaggccagagctgtttcaacctagagatggaggaggaccacctctacgccctgcggtggaaggaactggagatgcacagcctggccctgcagaacacccttcacaagcggacgtggagcgacgagaagaatctgctgcagcaggagctcaggtccctgaagcagaacatcttcctcttctacgtcaagctcaagtggctgctgaaacactggcgccaaccaaagagtatagtcgaagttaagatcattatgcctcctggttttcagagcgaacatccagagaatgtgcctgggcttgctgagcttggagtccagggggttcaccagacagatgggatagaccaggaggatgctgaccaaggctgtagccttcccatgggagagcatgccccacactccctggtacagatcagcgaacacggatcacggctacagagttcagacgggggaccacttaacaaacaggtggtggaaaaccagcagctcttcagggccctcaaggctctgctggaggacttccgttcggagctgcgcgaagacgagcatgcgcggctgcggctgcagcagcagtacgccagcgacaaggctgcgtgggatgtggagtgggctgtgctcaagtgccgcctggaacagctggaagagaagactgagaaaagcttgggcgagctggactcctctgctgagggcaaaggggccttgaagaaggagagagaggtgcaccagaaactgctggctgacagccacagcctggtgatggacctgcgctggcagatccatcaccgagagaagaactggaaccgggagaaggtggagctgctggagcgtctggacagcgagcggcaggagtgggggcgacagaaggaggagctcctgtggcgggtggagcagttacagaaagagaaaagtccccggagaagcggcagtttcctctgcagccgaagggaagacgacacacgcccttacccgcaccaaggaagccttcactcctccagacctgtgtccatgtggccctgtgaagacgccgactccatcccatttgaagaccggccgctctccaaactgaaggagtcggacaggtgctcggccagtgagaacctgtacttggacgctttgtccctggatgatgatccaggggatccgccacccctcaggaactgccttgccgaggaagaagaaagtcgcaagggcaatcttcagagggctgtgtctgtgtcctgtatgtccgagttccagcgtctgatggacgtctctccgttcctgcctgagaaggggctaccttccgccggcagcaaggaggatgtcactccacccttgtctcccgacgacttgaaatacattgaagaattccatagcaacgactgggattacgcatcccccagggctgaggccgatcggcctccagacccctgggcagacaggaccgagatggggagggtggggcatgaagccaccacagagccttgtccggatccctcctggtatctgaccacaagtgtcacgatgacgacagacaccatgaccagtccggagcactgccagaagcagccactgcggacccatgtcctcactgagcagtctggtgtgcacgtgctgcacagcccgcctgccattcgccgggttgacagtatagcatcaggcggcgagggcaggagccgagcggaccccgagggcccctttcctatgagcagagcaagagggaacctggcagatgccaaggggggtcatccagaacctgtgctcaacaggtggccttgcacgccacccagacatccccgggactgtgtggaggggtctcttcgccccctcgacagacctatctgcccctccctgggatttgcctcccctctgaacagcctagatatgtctaagaacatgagtgatgacatgaaggaggtggctttttctgtcaggaatgccatctgcgccggtcctgccgagccacacgtcagggatatggcctgccagaccaatgggtccaggacagcagggacgcagaccatccagacaatcagcgtgggcctgcagaccgaggccctacgtgccagcggcgtcaccagcagcccccacaagtgtctcacgccaaaagccggaggtggcaccacacccgtgtcttctccttcccgcagccttaggagtagacaggtggcccctgccattgagaaggtgcaggccaagtttgaacgcacctgctgctccccaaagtacggttctcccaaacttcagagaaagcccctctcaaaagctgaccagccaaatagcaggacctcaccaggcataccccagaaagggttcagcgagtcagcctgggcccgctccaccaccacgagggagagccctgtgcacaccaccatcaatgatggcctctccagcctcttcaatatcatcgaccacagtcccatcggggtgcgggctgggagccgatctcggtcagcagaacctcgacaggagctgggtccaggccaggaaacgggcaccagttccagagggaggtcgcccagcccgctaggggtaggctccgagacgttcagggaggagggaggagagagcacgccagtgagacaggacttatctgcgccccctggctacacgctcactgagaatgtggcccggatcctcaacaaaaagttgttggagcatgccttaaaggaggagaggaagcaagccagccatggctcctcaggtctcaccagcgacagccacactggagaaccagtgccagccgagccaggatccatggaggaactgccttgttctgcgctcgcgccctccctagagccctgcttttccaggccagagagaccagcaaaccgccgccttccatcccgttgggccccaccttcccccactgcctcacagtcacagtcacccggacacccgatgtccatggaggaacacggtgaggaggacccaccagaggagaagccacacctgtgacaggatgcaagcttgcgtggatgatcgccggaatagttcactgtaatttgcataaccagaccatcaccgccatcagccaacctccatcccaaaggaaagatgtagatcctttctcaaggtcgaaggatgcttttaaaaacacacggctactgaatgttcaacctggtaaactgagatgtttcgggaatgaaacagtaaacgtgcctgtaatcattttttcatagctcagaaaactatttttgtctcccatcttttttacacatgatatattaaacaaaaaaggtaaataaggtataaatagatttaaagagttttaaaatgtacatttgaagagattccgagcacccttgttctcagttctgcctgcctgttgaatttgcactgttccgttctggttgggtttctccatgttgagttcggagtgttctaagttaaattttattttgtccagtcttaatttttcaggagtctttcttaacgctttagactgtcttaactcagtgaactttttgtaatgataaggccgtgaggccagaagacgagagtgtctgtcatctgaaaggatgcaggccaaccttgctgaaaaggtacggagcccttcagatagacttaagactctgcgtgacccatctgcccagcctgaccgcacgtcctcgggcacctgtacatacactgctctgtccctgccctcacctgcgtgtgtgtcagtctggtctactgtaacttgttgtgaagttccttgtaccgtgtgtactgttgctgttggtctcttgtaccagtaagacaatggctccattttttttaattattgttaaaacattaactgatggtgtacaaatctcacttgacatttttcttgtttaaggaaaagcaccataaaaaaaaaaataaggaggccaaaccgagacagacaaaggtgcctcaggtctgcctgagaccacggtgacatggaaataaagtccttacaag

SEQ ID NO: 788 - protein, 1434 aa, Mus musculus
MAKLGREKDELEQELQKYKSLYGDVDSPLPTGEAGGPPSTREAELKLRLKLVEEEASILGRKIVELEVENRGLKAEMEDIRVQHEREGTGRDHVPSTPTSPFGDSMESSTELRRHLQFVEEEAELLRRSISEIEDHNRQLTHELSKFKFEPHQESGWLGDGVSKGPAASVPLQEELKSARLQIDELSGKVLKLQCENRLLLSNAQRGDLAAHLGLRAPSPRDSDAESDAGKKESDGEEGRLPQPKREGPVGGESDSEDMFEKTSGFGSGKPSEASEPCPAELLRVREDTECLVTIKLEAQRLERTVERLISDTDGFIHDSGLRGNGLASPGVQGGGGEGNSPSEPHLLETINVRMKAFRKELQAFLEQMSRIVDGLSPLSHLTESSSFLSTVTSVSRDSPIGTLGKELGPDLQSKLREQLEWQLNQDRGDEREGLRLRATRELHRRADGDSGSHHGLGGQSCFNLEMEEDHLYALRWKELEMHSLALQNTLHKRTWSDEKNLLQQELRSLKQNIFLFYVKLKWLLKHWRQPKSIVEVKIIMPPGFQSEHPENVPGLAELGVQGVHQTDGIDQEDADQGCSLPMGEHAPHSLVQISEHGSRLQSSDGGPLNKQVVENQQLFRALKALLEDFRSELREDEHARLRLQQQYASDKAAWDVEWAVLKCRLEQLEEKTEKSLGELDSSAEGKGALKKEREVHQKLLADSHSLVMDLRWQIHHREKNWNREKVELLERLDSERQEWGRQKEELLWRVEQLQKEKSPRRSGSFLCSRREDDTRPYPHQGSLHSSRPVSMWPCEDADSIPFEDRPLSKLKESDRCSASENLYLDALSLDDDPGDPPPLRNCLAEEEESRKGNLQRAVSVSCMSEFQRLMDVSPFLPEKGLPSAGSKEDVTPPLSPDDLKYIEEFHSNDWDYASPRAEADRPPDPWADRTEMGRVGHEATTEPCPDPSWYLTTSVTMTTDTMTSPEHCQKQPLRTHVLTEQSGVHVLHSPPAIRRVDSIASGGEGRSRADPEGPFPMSRARGNLADAKGGHPEPVLNRWPCTPPRHPRDCVEGSLRPLDRPICPSLGFASPLNSLDMSKNMSDDMKEVAFSVRNAICAGPAEPHVRDMACQTNGSRTAGTQTIQTISVGLQTEALRASGVTSSPHKCLTPKAGGGTTPVSSPSRSLRSRQVAPAIEKVQAKFERTCCSPKYGSPKLQRKPLSKADQPNSRTSPGIPQKGFSESAWARSTTTRESPVHTTINDGLSSLFNIIDHSPIGVRAGSRSRSAEPRQELGPGQETGTSSRGRSPSPLGVGSETFREEGGESTPVRQDLSAPPGYTLTENVARILNKKLLEHALKEERKQASHGSSGLTSDSHTGEPVPAEPGSMEELPCSALAPSLEPCFSRPERPANRRLPSRWAPPSPTASQSQSPGHPMSMEEHGEEDPPEEKPHL

SEQ ID NO: 789 - DNA, 1581 bp, Mus musculus
agggctgtgtctgtgtcctgtatgtccgagttccagcgtctgatggacgtctctccgttcctgcctgagaaggggctaccttccgccggcagcaaggaggatgtcactccacccttgtctcccgacgacttgaaatacattgaagaattccatagcaacgactgggattacgcatcccccagggctgaggccgatcggcctccagacccctgggcagacaggaccgagatggggagggtggggcatgaagccaccacagagccttgtccggatccctcctggtatctgaccacaagtgtcacgatgacgacagacaccatgaccagtccggagcactgccagaagcagccactgcggacccatgtcctcactgagcagtctggtgtgcacgtgctgcacagcccgcctgccattcgccgggttgacagtatagcatcaggcggcgagggcaggagccgagcggaccccgagggcccctttcctatgagcagagcaagagggaacctggcagatgccaaggggggtcatccagaacctgtgctcaacaggtggccttgcacgccacccagacatccccgggactgtgtggaggggtctcttcgccccctcgacagacctatctgcccctccctgggatttgcctcccctctgaacagcctagatatgtctaagaacatgagtgatgacatgaaggaggtggctttttctgtcaggaatgccatctgcgccggtcctgccgagccacacgtcagggatatggcctgccagaccaatgggtccaggacagcagggacgcagaccatccagacaatcagcgtgggcctgcagaccgaggccctacgtgccagcggcgtcaccagcagcccccacaagtgtctcacgccaaaagccggaggtggcaccacacccgtgtcttctccttcccgcagccttaggagtagacaggtggcccctgccattgagaaggtgcaggccaagtttgaacgcacctgctgctccccaaagtacggttctcccaaacttcagagaaagcccctctcaaaagctgaccagccaaatagcaggacctcaccaggcataccccagaaagggttcagcgagtcagcctgggcccgctccaccaccacgagggagagccctgtgcacaccaccatcaatgatggcctctccagcctcttcaatatcatcgaccacagtcccatcggggtgcgggctgggagccgatctcggtcagcagaacctcgacaggagctgggtccaggccaggaaacgggcaccagttccagagggaggtcgcccagcccgctaggggtaggctccgagacgttcagggaggagggaggagagagcacgccagtgagacaggacttatctgcgccccctggctacacgctcactgagaatgtggcccggatcctcaacaaaaagttgttggagcatgccttaaaggaggagaggaagcaagccagccatggctcctcaggtctcaccagcgacagccacactggagaaccagtgccagccgagccaggatccatggagaaccaaactgtcttactaactgccccctggggactctag

SEQ ID NO: 790 - protein, 526 aa, Mus musculus
RAVSVSCMSEFQRLMDVSPFLPEKGLPSAGSKEDVTPPLSPDDLKYIEEFHSNDWDYASPRAEADRPPDPWADRTEMGRVGHEATTEPCPDPSWYLTTSVTMTTDTMTSPEHCQKQPLRTHVLTEQSGVHVLHSPPAIRRVDSIASGGEGRSRADPEGPFPMSRARGNLADAKGGHPEPVLNRWPCTPPRHPRDCVEGSLRPLDRPICPSLGFASPLNSLDMSKNMSDDMKEVAFSVRNAICAGPAEPHVRDMACQTNGSRTAGTQTIQTISVGLQTEALRASGVTSSPHKCLTPKAGGGTTPVSSPSRSLRSRQVAPAIEKVQAKFERTCCSPKYGSPKLQRKPLSKADQPNSRTSPGIPQKGFSESAWARSTTTRESPVHTTINDGLSSLFNIIDHSPIGVRAGSRSRSAEPRQELGPGQETGTSSRGRSPSPLGVGSETFREEGGESTPVRQDLSAPPGYTLTENVARILNKKLLEHALKEERKQASHGSSGLTSDSHTGEPVPAEPGSMENQTVLLTAPWGL

SEQ ID NO: 791 - DNA, 468 bp, Mus musculus
gttgcaggcacctttagctgtaccatgaagttcacagtccgggattgtgaccctaatactggagttccagatgaagatggatatgatgatgaatatgtgctggaagatcttgaagtaactgtgtctgatcatattcagaagatactaaaacctaacttcgctgctgcctgggaagaggtgggagatgcctttgaaaaagaagaaacctttgccctgagctctacaaaaacccttgaagaagctgtcaacaacatcatcacatttcttggtatgcagccatgtgagaggtcagataaagtccccgagaataagaactcccactccctctatctagcaggtgtatacagaggtggctatgacttattggtgcggtccaggctggccctagctgatggagtgaccatgcaggtgactgtgagaagcaaagagagaacgcctgtggatgttatcttggcttctgtgggataa

SEQ ID NO: 792 - protein, 155 aa, Mus musculus
VAGTFSCTMKFTVRDCDPNTGVPDEDGYDDEYVLEDLEVTVSDHIQKILKPNFAAAWEEVGDAFEKEETFALSSTKTLEEAVNNIITFLGMQPCERSDKVPENKNSHSLYLAGVYRGGYDLLVRSRLALADGVTMQVTVRSKERTPVDVILASVG

SEQ ID NO: 793 - DNA, 1626 bp, Mus musculus
gcagtagtacgacgaaagatggcgacgagcggcggcgaagaggcggcggcagcagctccagcgcccggagccccggcgaccgggcaggacacgaccccgggctgggaggtggcggtgcggcccctcctgtccgcgtcctactccgccttcgagatgaaggagttgccgcagctggtggcctcagtcatcgagagtgagtcagaaatcctgcaccacgagaagcagtacgagccgttctactcctcctttgtcgcactgtccacgcactacatcaccacggtctgcagcctcattccccggaaccagcttcagtcggtggcagctgcctgtaaagttctcattgagttttccctcctgcgtctggagaaccctgacgaggcatgtgctgtatcccagaaacacttgattctgctgataaaaggcctgtgcactggctgtagccgactagacagaacagagattatcacctttacagcaatgatgaagtccgccaagcttccacagacagtgaagacgctttcagacgtggaagatcagaaagagctggcctccccagtaagccccgagctcaggcagaaggaggtacagatgaactttttgaaccagctgacctcagtttttaaccctagaactgtaccatctcctcccatcagtccacaggctctggtggaaggagaaaatgatgagcagtcatctccagatcaggtctctgctgccaagaccaagagtgtgttcatagctcagaatgtggctagccttcaagagcttgggggttccgagaagctactccgagtatgcctgaacctgccctatttcctgcgctacatcaatcggtttcaggatgctgtggtggccaattccttcttcatcatgccagcaacagtagctgatgccaccgctgttcgaaatggttttcactcactggtgattgatgtaaccatggccttggataccctttccctgcctgtgctggaacccctcaatccttctcgtctgcaagatgtgacagtgctcagcctcagctgtctgtatgcaggtgtgagtgtagccacgtgtatggccatccttcatgtgggtagtgcccagcaagtgcggacagggtccacaagctccaaagaagatgactacgaaagtgatgcagccacgattgttcagaaatgtcttgagatctacgacatgattggacaggccatcagcagctcccgccgcgcaggtggtgagcacttccagaacttccagctgttgggcgcctggtgcctgcttaatagcctcttcctcatactgaacctcagccccacagccctggctgacaaggggaaagagaaggacccattggctgcccttcgcgtcagagacatcctttctcgtacaaaggagggagtgggctctcccaaactggggcctggcaaagggtgtgtgtctgcctgcaagctccatttctgaatgctgtgctgtgttccctgtttcccagggtgatgagctgctcgccccacatcagcgcttggttactgcctgctgtaggttgttgaggggcctatgcatactgagcacactgcctcgagcattaaagccagctggcttctctgtgtcagaggactcctcttccagctgtgtgaatttaatagc

SEQ ID NO: 794 - protein, 480 aa, Mus musculus
AVVRRKMATSGGEEAAAAAPAPGAPATGQDTTPGWEVAVRPLLSASYSAFEMKELPQLVASVIESESEILHHEKQYEPFYSSFVALSTHYITTVCSLIPRNQLQSVAAACKVLIEFSLLRLENPDEACAVSQKHLILLIKGLCTGCSRLDRTEIITFTAMMKSAKLPQTVKTLSDVEDQKELASPVSPELRQKEVQMNFLNQLTSVFNPRTVPSPPISPQALVEGENDEQSSPDQVSAAKTKSVFIAQNVASLQELGGSEKLLRVCLNLPYFLRYINRFQDAVVANSFFIMPATVADATAVRNGFHSLVIDVTMALDTLSLPVLEPLNPSRLQDVTVLSLSCLYAGVSVATCMAILHVGSAQQVRTGSTSSKEDDYESDAATIVQKCLEIYDMIGQAISSSRRAGGEHFQNFQLLGAWCLLNSLFLILNLSPTALADKGKEKDPLAALRVRDILSRTKEGVGSPKLGPGKGCVSACKLHF

SEQ ID NO: 795 - DNA, 1845 bp, Mus musculus
atgagatcgccaaggaccttcacgttctacttcctgcttcttgtgatttgttcttcagaagctgcgctgagcacaccaacagagcccattgttcaaccttcaattctccaagaacatgagctagccggggaagagctactgaggccaaaaagagcagctgcagcgggtgatcgcgtggcggaagaatacatggtggatattgagatcagctttgaaaatgtctccttcctggagtccatcagagctcacttgaacaacctcagttttccaattcgagggaccgaagctgacattttgaacatagcaatgactacagtctgcactcctgctggaaatgacctcttgtgcttctgtgagaaaggctaccagtggtctgaggaaaggtgtctccactctctcacttgtcaagactatgacagtgccctgccaggcggctactgcagttgtctgaaaggacttcctccccagggacctttctgccagctcccagaagcattcattaccttaaaactcaaagtcagactgaacataggatttcaagaagacctaaagaacacgtcttctgccctctataggtcctacaagactgatctggaaagagcgttccgagcgggttacagaactttaccaggattcagatcggtgactgtgacacagttcaccaagggcagcgtggttgtgaactacgtagtccgggttacatcggcaccactgcctggatctattcataaagccaatgaacaagtcatacagaacctcaaccatacttacaaaatggactacaactccttccagggaaccccgagcaatgagacgaaattcactgtcataccagaattcatctttgagggagacaatgtgactctggagtgtgaaactgagttcgtgacctccaacacgtcttggtactatggagaaaaacgctctgacatccagaacagcgacaaatactccattcacaccactgtcatcaacaatataagcctgatcacccgccttaccatttacaacttcacacagcatgatgcgggcatgtatggttgcaatgtgacattggatatttttgaatatggaacagtcagaaaattagatgtcactcccatccggattttggccaaggaggagagaaaggtggtgtgtgacaaccatcctatatcgctgaactgctgcagcgagaatattgcaaactggagcagtattgaatggaaacaggaagggaagataagcattctagggaacccagaatcagacctagagtctagctgcagcacttacacgctcaaggcagatggaacccagtgtcccagtgggtcttctggaacaacagtcatctacacatgcgagttcgtcagtgcctatggagccagaggcagtaagaacatagctgtgaccttcacctctgtagccaacctaacaataacccgggacccaatttctgtttctgagggacaaagcttttctataacctgcctcagcgatgtgagtagctttgatgaggtgtactggaacacctcagctggtattaaaatccacccaaggttttataccatgaggaggtatcaggatggagcagagtcggtgctgatggtgaagacctccacccgagagtggaacggaacctaccactgcatatttagatataagaattcatacagcattgccaccaaagatgtcaccgttcacccgctgcctctggtgtcagacatcatgatggatcctttggaagccagtggtctgtgtaccagttcccatcaattcaaatgctgcgtagaagaggatgcaggggaagagtacgctgtgactttccacgtggactcctcatcctttcccgctggtaagaggcag

SEQ ID NO: 796 - protein, 615 aa, Mus musculus
MRSPRTFTFYFLLLVICSSEAALSTPTEPIVQPSILQEHELAGEELLRPKRAAAAGDRVAEEYMVDIEISFENVSFLESIRAHLNNLSFPIRGTEADILNIAMTTVCTPAGNDLLCFCEKGYQWSEERCLHSLTCQDYDSALPGGYCSCLKGLPPQGPFCQLPEAFITLKLKVRLNIGFQEDLKNTSSALYRSYKTDLERAFRAGYRTLPGFRSVTVTQFTKGSVVVNYVVRVTSAPLPGSIHKANEQVIQNLNHTYKMDYNSFQGTPSNETKFTVIPEFIFEGDNVTLECETEFVTSNTSWYYGEKRSDIQNSDKYSIHTTVINNISLITRLTIYNFTQHDAGMYGCNVTLDIFEYGTVRKLDVTPIRILAKEERKVVCDNHPISLNCCSENIANWSSIEWKQEGKISILGNPESDLESSCSTYTLKADGTQCPSGSSGTTVIYTCEFVSAYGARGSKNIAVTFTSVANLTITRDPISVSEGQSFSITCLSDVSSFDEVYWNTSAGIKIHPRFYTMRRYQDGAESVLMVKTSTREWNGTYHCIFRYKNSYSIATKDVTVHPLPLVSDIMMDPLEASGLCTSSHQFKCCVEEDAGEEYAVTFHVDSSSFPAGKRQ

SEQ ID NO: 797 - DNA, 2824 bp, Mus musculus
gttctccccacaggcgctgcaggaggagcgcaaggccgaggactgctcgccgagtaggctcgcacggcaagtaggctccgaggtggcgaaatggattcgagtcaaccgcagaccccgaaaacgcaaacgagggaagcgagaagtcgcctttgaaaagctttctccagaccagatcgtcttgcttttggagtggctcttagagcagaagacgctgagccctcagacactgcactgtctccagcagacttaccatctcccagagcaggatgcagaggttcgccatcgatggtgtgaactggttattaagcacaagtacacaaaggcatacaatcaggtggagaggttcctactggaggaccaggccatgggcatatacctgtatggggagctgatggtgagtgaggacgccaggctgcagcagctagcccacaggtgctttgagctggtgaaggaacacatggacagagcatcggcccaggtggtgactgaaatgctgttctaaagagtaaccaggactgccaccctgcaccacagccctgcaccaccatgcctggttccaaatagctttaacgggggtgtatgcaggtcaatgaaagactccttccaccgttaccccaggacttggaccgccttgctacaagatgtcctgtgtttttctttttaccacattttggctccatctcaagtttgtgacatcaaaatacagagggaccacactcaactacttttctgcgctgtgatcagactggtgtttcaggtttacagtacaggccagggggaaagcacatagaaccatgcaagcaaaagttgttgataaggtgtgtctgatttcacacctgcttttaaacatctgacctgcatgtatctgtagttataatcgatcacatgacaacacctgaggtggagaggtcaccactgttcctccacaatgtagacctggggcacacagcagcccctccctcagactgacttaacttctgaaggcaaatagcatttcctctgaattttcgtttcctgaagccccttaaggtcacagcttagcagtaattttttaatgcttccaagacctcatcgtggacatgaagtacagttctgatgagcactaaaatatccaactttcccccaaagcagcaggtatgcaaactgttctccagatcaacacagtgcttctttgtttttgcttaaaagcgagtgttgactttgggggatgggaaggcaggcagcctaaattcacaatgttggccaagactgacctgggtttccggaacctagtctccagtgtgttttgaggtccccagactgcttcccaacaagcctggcctcagacttatatataatgggcccaagacagttgaagtctttactttcctgttataccaataaagttttcctactgtgtccccactgaatgaaaagaagaaataaaaagaggacatgactactcctaggcacagtagaggagaagggttaaaaaccatcatgcagagatcccacgaaggccactgtgctccctggaccccagctctctctgagagggctttgtggtgtaagacatattgacaaaaacctacatcttataggcaaaggaaaggaaaggactttgtaaaatactttggaattctggatagtctacttacctaaaacagatctttctcaagtatagggaaagaagccacagtggccacagcacagaaacatgagccctcctctatccccctcttcctgtcacaggccatgtctacagactgtctcaccagagggaaaaggctcctttatgctgcagagctgagtcattccctccacaggagctcacagacagtcagagatcaacaccagtgattacagacatggccttgggaagtagactggcagatgaagcaaaaaagactaggctctaacaatagtttaccaaatctttcaaaatcttttcctttgaggggaaaaaaaaaaatcttccctaaattgcaaggcctcatccttcacgtaatcctgtcttctgtccaaggctgcatggagcaaaggaggaaaaacaaacaagggcactgttgtgttctggcttagcctgtccctggcagccttggcaaagctgttatcagaggcggccttcgttttcctcattcctaggaagcgaaacatgttctcatgtaaacctacacacagactggactcccgagagcttgagtggacaagcgcattgtgtgtccaggaggaagagaaggttagcatgctgctcctctctaccagtcactacaacagaggcagaggtacctccgctcaccttcagggtgctgggacagcgctgcagcaagacatggagcaccgtaaggaaagtaggtcctgagggcaaacgtcagctgcaagagttaaagaggaaatggcatgaatgctggggctgagaggaagtgaggatgctgcctgcctcagcctgtgacccactgtaccaatacatcctcaaacatgtttataagcatgcttccagttatctcataaatagccaaaacaaaaaacaaaaacaaaacaaaacaaacaaaactcaaaaacatctttaagagccattttctgaactgagggaaatgatatgatcttcctgccattttaactgaggtttctcctcacagaagcccagccacaaacattatcttctacttcagagagggcttagacccttggactcaggatctcagtgtgtcgttcatgacaatgaaagcctctagcaagcagctcttacggtgagaacatgaggctggactgacttaccagcattcccccatggcacagagggtttgttgttgttgttgtttttaaataaaataaaaacaagacc

SEQ ID NO: 798 - protein, 166 aa, Mus musculus
FSPQALQEERKAEDCSPSRLARQVGSEVAKWIRVNRRPRKRKRGKREVAFEKLSPDQIVLLLEWLLEQKTLSPQTLHCLQQTYHLPEQDAEVRHRWCELVIKHKYTKAYNQVERFLLEDQAMGIYLYGELMVSEDARLQQLAHRCFELVKEHMDRASAQVVTEMLF

SEQ ID NO: 799 - DNA, 2450 bp, Mus musculus
gagtgctccctgtcatctgagtcctcagaatcttcggatgcaggtctgtgcatggactcccccagccctgtggacccgcagatggcagagcgcacgtttgaacaggccattcaggcagccagtcgggtcattcaaaatgagcagtttaccataaaacgcttccgatccttaccagtgaggctgctggaacacagtccggtgctgcagagcatcaccaactcccgagcactggacagctggaggaaaactgaagcaggctaccgagccgccgccaatagtcctggggaggacaaagagaatgtgcgcttccagagaccaagatggaggagctccagggaggaagggtacactcggtttatcctgatagttcctctccaatcttgcccacaggatggatatatcttcaagatgccacaggagctccctcattccagctctgcccaagctttggcagaatgggtcagccgcagacaggcctttacccagaggcccagctcagcccctgacttgatgtgtcttaccactgagtggaagatggaagtagaggagctgagcccggtggcacagtcttcttccttgactcctgtcgaaagggcttctgaagaagatgacggatttgtggacatcctggagagtgatttaaaggatgacgagaaggtccccgcgggcatggagaacctcattagtgccccactggtcaaaaagctggataaggaagaggaacaggatctcatcatgttcagcaagtgccagaggctcttccgctccccatccatgccatgcagtgtgatccgacccatcctcaagaggctagagcggccccaggaccgggatgtgcctgtccagagcaagcgcaggaaaagtgtgacacccctggaagagcagcagcttgaagaacctaaggcccgtgtctttcgctcaaagtcgctgtgtcatgagattgagaacatcctggatagtgaccaccgtggactgatcggagattactctaaggccttcctcctgcagaccgtggatggcaaacaccaagaccttaagtacatctcaccagaaactatggtggccctgttaacaggcaagttcagcaacatcgtggagaaatttgtcattgtggactgcagatacccctatgagtatgaaggcgggcatatcaagaatgctgtgaacctgcccctggaacgggatgctgagacctttctgctgcagcgtcccatcatgccttgtagcctggacaagagaatcatcctcattttccactgtgaattctcgtctgagcgtggaccacgaatgtgccgcttcatcagggaacgggaccgtgcagctaacgactaccccagcctgtactacccggagatgtacatcctcaaaggcggctacaaggagttcttcccacagcatccgaacttttgtgagccccaggactaccgacccatgaaccacgaggctttcagggatgagctgaggaactttcgccttaagactcgcagctgggctggggaacggagcaggagggaactttgtagcaggctgcaagaccagtgatgatgagcctgctgccatccttacctcgtgaggcttgggagccagtgggtcccatgggcctgtgaggccacctaccttatagaggcctcaggtgctatagggggttgggggcatggtgtggtgtcacatctgtctgcccctgtcctcaattttcctgtctcactccacttattttctgtatcttggtactggtcccagcttaaagagctgaacctgagggtggatgccagctgaggagaagtctgttgtgttcagtgggagtccttttacagtcttttttccttgtttgtgttgactctttgtcttcccgctttttggggagagcctcagcccgttaggatggcacagtagcttcttgcatggcctggatgcaggatgctactctgctacacagggctgtgtctactctcctctcctggccactgcatagacttatgctctccattggaagcataagtgctttctcttctgttgtagtcttacctgtagctttcatttttttgtctgtctgacacactgaccgctggggaggcttccttgtacagcttggggctagagattcaaatatcacttactcgttaggcctggcttttgttagcccagaaagggatcttgccctttaagacccccagggctagagggaaggcctgactcaggagcctctgggagccccatcctcactactgtgaaccccagagcctcgctggtcagcacttgctgctgggcaatggaccagtcaccgagctttgctgtttgatccttctctgcccttccctgttttcctttctatatctggcccagaagacctcttgtatgtgtggtttttctgtgttgtactagtgacttgagtctaggccctttgttgcatggtcatggatgcacagtgccttatatacatgtatgcacac

SEQ ID NO: 800 - protein, 513 aa, Mus musculus
ECSLSSESSESSDAGLCMDSPSPVDPQMAERTFEQAIQAASRVIQNEQFTIKRFRSLPVRLLEHSPVLQSITNSRALDSWRKTEAGYRAAANSPGEDKENVRFQRPRWRSSREEGYTRFILIVPLQSCPQDGYIFKMPQELPHSSSAQALAEWVSRRQAFTQRPSSAPDLMCLTTEWKMEVEELSPVAQSSSLTPVERASEEDDGFVDILESDLKDDEKVPAGMENLISAPLVKKLDKEEEQDLIMFSKCQRLFRSPSMPCSVIRPILKRLERPQDRDVPVQSKRRKSVTPLEEQQLEEPKARVFRSKSLCHEIENILDSDHRGLIGDYSKAFLLQTVDGKHQDLKYISPETMVALLTGKFSNIVEKFVIVDCRYPYEYEGGHIKNAVNLPLERDAETFLLQRPIMPCSLDKRIILIFHCEFSSERGPRMCRFIRERDRAANDYPSLYYPEMYILKGGYKEFFPQHPNFCEPQDYRPMNHEAFRDELRNFRLKTRSWAGERSRRELCSRLQDQ

SEQ ID NO: 801 - DNA, 1452 bp, Mus musculus
gagtgctccctgtcatctgagtcctcagaatcttcggatgcaggtctgtgcatggactcccccagccctgtggacccgcagatggcagagcgcacgtttgaacaggccattcaggcagccagtcgggtcattcaaaaaatgcagcctttagtaattactgccccgtctggtcccctaggtgaggctgctcacagtccggtgctgcagagcatcaccaactcccgagcactggacagctggaggaaaactgaagcaggctaccgagccgccgccaatagtcctggggaggacaaagagaatgatggatatatcttcaagatgccacaggagctccctcattccagctctgcccaagctttggcagaatgggtcagccgcagacaggcctttacccagaggcccagctcagcccctgacttgatgtgtcttaccactgagtggaagatggaagtagaggagctgagcccggtggcacagtcttcttccttgactcctgtcgaaagggcttctgaagaagatgacggatttgtggacatcctggagagtgatttaaaggatgacgagaaggtccccgcgggcatggagaacctcattagtgccccactggtcaaaaagctggataaggaagaggaacaggatctcatcatgttcagcaagtgccagaggctcttccgctccccatccatgccatgcagtgtgatccgacccatcctcaagaggctagagcggccccaggaccgggatgtgcctgtccagagcaagcgcaggaaaagtgtgacacccctggaagagcagcagcttgaagaacctaaggcccgtgtctttcgctcaaagtcgctgtgtcatgagattgagaacatcctggatagtgaccaccgtggactgatcggagattactctaaggccttcctcctgcagaccgtggatggcaaacaccaagaccttaagtacatctcaccagaaactatggtggccctgttaacaggcaagttcagcaacatcgtggagaaatttgtcattgtggactgcagatacccctatgagtatgaaggcgggcatatcaagaatgctgtgaacctgcccctggaacgggatgctgagacctttctgctgcagcgtcccatcatgccttgtagcctggacaagagaatcatcctcattttccactgtgaattctcgtctgagcgtggaccacgaatgtgccgcttcatcagggaacgggaccgtgcagctaacgactaccccagcctgtactacccggagatgtacatcctcaaaggcggctacaaggagttcttcccacagcatccgaacttttgtgagccccaggactaccgacccatgaaccacgaggctttcagggatgagctgaggaactttcgccttaagactcgcagctgggctggggaacggagcaggagggaactttgtagcaggctgcaagaccagtga

SEQ ID NO: 802 - protein, 483 aa, Mus musculus
ECSLSSESSESSDAGLCMDSPSPVDPQMAERTFEQAIQAASRVIQKMQPLVITAPSGPLGEAAHSPVLQSITNSRALDSWRKTEAGYRAAANSPGEDKENDGYIFKMPQELPHSSSAQALAEWVSRRQAFTQRPSSAPDLMCLTTEWKMEVEELSPVAQSSSLTPVERASEEDDGFVDILESDLKDDEKVPAGMENLISAPLVKKLDKEEEQDLIMFSKCQRLFRSPSMPCSVIRPILKRLERPQDRDVPVQSKRRKSVTPLEEQQLEEPKARVFRSKSLCHEIENILDSDHRGLIGDYSKAFLLQTVDGKHQDLKYISPETMVALLTGKFSNIVEKFVIVDCRYPYEYEGGHIKNAVNLPLERDAETFLLQRPIMPCSLDKRIILIFHCEFSSERGPRMCRFIRERDRAANDYPSLYYPEMYILKGGYKEFFPQHPNFCEPQDYRPMNHEAFRDELRNFRLKTRSWAGERSRRELCSRLQDQ

SEQ ID NO: 803 - DNA, 993 bp, Mus musculus
ttcgctgagatcgggttgtcgtcgtggctggtagaacagtgtcgacagctggggttgaagcagcccacgccggtgcagctcgggtgcattccggccatcctggaaggtcgggactgcttgggctgtgcaaaaacaggaagtggcaagacagcagcctttgtgcttcccatcttgcagaagctgtctgaggacccttatggcatcttctgcttggttctgacacccaccagagagctggcctaccagatcgctgagcagttccgggtgctggggaagcctctgggtctgaaggactgcatcattgttggtggaatggacatggtggctcaggcgctggagctctctcggaagccacatgtagtgattgccacccctgggcgcctggctgaccacctgcgcagttccaacactttcaacatgaagaaaatccaattcctggtgatggatgaggccgacaggctgctggagcagggttgcaccgacttcaccacagacctggagaccatcctggcagccgttccagcacgaaggcaaacgctgctgttcagtgccacgctgactgacacactcaaggagctgcagggcctggccaccaacgagcccttcttttgggaggcacaggccacaagacatcacaacactgtgataccgctcccctcctcatgtcatcctgttgtcccctttggctctgggaccaccttcctccctggtctggtctcagccctgtccccaggcttactccatctgctcacaaaccttttctcacctatggcacagaaagagcgctttgcggccctggccaaattcaagtccagcatctatcggattcttattgccactgacgtggcctcaaggggcctggacatccccaccgtgcaggtggtcatcaaccacaacacccctgggcttcccaagatctacatccatcgggttggccgcacagcccgtgcagctggtaacttgggtacaggtctctgtttctgttcttttgag

SEQ ID NO: 804 - protein, 331 aa, Mus musculus
FAEIGLSSWLVEQCRQLGLKQPTPVQLGCIPAILEGRDCLGCAKTGSGKTAAFVLPILQKLSEDPYGIFCLVLTPTRELAYQIAEQFRVLGKPLGLKDCIIVGGMDMVAQALELSRKPHVVIATPGRLADHLRSSNTFNMKKIQFLVMDEADRLLEQGCTDFTTDLETILAAVPARRQTLLFSATLTDTLKELQGLATNEPFFWEAQATRHHNTVIPLPSSCHPVVPFGSGTTFLPGLVSALSPGLLHLLTNLFSPMAQKERFAALAKFKSSIYRILIATDVASRGLDIPTVQVVINHNTPGLPKIYIHRVGRTARAAGNLGTGLCFCSFE

SEQ ID NO: 805 - DNA, 1437 bp, Mus musculus
atggcggggttcgctgagatcgggttgtcgtcgtggctggtagaacagtgtcgacagctggggttgaagcagcccacgccggtgcagctcgggtgcattccggccatcctggaaggtcgggactgcttgggctgtgcaaaaacaggaagtggcaagacagcagcctttgtgcttcccatcttgcagaagctgtctgaggacccttatggcatcttctgcttggttctgacacccaccagagagctggcctaccagatcgctgagcagttccgggtgctggggaagcctctgggtctgaaggactgcatcattgttggtggaatggacatggtggctcaggcgctggagctctctcggaagccacatgtagtgattgccacccctgggcgcctggctgaccacctgcgcagttccaacactttcaacatgaagaaaatccaattcctggtgatggatgaggccgacaggctgctggagcagggttgcaccgacttcaccacagacctggagaccatcctggcagccgttccagcacgaaggcaaacgctgctgttcagtgccacgctgactgacacactcaaggagctgcagggcctggccaccaacgagcccttcttttgggaggcacaggccacagtccgcacagtggagcagcttgatcagcgctatttgttggtaccggagaaggtgaaggacgcctacctggttcacctagtccagaccttccaggaccagctggaggactgctccatcatcatcttcaccaatacctgcaagacctgccagatcctttgtatgatgcttcgaaagttcaacttccccacagtggcactgcactccatgatgaagcagaaagagcgctttgcggccctggccaaattcaagtccagcatctatcggattcttattgccactgacgtggcctcaaggggcctggacatccccaccgtgcaggtggtcatcaaccacaacacccctgggcttcccaagatctacatccatcgggttggccgcacagcccgtgcagggaggcaggggcaagccatcacactggtgacgcagtatgatatccacctgttgcatgccatcgaggagcagatcaagcagcagctggcagagctggtggtggaggaggctgaggttctacaaatcctcacgcaggtcaacgtagtgcgaagggagtgcgaaataaaactggaggcttcgcattttgatgaaaagaaagagatcaacaagcggaaacagatgatcctggaggggaaggacccagacctggaggccaaacgcaaagctgagctggccaagatcaagcaacaaaaccgacgcttcaaggagaaagtggggcagacacttcggcggcagaaagcagggagcactgtccgacggtcgcgtcctcccagatctcggccccaagagccagcccaggctgaggctcag

SEQ ID NO: 806 - protein, 479 aa, Mus musculus
MAGFAEIGLSSWLVEQCRQLGLKQPTPVQLGCIPAILEGRDCLGCAKTGSGKTAAFVLPILQKLSEDPYGIFCLVLTPTRELAYQIAEQFRVLGKPLGLKDCIIVGGMDMVAQALELSRKPHVVIATPGRLADHLRSSNTFNMKKIQFLVMDEADRLLEQGCTDFTTDLETILAAVPARRQTLLFSATLTDTLKELQGLATNEPFFWEAQATVRTVEQLDQRYLLVPEKVKDAYLVHLVQTFQDQLEDCSIIIFTNTCKTCQILCMMLRKFNFPTVALHSMMKQKERFAALAKFKSSIYRILIATDVASRGLDIPTVQVVINHNTPGLPKIYIHRVGRTARAGRQGQAITLVTQYDIHLLHAIEEQIKQQLAELVVEEAEVLQILTQVNVVRRECEIKLEASHFDEKKEINKRKQMILEGKDPDLEAKRKAELAKIKQQNRRFKEKVGQTLRRQKAGSTVRRSRPPRSRPQEPAQAEAQ

SEQ ID NO: 807 - DNA, 1038 bp, Mus musculus
atggcggggttcgctgagatcgggttgtcgtcgtggctggtagaacagtgtcgacagctggggttgaagcagcccacgccggtgcagctcgggtgcattccggccatcctggaaggtcgggactgcttgggctgtgcaaaaacaggaagtggcaagacagcagcctttgtgcttcccatcttgcagaagctgtctgaggacccttatggcatcttctgcttggttctgacacccaccagagagctggcctaccagatcgctgagcagttccgggtgctggggaagcctctgggtctgaaggactgcatcattgttggtggaatggacatggtggctcaggcgctggagctctctcggaagccacatgtagtgattgccacccctgggcgcctggctgaccacctgcgcagttccaacactttcaacatgaagaaaatccaattcctggtgatggatgaggccgacaggctgctggagcagggttgcaccgacttcaccacagacctggagaccatcctggcagccgttccagcacgaaggcaaacgctgctgttcagtgccacgctgactgacacactcaaggagctgcagggcctggccaccaacgagcccttcttttgggaggcacaggccacacatcacaacactgtgataccgctcccctcctcatgtcatcctgttgtcccctttggctctgggaccaccttcctccctggtctggtctcagccctgtccccaggcttactccatctgctcacaaaccttttctcacctatggcacagaaagagcgctttgcggccctggccaaattcaagtccagcatctatcggattcttattgccactgacgtggcctcaaggggcctggacatccccaccgtgcaggtggtcatcaaccacaacacccctgggcttcccaagatctacatccatcgggttggccgcacagcccgtgcagggaggcaggggcaagccatcacactggtgacgcagtatgatatccacctgttgcatgccatcgaggagcagatcagtaag

SEQ ID NO: 808 - protein, 346 aa, Mus musculus
MAGFAEIGLSSWLVEQCRQLGLKQPTPVQLGCIPAILEGRDCLGCAKTGSGKTAAFVLPILQKLSEDPYGIFCLVLTPTRELAYQIAEQFRVLGKPLGLKDCIIVGGMDMVAQALELSRKPHVVIATPGRLADHLRSSNTFNMKKIQFLVMDEADRLLEQGCTDFTTDLETILAAVPARRQTLLFSATLTDTLKELQGLATNEPFFWEAQATHHNTVIPLPSSCHPVVPFGSGTTFLPGLVSALSPGLLHLLTNLFSPMAQKERFAALAKFKSSIYRILIATDVASRGLDIPTVQVVINHNTPGLPKIYIHRVGRTARAGRQGQAITLVTQYDIHLLHAIEEQISK

SEQ ID NO: 809 - DNA, 1305 bp, Mus musculus
atggcggggttcgctgagatcgggttgtcgtcgtggctggtagaacagtgtcgacagctggggttgaagcagcccacgccggtgcagctcgggtgcattccggccatcctggaaggtcgggactgcttgggctgtgcaaaaacaggaagtggcaagacagcagcctttgtgcttcccatcttgcagaagctgtctgaggacccttatggcatcttctgcttggttctgacacccaccagagagctggcctaccagatcgctgagcagttccgggtgctggggaagcctctgggtctgaaggactgcatcattgttggtggaatggacatggtggctcaggcgctggagctctctcggaagccacatgtagtgattgccacccctgggcgcctggctgaccacctgcgcagttccaacactttcaacatgaagaaaatccaattcctggtgatggatgaggccgacaggctgctggagcagggttgcaccgacttcaccacagacctggagaccatcctggcagccgttccagcacgaaggcaaacgctgctgttcagtgccacgctgactgacacactcaaggagctgcagggcctggccaccaacgagcccttcttttgggaggcacaggccactgtagagggcagaggaggggcctctgtccaccataggagaggggatcagcaacttgatagctctactttggaagtcagagtaccatggtcagggctgctgcttgttggttctggctttgagaggctcacaggcagcagaccaagcatccctacctctcctcggccgggtgttcatttgttcgtttgttcaggtgatgtctccgtgctgggcactcacacccatcctttcccaccaggacctgccagatcctttatgcttcgaaagttcaacttccccacagtggcactgcactccatgatgaagcaggtgatggaccacagccatagcctctctgtggtctcaaatgtcacaactcagaggctgaggatgtggttcagcttactccatctgctcacaaaccttttctcacctatggcacagaaagagcgctttgcggccctggccaaattcaagtccagcatctatcggattcttattgccactgacgtggcctcaaggggcctggacatccccaccgtgcaggtggtcatcaaccacaacacccctgggcttcccaagatctacatccatcgggttggccgcacagcccgtgcagggaggcaggggcaagccatcacactggtgacgcagtatgatatccacctgttgcatgccatcgaggagcagatc

SEQ ID NO: 810 - protein, 435 aa, Mus musculus
MAGFAEIGLSSWLVEQCRQLGLKQPTPVQLGCIPAILEGRDCLGCAKTGSGKTAAFVLPILQKLSEDPYGIFCLVLTPTRELAYQIAEQFRVLGKPLGLKDCIIVGGMDMVAQALELSRKPHVVIATPGRLADHLRSSNTFNMKKIQFLVMDEADRLLEQGCTDFTTDLETILAAVPARRQTLLFSATLTDTLKELQGLATNEPFFWEAQATVEGRGGASVHHRRGDQQLDSSTLEVRVPWSGLLLVGSGFERLTGSRPSIPTSPRPGVHLFVCSGDVSVLGTHTHPFPPGPARSFMLRKFNFPTVALHSMMKQVMDHSHSLSVVSNVTTQRLRMWFSLLHLLTNLFSPMAQKERFAALAKFKSSIYRILIATDVASRGLDIPTVQVVINHNTPGLPKIYIHRVGRTARAGRQGQAITLVTQYDIHLLHAIEEQI

SEQ ID NO: 811 - DNA, 2774 bp, Mus musculus
aggtgggactagacaccaggagagaggaaaaggcattccatagtctccagagctgggtttccagagactggtccagcacccaggggtgcagtagcttctcgggcaacattctggggctgctgaggagaggccccaggcagaggagggcagtgcctagatttatccaccaatcgcacaggttcctggcacggggaacacgctcttatctgcccagcccaacatgggggggtggccaggctggcgaggcaggacactgcctaggggctggacacggaacagtcccaagccaggctgggtgggtgacggctgttgagggctctgagtgtccccgcaggctggtggccagctggctgcccatctcccccaccatgtcggacggcgagggcccctcagctgatgacagcgcgtctgctgccagcagcatggaggtgtcagaccgcatcgcctctctggagcagcgcgtccagatgcaggaggatgacattcaactgctcaagtcagcgctggccgacgtggttcggaggctgaacatcacggaggagcaacaggctgtgctcaacaggaaaggacctaccaaagcgaggccactggggcagaccctgccattgagaaccaccgtcaacaatggcaccgtgttaccaaagaaacccagtgcctccctcccggcaccctccggggccaggaaagaagtagttgtgccggtaaccaaaagcatcaataggaccagctcttccgaaagagtgtctccaggtggccggagggagagctctggggactccaaaggaagccggaaccgcacgggctcaaccagtagctcctccagcggcaagaagaacagtgagagcaaacccaaggagcccgcattcagtccagaagaaggatatgtaaaaatgtttcttcgaggccgtccggtcaccatgtacatgcccaaagaccaagtggattcgtacagtttggaagcaaaagctgagttaccaacgaagcggctgaaactggagtgggtctacgggtaccgggggcgagactgtcgcaataacttgtacttgctcccgaccggggagaccgtgtacttcattgcgtctgtcgtggtgctttacaatgtggaggagcagctgcagaggcattacgcgggccacaacgatgacgtcaagtgcctagcggtccatcctgacaggatcaccatagcaacgggacaagtggcgggcacatctaaggatggaaagcaactgccaccacatgtgcgcatctgggactctgtgacactgaacactctgcatgtcattggaataggcttttttgaccgggctgtcacctgcatcgcattctcaaagtctaacggaggaggccatctctgtgctgtggatgattccaacgatcacgtgctgtccgtgtgggattggcagaaagaagagagactggccgacgtgaagtgttcgaacgaagcggtatttgcggcggacttccaccccacagacaccaatatcatagtcacctgcgggaagtcacatctctacttttggaccctagaaggaaattcccttaacaagaagcaagggttgtttgagaaacaagagaagccaaagtttgttctctgcgtgacgttttctgaaaatggcgacaccattactggagattcaagcggcaacatcttggtgtgggggaaaggtacaaatcggataagctatgcagttcaaggggcccacgagggcggcatttttgcactttgtatgctgagagacgggacgctggtgtccggaggagggaaggaccggcgactcatttcctggaacggaaactatcaaaaacttcacaaagcagagattcctgagcagtttggcccaatacggacagtagccgaagggaagggcaacgtcatcttgataggcactactagaaactttgtcctgcaaggcaccttgtcaggggacttcacacccatcactcagggccacaccgatgagctctgggggctagccatccatgcctccaagcctcagttcctgacttgtggacatgacaaacatgccactctctgggacgctgtcggtcaccggccagtctgggacaaaatcatagaggatccagctcagtcctctggttttcatccttccgggtctgtggttgcagtggggacactgactgggaggtggtttgtgtttgacacggagacaaaggacttggtcaccgtccacacggatgggaatgagcagctgtccgtgatgcggtattctccagatgggaacttcttagcaatcggctcccatgacaactgcatctacatatatggagttaccgacaatggaaggaagtacacacgagttggcaagtgctccggccattccagcttcatcacccacttggactggtccgtgaactcacaattcctggtgtcaaattccggggactacgagatcctctactgggttccgtctgcctgtaagcaagtcgtgagtgtggaaaccacaagggacatcgagtgggccacctatacctgcaccttgggattccacgtctttggagtgtggccggagggctccgatgggacagacatcaacgccgtctgccgggctcacgagagaaagctcttgtgcacaggcgatgacttcggcaaagtgcacctcttctcatacccgtgctcacagttccgggctccaagccacatctacagtggacacagcagccacgtcaccaacgtggacttcctctgtgaagacagccaccttatctccacgggtgggaaagacacaagcatcatgcagtggcgagtcatttag

SEQ ID NO: 812 - protein, 923 aa, Mus musculus
VGLDTRREEKAFHSLQSWVSRDWSSTQGCSSFSGNILGLLRRGPRQRRAVPRFIHQSHRFLARGTRSYLPSPTWGGGQAGEAGHCLGAGHGTVPSQAGWVTAVEGSECPRRLVASWLPISPTMSDGEGPSADDSASAASSMEVSDRIASLEQRVQMQEDDIQLLKSALADVVRRLNITEEQQAVLNRKGPTKARPLGQTLPLRTTVNNGTVLPKKPSASLPAPSGARKEVVVPVTKSINRTSSSERVSPGGRRESSGDSKGSRNRTGSTSSSSSGKKNSESKPKEPAFSPEEGYVKMFLRGRPVTMYMPKDQVDSYSLEAKAELPTKRLKLEWVYGYRGRDCRNNLYLLPTGETVYFIASVVVLYNVEEQLQRHYAGHNDDVKCLAVHPDRITIATGQVAGTSKDGKQLPPHVRIWDSVTLNTLHVIGIGFFDRAVTCIAFSKSNGGGHLCAVDDSNDHVLSVWDWQKEERLADVKCSNEAVFAADFHPTDTNIIVTCGKSHLYFWTLEGNSLNKKQGLFEKQEKPKFVLCVTFSENGDTITGDSSGNILVWGKGTNRISYAVQGAHEGGIFALCMLRDGTLVSGGGKDRRLISWNGNYQKLHKAEIPEQFGPIRTVAEGKGNVILIGTTRNFVLQGTLSGDFTPITQGHTDELWGLAIHASKPQFLTCGHDKHATLWDAVGHRPVWDKIIEDPAQSSGFHPSGSVVAVGTLTGRWFVFDTETKDLVTVHTDGNEQLSVMRYSPDGNFLAIGSHDNCIYIYGVTDNGRKYTRVGKCSGHSSFITHLDWSVNSQFLVSNSGDYEILYWVPSACKQVVSVETTRDIEWATYTCTLGFHVFGVWPEGSDGTDINAVCRAHERKLLCTGDDFGKVHLFSYPCSQFRAPSHIYSGHSSHVTNVDFLCEDSHLISTGGKDTSIMQWRVI

SEQ ID NO: 813 - DNA, 3605 bp, Mus musculus
aaagcaggagcctggatgggaagaggagccggctggctgaggatgacagcgcgtctgctgccagcagcatggaggtgtcagaccgcatcgcctctctggagcagcgcgtccagatgcaggaggatgacattcaactgctcaagtcagcgctggccgacgtggttcggaggctgaacatcacggaggagcaacaggctgtgctcaacaggaaaggacctaccaaagacaaaggggaccccacactcccacacatccctttccatagaccttcagggagtgcccagggcagactggagaggaatgtggactgtggtgtttgctttcggagcgccccgaggcatgtcactgacaccttcactgtttttgtagaagaaggatatgtaaaaatgtttcttcgaggccgtccggtcaccatgtacatgcccaaagaccaagtggattcgtacagtttggaagcaaaagctgagttaccaacgaagcggctgaaactggagtgggtctacgggtaccgggggcgagactgtcgcaataacttgtacttgctcccgaccggggagaccgtgtacttcattgcgtctgtcgtggtgctttacaatgtggaggagcagctgcagaggcattacgcgggccacaacgatgacgtcaagtgcctagcggtccatcctgacaggatcaccatagcaacgggacaagtggcgggcacatctaaggatggaaagcaactgccaccacatgtgcgcatctgggactctgtgacactgaacactctgcatgtcattggaataggcttttttgaccgggctgtcacctgcatcgcattctcaaagtctaacggaggaggccatctctgtgctgtggatgattccaacgatcacgtgctgtccgtgtgggattggcagaaagaagagagactggccgacgtgaagtgttcgaacgaagcggtatttgcggcggacttccaccccacagacaccaatatcatagtcacctgcgggaagtcacatctctacttttggaccctagaaggaaattcccttaacaagaagcaagggttgtttgagaaacaagagaagccaaagtttgttctctgcgtgacgttttctgaaaatggcgacaccattactggagattcaagcggcaacatcttggtgtgggggaaaggtacaaatcggataagctatgcagttcaaggggcccacgagggcggcatttttgcactttgtatgctgagagacgggacgctggtgtccggaggagggaaggaccggcgactcatttcctggaacggaaactatcaaaaacttcacaaagcagagattcctgagcagtttggcccaatacggacagtagccgaagggaagggcaacgtcatcttgataggcactactagaaactttgtcctgcaaggcaccttgtcaggggacttcacacccatcactcagggccacaccgatgagctctgggggctagccatccatgcctccaagcctcagttcctgacttgtggacatgacaaacatgccactctctgggacgctgtcggtcaccggccagtctgggacaaaatcatagaggatccagctcagtcctctggttttcatccttccgggtctgtggttgcagtggggacactgactgggaggtggtttgtgtttgacacggagacaaaggacttggtcaccgtccacacggatgggaatgagcagctgtccgtgatgcggtattctccagatgggaacttcttagcaatcggctcccatgacaactgcatctacatatatggagttaccgacaatggaaggaagtacacacgagttggcaagtgctccggccattccagcttcatcacccacttggactggtccgtgaactcacaattcctggtgtcaaattccggggactacgagatcctctactgggttccgtctgcctgtaagcaagtcgtgagtgtggaaaccacaagggacatcgagtgggccacctatacctgcaccttgggattccacgtctttggagtgtggccggagggctccgatgggacagacatcaacgccgtctgccgggctcacgagagaaagctcttgtgcacaggcgatgacttcggcaaagtgcacctcttctcatacccgtgctcacagttccgggctccaagccacatctacagtggacacagcagccacgtcaccaacgtggacttcctctgtgaagacagccaccttatctccacgggtgggaaagacacaagcatcatgcagtggcgagtcatttagtccctgtgggagcccgaggacgcagactcgagttccgcttggtcactgtgatttctgttttgtctacagactcttaacaaacctcaggaaaactgtccctctaccagttaccttagttggggagccagtgcgtgtcacaccagataagcggttgtgtgtccgcttttgttatatagggcaggatagaatgcatgtcgggtaaaggaagtccccaaggtttacatggcagcagaagggactggtgtatccttatagacacttttctatgaactcttcaaaaatggtcacagaatgccttttaaaatactgtatatagtcttcactgcttcaccttgttaagtcagatatttatgataatgaagtacggaactgggaactggggtcgttgttgactaattggtcctaagaggataaattatgtaactgatttgcccagctgaatcaggactgcaaatgccaggctttccttggccatgtatctaaaatcccataaactcctccctttgggaggctggcaaaaaaggggctgtgctctccctggttaagcagtttgtactacagaacccccgagctgctgtgggtcctacaggtgcttccatgctctggttagactgtcctgtctgaggacacagccagtttcttcagcacctccacaaactgcaccccgtctctgtccatgcacctcgattcacggcgagacatttagccaccactctctgcgtattgatggcatgatacggtattgtcctcgtatagagttaacaacttacgataaattgcccaaagctgggccttgctgtgtgtgctctggacactgtacatttgtacccaaccaagtgggtcaagtcggagagggactcttcagtatggaggcagcctgtggagtgcagcgcctttgaggctctgggtgtaagacagtttccttccctgactctcgtgcacagacagcatgcagcatacagactgaaactgtgctctgccgagtagaaagtaggtagggtctgaaggtgtcgagaaggccttacctgtggtgtgacagattgaattgattgtttacactggggactgtatctcggatctttaaatagaggaatcacaaacagacttaaggacagatgctgagattgctttttgtaaactcgtttaagcgagtgagtgagttgagttacctgaactctgtagcactggttgttcatagtgatgaaggacagcactgcagacatctcccttgccatctctagcctgctgtggaaggaaacaacgtgactcaagatgaagctgtttgtatgtatccttatcaaatatattctataaggaaataaaatctgaaaagtg

SEQ ID NO: 814 - protein, 733 aa, Mus musculus
MEVSDRIASLEQRVQMQEDDIQLLKSALADVVRRLNITEEQQAVLNRKGPTKDKGDPTLPHIPFHRPSGSAQGRLERNVDCGVCFRSAPRHVTDTFTVFVEEGYVKMFLRGRPVTMYMPKDQVDSYSLEAKAELPTKRLKLEWVYGYRGRDCRNNLYLLPTGETVYFIASVVVLYNVEEQLQRHYAGHNDDVKCLAVHPDRITIATGQVAGTSKDGKQLPPHVRIWDSVTLNTLHVIGIGFFDRAVTCIAFSKSNGGGHLCAVDDSNDHVLSVWDWQKEERLADVKCSNEAVFAADFHPTDTNIIVTCGKSHLYFWTLEGNSLNKKQGLFEKQEKPKFVLCVTFSENGDTITGDSSGNILVWGKGTNRISYAVQGAHEGGIFALCMLRDGTLVSGGGKDRRLISWNGNYQKLHKAEIPEQFGPIRTVAEGKGNVILIGTTRNFVLQGTLSGDFTPITQGHTDELWGLAIHASKPQFLTCGHDKHATLWDAVGHRPVWDKIIEDPAQSSGFHPSGSVVAVGTLTGRWFVFDTETKDLVTVHTDGNEQLSVMRYSPDGNFLAIGSHDNCIYIYGVTDNGRKYTRVGKCSGHSSFITHLDWSVNSQFLVSNSGDYEILYWVPSACKQVVSVETTRDIEWATYTCTLGFHVFGVWPEGSDGTDINAVCRAHERKLLCTGDDFGKVHLFSYPCSQFRAPSHIYSGHSSHVTNVDFLCEDSHLISTGGKDTSIMQWRVI

SEQ ID NO: 815 - DNA, 3684 bp, Mus musculus
ctagatgacagcgcgtctgctgccagcagcatggaggtgtcagaccgcatcgcctctctggagcagcgcgtccagatgcaggaggatgacattcaactgctcaagtcagcgctggccgacgtggttcggaggctgaacatcacggaggagcaacaggctgtgctcaacaggaaaggacctaccaaaggtgggcatgatgcagcatccgtgactcaccccaaaactgactccaaatcaaaatgccccgagccccacccactgaacaatctcactaaggtcgacagtctttgttggtgtgctttggacaaaggggaccccacactcccacacatccctttccatagaccttcagggagtgcccagggcagactggagaggaatgtggactgtggtgtttgctttcggagcgccccgaggcatgtcactgacaccttcactgtttttgtagaagaaggatatgtaaaaatgtttcttcgaggccgtccggtcaccatgtacatgcccaaagaccaagtggattcgtacagtttggaagcaaaagctgagttaccaacgaagcggctgaaactggagtgggtctacgggtaccgggggcgagactgtcgcaataacttgtacttgctcccgaccggggagaccgtgtacttcattgcgtctgtcgtggtgctttacaatgtggaggagcagctgcagaggcattacgcgggccacaacgatgacgtcaagtgcctagcggtccatcctgacaggatcaccatagcaacgggacaagtggcgggcacatctaaggatggaaagcaactgccaccacatgtgcgcatctgggactctgtgacactgaacactctgcatgtcattggaataggcttttttgaccgggctgtcacctgcatcgcattctcaaagtctaacggaggaggccatctctgtgctgtggatgattccaacgatcacgtgctgtccgtgtgggattggcagaaagaagagagactggccgacgtgaagtgttcgaacgaagcggtatttgcggcggacttccaccccacagacaccaatatcatagtcacctgcgggaagtcacatctctacttttggaccctagaaggaaattcccttaacaagaagcaagggttgtttgagaaacaagagaagccaaagtttgttctctgcgtgacgttttctgaaaatggcgacaccattactggagattcaagcggcaacatcttggtgtgggggaaaggtacaaatcggataagctatgcagttcaaggggcccacgagggcggcatttttgcactttgtatgctgagagacgggacgctggtgtccggaggagggaaggaccggcgactcatttcctggaacggaaactatcaaaaacttcacaaagcagagattcctgagcagtttggcccaatacggacagtagccgaagggaagggcaacgtcatcttgataggcactactagaaactttgtcctgcaaggcaccttgtcaggggacttcacacccatcactcagggccacaccgatgagctctgggggctagccatccatgcctccaagcctcagttcctgacttgtggacatgacaaacatgccactctctgggacgctgtcggtcaccggccagtctgggacaaaatcatagaggatccagctcagtcctctggttttcatccttccgggtctgtggttgcagtggggacactgactgggaggtggtttgtgtttgacacggagacaaaggacttggtcaccgtccacacggatgggaatgagcagctgtccgtgatgcggtattctccagatgggaacttcttagcaatcggctcccatgacaactgcatctacatatatggagttaccgacaatggaaggaagtacacacgagttggcaagtgctccggccattccagcttcatcacccacttggactggtccgtgaactcacaattcctggtgtcaaattccggggactacgagatcctctactgggttccgtctgcctgtaagcaagtcgtgagtgtggaaaccacaagggacatcgagtgggccacctatacctgcaccttgggattccacgtctttggagtgtggccggagggctccgatgggacagacatcaacgccgtctgccgggctcacgagagaaagctcttgtgcacaggcgatgacttcggcaaagtgcacctcttctcatacccgtgctcacagttccgggctccaagccacatctacagtggacacagcagccacgtcaccaacgtggacttcctctgtgaagacagccaccttatctccacgggtgggaaagacacaagcatcatgcagtggcgagtcatttagtccctgtgggagcccgaggacgcagactcgagttccgcttggtcactgtgatttctgttttgtctacagactcttaacaaacctcaggaaaactgtccctctaccagttaccttagttggggagccagtgcgtgtcacaccagataagcggttgtgtgtccgcttttgttatatagggcaggatagaatgcatgtcgggtaaaggaagtccccaaggtttacatggcagcagaagggactggtgtatccttatagacacttttctatgaactcttcaaaaatggtcacagaatgccttttaaaatactgtatatagtcttcactgcttcaccttgttaagtcagatatttatgataatgaagtacggaactgggaactggggtcgttgttgactaattggtcctaagaggataaattatgtaactgatttgcccagctgaatcaggactgcaaatgccaggctttccttggccatgtatctaaaatcccataaactcctccctttgggaggctggcaaaaaaggggctgtgctctccctggttaagcagtttgtactacagaacccccgagctgctgtgggtcctacaggtgcttccatgctctggttagactgtcctgtctgaggacacagccagtttcttcagcacctccacaaactgcaccccgtctctgtccatgcacctcgattcacggcgagacatttagccaccactctctgcgtattgatggcatgatacggtattgtcctcgtatagagttaacaacttacgataaattgcccaaagctgggccttgctgtgtgtgctctggacactgtacatttgtacccaaccaagtgggtcaagtcggagagggactcttcagtatggaggcagcctgtggagtgcagcgcctttgaggctctgggtgtaagacagtttccttccctgactctcgtgcacagacagcatgcagcatacagactgaaactgtgctctgccgagtagaaagtaggtagggtctgaaggtgtcgagaaggccttacctgtggtgtgacagattgaattgattgtttacactggggactgtatctcggatctttaaatagaggaatcacaaacagacttaaggacagatgctgagattgctttttgtaaactcgtttaagcgagtgagtgagttgagttacctgaactctgtagcactggttgttcatagtgatgaaggacagcactgcagacatctcccttgccatctctagcctgctgtggaaggaaacaacgtgactcaagatgaagctgtttgtatgtatccttatcaaatatattctataaggaaataaaatctgaaaagtg

SEQ ID NO: 816 - protein, 782 aa, Mus musculus
LDDSASAASSMEVSDRIASLEQRVQMQEDDIQLLKSALADVVRRLNITEEQQAVLNRKGPTKGGHDAASVTHPKTDSKSKCPEPHPLNNLTKVDSLCWCALDKGDPTLPHIPFHRPSGSAQGRLERNVDCGVCFRSAPRHVTDTFTVFVEEGYVKMFLRGRPVTMYMPKDQVDSYSLEAKAELPTKRLKLEWVYGYRGRDCRNNLYLLPTGETVYFIASVVVLYNVEEQLQRHYAGHNDDVKCLAVHPDRITIATGQVAGTSKDGKQLPPHVRIWDSVTLNTLHVIGIGFFDRAVTCIAFSKSNGGGHLCAVDDSNDHVLSVWDWQKEERLADVKCSNEAVFAADFHPTDTNIIVTCGKSHLYFWTLEGNSLNKKQGLFEKQEKPKFVLCVTFSENGDTITGDSSGNILVWGKGTNRISYAVQGAHEGGIFALCMLRDGTLVSGGGKDRRLISWNGNYQKLHKAEIPEQFGPIRTVAEGKGNVILIGTTRNFVLQGTLSGDFTPITQGHTDELWGLAIHASKPQFLTCGHDKHATLWDAVGHRPVWDKIIEDPAQSSGFHPSGSVVAVGTLTGRWFVFDTETKDLVTVHTDGNEQLSVMRYSPDGNFLAIGSHDNCIYIYGVTDNGRKYTRVGKCSGHSSFITHLDWSVNSQFLVSNSGDYEILYWVPSACKQVVSVETTRDIEWATYTCTLGFHVFGVWPEGSDGTDINAVCRAHERKLLCTGDDFGKVHLFSYPCSQFRAPSHIYSGHSSHVTNVDFLCEDSHLISTGGKDTSIMQWRVI

SEQ ID NO: 817 - DNA, 1479 bp, Mus musculus
gatgacagcgcgtctgctgccagcagcatggaggtgtcagaccgcatcgcctctctggagcagcgcgtccagatgcaggaggatgacattcaactgctcaagtcagcgctggccgacgtggttcggaggctgaacatcacggaggagcaacaggctgtgctcaacaggaaaggacctaccaaagcgaggccactggggcagaccctgccattgagaaccaccgtcaacaatggcaccgtgttaccaaagaaacccagtgcctccctcccggcaccctccggggccaggaaagaagtagttgtgccggtaaccaaaagtacactgggcaatgaaggactgtcccttctcgcctgccctccctgcagcatcaataggaccagctcttccgaaagagtgtctccaggtggccggagggagagctctggggactccaaaggaagccggaaccgcacgggctcaaccagtagctcctccagcggcaagaagaacagtgagagcaaacccaaggagcccgcattcagtccagaagaaggatatgtaaaaatgtttcttcgaggccgtccggtcaccatgtacatgcccaaagaccaagtggattcgtacagtttggaagcaaaagctgagttaccaacgaagcggctgaaactggagtgggtctacgggtaccgggggcgagactgtcgcaataacttgtacttgctcccgaccggggagaccgtgtacttcattgcgtctgtcgtggtgctttacaatgtggaggagcagctgcagaggcattacgcgggccacaacgatgacgtcaagtgcctagcggtccatcctgacaggatcaccatagcaacgggacaagtggcgggcacatctaaggatggaaagcaactgccaccacatgtgcgcatctgggactctgtgacactgaacactctgcatgtcattggaataggcttttttgaccgggctgtcacctgcatcgcattctcaaagtctaacggaggaggccatctctgtgctgtggatgattccaacgatcacgtgctgtccgtgtgggattggcagaaagaagagagactggccgacgtgaagtgttcgaacgaagcggtatttgcggcggacttccaccccacagacaccaatatcatagtcacctgcgggaagtcacatctctacttttggaccctagaaggaaattcccttaacaagaagcaagggttgtttgagaaacaagagaagccaaagtttgttctctgcgtgacgttttctgaaaatggcgacaccattactggagattcaagcggcaacatcttggtgtgggggaaaggtacaaatcggataagctatgcagttcaaggggcccacgagggcggcatttttgcactttgtatgctgagagacgggacgctggtgtccggaggagggaaggaccggcgactcatttcctggaacggaaactatcaaaaacttcacaaagcagaggtaagc

SEQ ID NO: 818 - protein, 493 aa, Mus musculus
DDSASAASSMEVSDRIASLEQRVQMQEDDIQLLKSALADVVRRLNITEEQQAVLNRKGPTKARPLGQTLPLRTTVNNGTVLPKKPSASLPAPSGARKEVVVPVTKSTLGNEGLSLLACPPCSINRTSSSERVSPGGRRESSGDSKGSRNRTGSTSSSSSGKKNSESKPKEPAFSPEEGYVKMFLRGRPVTMYMPKDQVDSYSLEAKAELPTKRLKLEWVYGYRGRDCRNNLYLLPTGETVYFIASVVVLYNVEEQLQRHYAGHNDDVKCLAVHPDRITIATGQVAGTSKDGKQLPPHVRIWDSVTLNTLHVIGIGFFDRAVTCIAFSKSNGGGHLCAVDDSNDHVLSVWDWQKEERLADVKCSNEAVFAADFHPTDTNIIVTCGKSHLYFWTLEGNSLNKKQGLFEKQEKPKFVLCVTFSENGDTITGDSSGNILVWGKGTNRISYAVQGAHEGGIFALCMLRDGTLVSGGGKDRRLISWNGNYQKLHKAEVS

SEQ ID NO: 819 - DNA, 2043 bp, Mus musculus
tcaataggaccagctcttccgaaagagtgtctccaggtggccggagggagagctctggggactccaaaggaagccggaaccgcacgggctcaaccagtagctcctccagcgaagaagaacagtgagagcaaacccaaggagcccgcattcagtccagaagaaggatatgtaaaaatgtttcttcgaggccgtccggtcaccatgtacatgcccaaagaccaagtggattcgtacagtttggaagcaaaagctgagttaccaacgaagcggctgaaactggagtgggtctacgggtaccgggggcgagactgtcgcaataacttgtacttgctcccgaccggggagaccgtgtacttcattgcgtctgtcgtggtgctttacaatgtggaggagcagctgcagaggcattacgcgggccacaacgatgacgtcaagtgcctagcggtccatcctgacaggatcaccatagcaacgggacaagtggcgggcacatctaaggatggaaagcaactgccaccacatgtgcgcatctgggactctgtgacactgaacactctgcatgtcattggaataggcttttttgaccgggctgtcacctgcatcgcattctcaaagtctaacggaggaggccatctctgtgctgtggatgattccaacgatcacgtgctgtccgtgtgggattggcagaaagaagagagactggccgacgtgaagtgttcgaacgaagcggtatttgcggcggacttccaccccacagacaccaatatcatagtcacctgcgggaagctgtcttcggtaaataacattcccacacttactcattacattccacagaaacaagagaagccaaagtttgttctctgcgtgacgttttctgaaaatggcgacaccattactggagattcaagcggcaacatcttggtgtgggggaaaggtacaaatcggataagctatgcagttcaaggggcccacgagggcggcatttttgcactttgtatgctgagagacgggacgctggtgtccggaggagggaaggaccggcgactcatttcctggaacggaaactatcaaaaacttcacaaagcagagattcctgagcagtttggcccaatacggacagtagccgaagggaagggcaacgtcatcttgataggcactactagaaactttgtcctgcaaggcaccttgtcaggggacttcacacccatcactcagggccacaccgatgagctctgggggctagccatccatgcctccaagcctcagttcctgacttgtggacatgacaaacatgccactctctgggacgctgtcggtcaccggccagtctgggacaaaatcatagaggatccagctcagtcctctggttttcatccttccgggtctgtggttgcagtggggacactgactgggaggtggtttgtgtttgacacggagacaaaggacttggtcaccgtccacacggatgggaatgagcagctgtccgtgatgcggtattctccagatgggaacttcttagcaatcggctcccatgacaactgcatctacatatatggagttaccgacaatggaaggaagtacacacgagttggcaagtgctccggccattccagcttcatcacccacttggactggtccgtgaactcacaattcctggtgtcaaattccggggactacgagatcctctactgggttccgtctgcctgtaagcaagtcgtgagtgtggaaaccacaagggacatcgagtgggccacctatacctgcaccttgggattccacgtctttggagtgtggccggagggctccgatgggacagacatcaacgccgtctgccgggctcacgagagaaagctcttgtgcacaggcgatgacttcggcaaagtgcacctcttctcatacccgtgctcacagttccgggctccaagccacatctacagtggacacagcagccacgtcaccaacgtggacttcctctgtgaagacagccaccttatctccacgggtgggaaagacacaagcatcatgcagtggcgagtcatttag

SEQ ID NO: 820 - protein, 680 aa, Mus musculus
SIGPALPKECLQVAGGRALGTPKEAGTARAQPVAPPAKKNSESKPKEPAFSPEEGYVKMFLRGRPVTMYMPKDQVDSYSLEAKAELPTKRLKLEWVYGYRGRDCRNNLYLLPTGETVYFIASVVVLYNVEEQLQRHYAGHNDDVKCLAVHPDRITIATGQVAGTSKDGKQLPPHVRIWDSVTLNTLHVIGIGFFDRAVTCIAFSKSNGGGHLCAVDDSNDHVLSVWDWQKEERLADVKCSNEAVFAADFHPTDTNIIVTCGKLSSVNNIPTLTHYIPQKQEKPKFVLCVTFSENGDTITGDSSGNILVWGKGTNRISYAVQGAHEGGIFALCMLRDGTLVSGGGKDRRLISWNGNYQKLHKAEIPEQFGPIRTVAEGKGNVILIGTTRNFVLQGTLSGDFTPITQGHTDELWGLAIHASKPQFLTCGHDKHATLWDAVGHRPVWDKIIEDPAQSSGFHPSGSVVAVGTLTGRWFVFDTETKDLVTVHTDGNEQLSVMRYSPDGNFLAIGSHDNCIYIYGVTDNGRKYTRVGKCSGHSSFITHLDWSVNSQFLVSNSGDYEILYWVPSACKQVVSVETTRDIEWATYTCTLGFHVFGVWPEGSDGTDINAVCRAHERKLLCTGDDFGKVHLFSYPCSQFRAPSHIYSGHSSHVTNVDFLCEDSHLISTGGKDTSIMQWRVI

SEQ ID NO: 821 - DNA, 342 bp, Mus musculus
atggaaggccaaggcaaggtaaagaggccgaaggcctacatgctcaggcacaacaggcggcgccgtcggcggaaccccatcccgtttccagagctgtttgatggcgagatggacaagctcccggagttcatcgtgcagaccggctcctacatgttggtggacgacaggaccttcgacaccgacgagctcaaggtgacgttcctcatcacccgcctcaagggccgggccctgcagtgggtgatcccctacatcaagatcgacagccccctgctcaatgattacaacggcttcctgaatgagatgaagcgggtgttcgggtgggaggaggatgaggacttctag

SEQ ID NO: 822 - protein, 113 aa, Mus musculus
MEGQGKVKRPKAYMLRHNRRRRRRNPIPFPELFDGEMDKLPEFIVQTGSYMLVDDRTFDTDELKVTFLITRLKGRALQWVIPYIKIDSPLLNDYNGFLNEMKRVFGWEEDEDF

SEQ ID NO: 823 - DNA, 2775 bp, Mus musculus
agggaaaatttttatccccaaacagaagccagcgcagactcttacagaagaaactatatccctcgacccagagttagaagaagctttgacaagtgcttcagacacagagctgtgcgaccttgcagctattcttgggatgcacaatctgattgcagacacaccgttctgtgatgtgctgggaagtagtaacggtgtcaaccaagagcgttttcccaatgtggttaaaggggaaaagattcttccagtgtttgatgagccaccaaatccaaccaacgttgaagagagtttaaagagaattagggaaaacgatgcccgtcttgttgaagttaatttgaataatataaaaaatatcccaattccaactctaaaagattttgcaaagactttggaagccaacacgcatgtgaaacatttcagtctcgcggccaccaggagcaatgaccccgtggctgttgcttttgcagatatgctgaaagtgaacaaaactttgaagagcttaaatatggagtccaacttcatcacaggcgcaggggttttagcactgattgatgctttgagagataatgagaccctgatggagctcaagattgacaatcagagacagcagttgggcacctcagtagaattagaaatggccaagatgcttgaggaaaatacaaatatccttaaatttggatatcagttcacgcagcagggaccccgaaccagggcagccaacgcgataacgaagaacaatgacttagtgcgcaagaggcgaattgaaggagaccaccagtaagcgcagtgacctttggaagcctgcagatcaccagaggctcgtgttggtggcagcagatgtaaaaattacctgggtagaagggaaagactggaaatcttttttaactatatgcattattttcctagcttattatatttgatttgtaaaatcagtactaggtagtattttgtatttgtagcatttctactgagaccagtttaatttagcttaattgaatggtttatgatgatttttaggtaaaaatgcagttgtggaaagtttcagaagtcgtgtatgtaagaataatttgaatgaacatcttgaggaccaatattttttaaatcaaaagggacattgctgactcaatattaatgttgctccttatacattaagggtaaggtgcatggtggtttccttttttaaaaatccatgaatttaggcaaaagtatgctttttccttattagggaaataaaatgtcggaattttgaaaggtggctcagaatccattatatctacataagccaaagtaggcctgcaggggacacaacagccatctgtgtgcaggtttctgcacacatctaatgagtctcagctgcacggggctgggtgtgtatgtctcctatagtccttagctctgtcccactgcataccttgttaaacgtatagttataagtatttttctctgctgtgggcattacagttttgtaaaagctaatggataaaaagcatccgagtagagaggttcttttccccataaaaggctcttggccaatactcagttattgagagtaaaacagaaaaaagaaaggcgctgttagatgtaggagagttcaaacctgaaatttgcaaggtggccatctcacggatgagcagtgtccgtcaggaactgacgtgagctagctatggtgggtcactcctacagtctgagcagctgagaaggtaggattgccagacattcaaagtcagtctgaactacataggaacctccaggttagcctgggctacatatgtgagaacctatgtcaggaaaaggaaagaacaaacttgttgtctgatgaggagcgctatatgtgattccataggtgcaatgtagtactgcctaaacagttaatcccctccaccgtgttccagccaatcacaaagactgctgttcttcagaaacctcattttagtagatgtttccttcatcttgttttttttttaactgcatataataaaaagtaatttctgtatcataggttatctctatcaccttagcgttagttagaatgagggtttgatctgtacagtggggttgggtgaggctgcccaccgatgccctgctagaggactttcgtctgtatctatgctctgccccatgcagctcctacaggagtggcagaggcacacacagcagacagtggagaggaagaaggcccagggaagcacgaacaagtcgacggttgcttaaaccatgccagtgctggcctgtgaagtattatacaactgaagaaaagacttcatcagtaacgagagtgtgaagtcatctgattgaatagatatcttttaagaattataatggagaacagtgtttaccttgatctttacaagtctggcacctcattttggtagcagtatttttaaattcctctgagatttttatgacatggtaataaattaggactttgtaatagttttaattttaagctagagatttttctaaaccttcaagttttatgcatgattatctaagagaatattcttcacatttttaaattgcccttttaaaaagccttaaattgcccattttgtaaaactatatattcatatttgtctcaaattataattttcagtatgtctacatgaaattgtatacattaaattcaccattagtagctaatattcatgccttgaaaatagatttggtgctctacacttacagccaaaacctactataagtaggtttaaagaatacataaaatacattttcctacggtgcctgtcatttcaaagaccaaataaacattttgtgttaaac

SEQ ID NO: 824 - protein, 258 aa, Mus musculus
GKIFIPKQKPAQTLTEETISLDPELEEALTSASDTELCDLAAILGMHNLIADTPFCDVLGSSNGVNQERFPNVVKGEKILPVFDEPPNPTNVEESLKRIRENDARLVEVNLNNIKNIPIPTLKDFAKTLEANTHVKHFSLAATRSNDPVAVAFADMLKVNKTLKSLNMESNFITGAGVLALIDALRDNETLMELKIDNQRQQLGTSVELEMAKMLEENTNILKFGYQFTQQGPRTRAANAITKNNDLVRKRRIEGDHQ

SEQ ID NO: 825 - DNA, 753 bp, Mus musculus
gggaaaatttttatccccaaacagaagccagcgcagactcttacagaagaaactatatccctcgacccagagttagaagaagctttgacaagtgcttcagacacagagctgtgcgaccttgcagtcgctgtgcatcttccctcagtctcagcctctcagtcagcccttctctttccatttgctcctgcagatgtggttaaaggggaaaagattcttccagtgtttgatgagccaccaaatccaaccaacgttgaagagagtttaaagagaattagggaaaacgatgcccgtcttgttgaagttaatttgaataatataaaaaatatcccaattccaactctaaaagattttgcaaagactttggaagccaacacgcatgtgaaacatttcagtctcgcggccaccaggagcaatgaccccgtggctgttgcttttgcagatatgctgaaagtgaacaaaactttgaagagcttaaatatggagtccaacttcatcacaggcgcaggggttttagcactgattgatgctttgagagataatgagaccctgatggagctcaagattgacaatcagagacagcagttgggcacctcagtagaattagaaatggccaagatgcttgaggaaaatacaaatatccttaaatttggatatcagttcacgcagcagggaccccgaaccagggcagccaacgcgataacgaagaacaatgacttagtgcgcaagaggcgaattgaaggagaccaccagtaa

SEQ ID NO: 826 - protein, 250 aa, Mus musculus
GKIFIPKQKPAQTLTEETISLDPELEEALTSASDTELCDLAVAVHLPSVSASQSALLFPFAPADVVKGEKILPVFDEPPNPTNVEESLKRIRENDARLVEVNLNNIKNIPIPTLKDFAKTLEANTHVKHFSLAATRSNDPVAVAFADMLKVNKTLKSLNMESNFITGAGVLALIDALRDNETLMELKIDNQRQQLGTSVELEMAKMLEENTNILKFGYQFTQQGPRTRAANAITKNNDLVRKRRIEGDHQ

SEQ ID NO: 827 - DNA, 1287 bp, Mus musculus
cacgtcattatcaacgtcgggggctgcagggtgcgtctggcctgggccgcgctggcccgctgtcccctggcgcgcctcgagcgcctgcgagcctgccgcggccacgacgagctgctgcgcgtgtgtgacgactacgacgtgagccgcgacgagttcttcttcgaccgcagcccgtgcgctttccgcgccatcgtggcgctgctgcgcgccggcaagctaaggctgctgcgcggcccgtgcgccctggccttccgcgacgagctggcctactggggcatcgacgaggcgcggctggagcgctgctgcctgcgccgcctgcgccccggccgagccctgggcagcgggcggctggagcgaggccgacagcgcctgcgcgacgtggtggagaacccgcactccgggctggcgggcaggctcttcgcctacgtctccgtggccttcgtggccgtcacagccgtcggcctgtgcctgagcaccatgccggacgtccgcgcagaagaggaacggggcgagtgctccacaaagtgccgcaacctgttcgtgctggagacggtgtgcgtggcctggttctccttcgagttcctgctgcgctccctgcaggctgagagcaagtgcgccttcctccggacgccgcttgccatcatcgacatcctggccatcctgcccttctacgtgtcgctgctcgcgggactggcggcagggcccacgggcagcaagatgctggagcgcgcgggtctggtgctgcggctgctgcgggcgctgcgcgtgctctacgtgatgcgcctggcgcgccactcgttggggctgcgctcgcttggcctcaccgtgcgccgctgcgcacgcgagttcggactgctgctgctcttcctctgcgtggccatggcgctcttcgcgccgctcgtgcacctggctgagcgcgagctgggcgctcaccgcgacttctccagcgtccccgccagctactggtgggcagtcatctccatgaccaccgtgggctatggagacatggtgccgcgcagccttccgggccaggtggtggcgctgagcagcatcctcagcggcatcctgctcatggccttccctgtcacctccatcttccacaccttctcgcgctcctattcggagctcaaggagcagcaacagcgcgcggccagccctgaaccggccctgcgcgaggacagcacgcgtgatgacagtacacgttcggccagcgccactgaggacagctctcaggaccctgagaccgcaggcgcggcagggagcttgccgggccgggtgggaccctga

SEQ ID NO: 828 - protein, 428 aa, Mus musculus
HVIINVGGCRVRLAWAALARCPLARLERLRACRGHDELLRVCDDYDVSRDEFFFDRSPCAFRAIVALLRAGKLRLLRGPCALAFRDELAYWGIDEARLERCCLRRLRPGRALGSGRLERGRQRLRDVVENPHSGLAGRLFAYVSVAFVAVTAVGLCLSTMPDVRAEEERGECSTKCRNLFVLETVCVAWFSFEFLLRSLQAESKCAFLRTPLAIIDILAILPFYVSLLAGLAAGPTGSKMLERAGLVLRLLRALRVLYVMRLARHSLGLRSLGLTVRRCAREFGLLLLFLCVAMALFAPLVHLAERELGAHRDFSSVPASYWWAVISMTTVGYGDMVPRSLPGQVVALSSILSGILLMAFPVTSIFHTFSRSYSELKEQQQRAASPEPALREDSTRDDSTRSASATEDSSQDPETAGAAGSLPGRVGP

SEQ ID NO: 829 - DNA, 126 bp, Mus musculus
atgcccgagccaggtgaactggaggagcgctttgccatcgtgctgaatgctatgaacctacctcctgacaaagccaggctactgcggcagtatgacaatgagaaaaaatgggagctgatctgtgat

SEQ ID NO: 830 - protein, 42 aa, Mus musculus
MPEPGELEERFAIVLNAMNLPPDKARLLRQYDNEKKWELICD

SEQ ID NO: 831 - DNA, 2838 bp, Mus musculus
atgtctgaacaagagcgtatacaggactgtctgaggaaagagataaggtcccttcttatttccactaaggatggtttgactccacaacagttggaaaaggagtaccttttgatggttggcaaccatctcccgctccgaatccttggatatcggtccactatggaactggtgttggatatgcccgatgtggttagtgtctgccccggtggggatggtaccgtaatactgaaagccattccagacgaatccaccaaaggaatagcaagtttggttgcaaagcagagaaggagccataaggtccgaaactccatgccaaagggaagacccagcatatgctctggccgggtgccttaccgaggaagggtgcccccaattcttccagctgtagtgaagagtgagttgaaagaccttttggcattgtctcccgttctcctttctgactttgaaaaggcatttgccaggcgttttggacgatcatttcagtatatgcagtatggattcctctctatgtttgaagtgctgaatgcagcttcggatgtcatttctgtagagcagaccagagcaggttctctgttgacactaaaaaagagtgtatcagaggacaagcagagaggatggccagcaggtaaagtttttactcagccatttagaatgaaacaacaggggtcatattctacaggattcccagtaatgaaggcacacttttcacaacccatttcaaatatggagccccccaaacaagtactgagcatggcgaagacacccacgtttaattctgtggaggcttcaaggctgaaccacactgaaaaattaaatcaggtaagctacatctttgtttcatttctgttgattgtcgtgtctaagtttccacaaggtttgtttatttctaaactgcttggagaatttgagctaacttttaaagagcaactttcaccaaaacaattagggttcttaaacgtgacagaacttgttggcgctcttagtgacattctccgagttgagttcagtgaagaaaggcaagacttgctcgtgtttgatgctgacctgaagcctctgccgtctgttcaaccagacaagaaaacagaagctaacccttggacttccagtctctccagaaattcactatccactgtagcagttaagaagaccacgtgggattgccctttgaagaaccagaaggagccagaacagaagatatacaagaagcctaatctggtggtcaagcctctgcagctgcaggtagaaacaaacaaaccgcagctcagcctgtcagtggcaaaccacgatatcccaccagacgctgtgcgtgccaagaaattgtgcagacttcctccattagataccagcacccttgtgggggtcttcgtggagtatataatctcccctagtcagttctacatccggatctacagcagagattcctcagaactacttgaagacatgatgattgaaatgcgacgctgctactccaaccagctggtctctgaccggtacattatgccagaatattttatacaaccaggacatctctgttgtgtaaagatctctgaggacaagtggtggtaccgggttattatccatcggatccttgggaaaaaggaagtggaagtgttctacccagatttcggaaatatcggaactgtgcagaagtcctcgctgaggttcctcaaatgctgctacacaaagcttccagctcaggctatcccttgctctttggcgtgggtgaggcccgcagaggaacactggacagccagagctattttgcacttccagaagctgtgtggtttgaagccattggtgggggtggtggatgagtatatagacggaatccttaatatttttctttgtgatacgtcctcaaatgaagatgtgtattttcatcatgtcttgaggacagaaggccatgctattgtatgccgagaaaatgccccatccaagggcttcagggatttcaacccaccagctctgtacactaacgccagctcagcgggcgacatggtcctgacagacctggggcatcctgctcagcagcactatttaaatgaagaccaggagatactgcagcaagcccaggatgaggtccctactggaatgccatgcctggagtcagtgaccataggtgacgatgtttgggatgagaactggctccctctacaggccaaaatggggaaggcagggagtcctgcctcccagctgtttacttcaaaccttgttgggaagaaacaatatcagacaggtggagaaatggcacaaaaggactggtgtttttctacatctaaagatatatgggatgattcctggcagcccttaggccttgcgaatgatgtgaaaggaggaattcacacaccagaagggcccattgctcaagaaaaaaataccagcacaacccgaattcaacagcagccagatttacagtatcctttggattcttccacactgcccaaactggaagagttctacatctctctgatcaagtctcagcagtccgcagagaggagccagtctgaacctgccagcattcagactcatgccggacgggcagcctcaaaagcactcagttcaacccctgcagtgggtgactctccagaaaaccactctggctctgtggaaagctctccagggagcctaaagaaagaagatgtttctaatagccgtgctgaagccacggccaaggacaagagtcagggagccatagaccagctctctttcattttgtccccccagcaccagatttctcagaagctctacatccctcgaagtacagccacagctgtcttgggagctgcggcacggttagccacgtccaggagcctcctgcactggtaccccagtgtgaaa

SEQ ID NO: 832 - protein, 946 aa, Mus musculus
MSEQERIQDCLRKEIRSLLISTKDGLTPQQLEKEYLLMVGNHLPLRILGYRSTMELVLDMPDVVSVCPGGDGTVILKAIPDESTKGIASLVAKQRRSHKVRNSMPKGRPSICSGRVPYRGRVPPILPAVVKSELKDLLALSPVLLSDFEKAFARRFGRSFQYMQYGFLSMFEVLNAASDVISVEQTRAGSLLTLKKSVSEDKQRGWPAGKVFTQPFRMKQQGSYSTGFPVMKAHFSQPISNMEPPKQVLSMAKTPTFNSVEASRLNHTEKLNQVSYIFVSFLLIVVSKFPQGLFISKLLGEFELTFKEQLSPKQLGFLNVTELVGALSDILRVEFSEERQDLLVFDADLKPLPSVQPDKKTEANPWTSSLSRNSLSTVAVKKTTWDCPLKNQKEPEQKIYKKPNLVVKPLQLQVETNKPQLSLSVANHDIPPDAVRAKKLCRLPPLDTSTLVGVFVEYIISPSQFYIRIYSRDSSELLEDMMIEMRRCYSNQLVSDRYIMPEYFIQPGHLCCVKISEDKWWYRVIIHRILGKKEVEVFYPDFGNIGTVQKSSLRFLKCCYTKLPAQAIPCSLAWVRPAEEHWTARAILHFQKLCGLKPLVGVVDEYIDGILNIFLCDTSSNEDVYFHHVLRTEGHAIVCRENAPSKGFRDFNPPALYTNASSAGDMVLTDLGHPAQQHYLNEDQEILQQAQDEVPTGMPCLESVTIGDDVWDENWLPLQAKMGKAGSPASQLFTSNLVGKKQYQTGGEMAQKDWCFSTSKDIWDDSWQPLGLANDVKGGIHTPEGPIAQEKNTSTTRIQQQPDLQYPLDSSTLPKLEEFYISLIKSQQSAERSQSEPASIQTHAGRAASKALSSTPAVGDSPENHSGSVESSPGSLKKEDVSNSRAEATAKDKSQGAIDQLSFILSPQHQISQKLYIPRSTATAVLGAAARLATSRSLLHWYPSVK

SEQ ID NO: 833 - DNA, 1992 bp, Mus musculus
agtgaagaaaggcaagacttgctcgtgtttgatgctgacctgaagcctctgccgtctgttcaaccagacaagaaaacagaagctaacccttggacttccagtctctccagaaattcactatccactgtagcagttaagaagaccacgtgggattgccctttgaagaaccagaaggagccagaacagaagatatacaagaagcctaatctggtggtcaagcctctgcagctgcaggtagaaacaaacaaaccgcagctcagcctgtcagtggcaaaccacgatatcccaccagacgctgtgcgtgccaagaaattgtgcagacttcctccattagataccagcacccttgtgggggtcttcgtggagtatataatctcccctagtcagttctacatccggatctacagcagagattcctcagaactacttgaagacatgatgattgaaatgcgacgctgctactccaaccagctggtctctgaccggtacattatgccagaatattttatacaaccaggacatctctgttgtgtaaagatctctgaggacaagtggtggtaccgggttattatccatcggatccttgggaaaaaggaagtggaagtgttctacccagatttcggaaatatcggaactgtgcagaagtcctcgctgaggttcctcaaatgctgctacacaaagcttccagctcaggctatcccttgctctttggcgtgggtgaggcccgcagaggaacactggacagccagagctattttgcacttccagaagctgtgtggtttgaagccattggtgggggtggtggatgagtatatagacggaatccttaatatttttctttgtgatacgtcctcaaatgaagatgtgtattttcatcatgtcttgaggacagaaggccatgctattgtatgccgagaaaatgccccatccaagggcttcagggatttcaacccaccagctctgtacactaacgccagctcagcgggcgacatggtcctgacagacctggggcatcctgctcagcagcactatttaaatgaagaccaggagatactgcagcaagcccagcaagatattaatgatggaaagtgtataagttaccttaaatctgcgcccaaggaattattaaaggattctaaattgagctcattgaaaacacataagagctgtgaagaggacccacggtggtccatcctgcagcccaaggatctgaaggaagaaaatgaggatgaggtccctactggaatgccatgcctggagtcagtgaccataggtgacgatgtttgggatgagaactggctccctctacaggccaaaatggggaaggcagggagtcctgcctcccagctgtttacttcaaaccttgttgggaagaaacaatatcagacaggtggagaaatggcacaaaaggactggtgtttttctacatctaaagatatatgggatgattcctggcagcccttaggccttgcgaatgatgtgaaaggaggaattcacacaccagaagggcccattgctcaagaaaaaaataccagcacaacccgaattcaacagcagccagatttacagtatcctttggattcttccacactgcccaaactggaagagttctacatctctctgatcaagtctcagcagtccgcagagaggagccagtctgaacctgccagcattcagactcatgccggacgggcagcctcaaaagcactcagttcaacccctgcagtgggtgactctccagaaaaccactctggctctgtggaaagctctccagggagcctaaagaaagaagatgtttctaatagccgtgctgaagccacggccaaggacaagagtcagggagccatagaccagctctctttcattttgtccccccagcaccagatttctcagaagctctacatccctcgaagtacagccacagctgtcttgggagctgcggcacggttagccacgtccaggagcctcctgcactggtaccccagtgtgaaa

SEQ ID NO: 834 - protein, 664 aa, Mus musculus
SEERQDLLVFDADLKPLPSVQPDKKTEANPWTSSLSRNSLSTVAVKKTTWDCPLKNQKEPEQKIYKKPNLVVKPLQLQVETNKPQLSLSVANHDIPPDAVRAKKLCRLPPLDTSTLVGVFVEYIISPSQFYIRIYSRDSSELLEDMMIEMRRCYSNQLVSDRYIMPEYFIQPGHLCCVKISEDKWWYRVIIHRILGKKEVEVFYPDFGNIGTVQKSSLRFLKCCYTKLPAQAIPCSLAWVRPAEEHWTARAILHFQKLCGLKPLVGVVDEYIDGILNIFLCDTSSNEDVYFHHVLRTEGHAIVCRENAPSKGFRDFNPPALYTNASSAGDMVLTDLGHPAQQHYLNEDQEILQQAQQDINDGKCISYLKSAPKELLKDSKLSSLKTHKSCEEDPRWSILQPKDLKEENEDEVPTGMPCLESVTIGDDVWDENWLPLQAKMGKAGSPASQLFTSNLVGKKQYQTGGEMAQKDWCFSTSKDIWDDSWQPLGLANDVKGGIHTPEGPIAQEKNTSTTRIQQQPDLQYPLDSSTLPKLEEFYISLIKSQQSAERSQSEPASIQTHAGRAASKALSSTPAVGDSPENHSGSVESSPGSLKKEDVSNSRAEATAKDKSQGAIDQLSFILSPQHQISQKLYIPRSTATAVLGAAARLATSRSLLHWYPSVK

SEQ ID NO: 835 - DNA, 513 bp, Mus musculus
cagcagacctccagcaagcagacatgcctgggttccagtgagctgcccattctgctgccctccgagttcacaggtgagggagagtcagctccgagaggatacttgggcaactacagggatgcgacgaagcaggatctgaacccagaccccttgatctccagccctcaggtgagtgtgacaaggggacactggcagccctcatacctactatgtgttttccagtctcagacccaacagcaagccctccatgttctatccactggcaaggtggggggagatcccttactgacccagggagtggggcttacaaaaggccacagagcaagtgtgaataccattgtagagatcctgctattgggctatttgtgcagagtaaacgtggctgagggaatgaaggattccctgcatacaggggcctatgtggctgtgtcactcatagaactaaccagacccagtagagaccctgggtatagctctcatctaggcagctgtttctatttgtgggacccatga

SEQ ID NO: 836 - protein, 170 aa, Mus musculus
QQTSSKQTCLGSSELPILLPSEFTGEGESAPRGYLGNYRDATKQDLNPDPLISSPQVSVTRGHWQPSYLLCVFQSQTQQQALHVLSTGKVGGDPLLTQGVGLTKGHRASVNTIVEILLLGYLCRVNVAEGMKDSLHTGAYVAVSLIELTRPSRDPGYSSHLGSCFYLWDP

SEQ ID NO: 837 - DNA, 900 bp, Mus musculus
ggggcaatggcgctgcgaaggctgctcctgctgttggtggccgccctgaaactgactgagacacgcgcgggctcacactcgctgcggtatttcaccaccgccgtgtcccggcctggcctcggggagccccggttcattatcgtcggctacgtggacgacacgcagttcgtgcgcttcgacagcgacgcggagaatccgaggatggagccgcgggcgccgtggatggagcaggaggggccggagtattgggagcggaacacacaggtctccaaggaaaatgagcagagtttccgagtgagcctggggaccgcactgagctactacaaccagagcaagggaggtgagaccccgggtcggaggtcacgacccctccacgtccccacacaggagcccagagacctcccgcatcccaagtccaaggttcgggagcagaacccacctggaatcggtttccctttcagtttggttgagcccacaggtgggcggggccggacagatcccccaaaggcgcatgtgacccatcaccccagttctcaaggtgatgtcaccctgaggtgctgggccctgggcttctaccctgctgacatcaccctgacctggcagttgaatggggaggacctgacccaggacatggagcttgtggagaccaggccttcaggggatggaaccttccagaagtgggcatctgtgatggtgccttttggggaggagcctagatacacatgccatgtggaacatgaggggctgcctgagcccctcaccctgagatgggagcctcctccatccactgactcttacatggtgatcattgctgttctggttgtccttggagctgtgatcatcattggagctgtggtggcttttgtgatgaaaagagggagaaacacaggtaggaaaggt

SEQ ID NO: 838 - protein, 300 aa, Mus musculus
GAMALRRLLLLLVAALKLTETRAGSHSLRYFTTAVSRPGLGEPRFIIVGYVDDTQFVRFDSDAENPRMEPRAPWMEQEGPEYWERNTQVSKENEQSFRVSLGTALSYYNQSKGGETPGRRSRPLHVPTQEPRDLPHPKSKVREQNPPGIGFPFSLVEPTGGRGRTDPPKAHVTHHPSSQGDVTLRCWALGFYPADITLTWQLNGEDLTQDMELVETRPSGDGTFQKWASVMVPFGEEPRYTCHVEHEGLPEPLTLRWEPPPSTDSYMVIIAVLVVLGAVIIIGAVVAFVMKRGRNTGRKG

SEQ ID NO: 839 - DNA, 942 bp, Mus musculus
ggggcaatggcgctgcgaaggctgctcctgctgttggtggccgccctgaaactgactgagacacgcgcgggctcacactcgctgcggtatttcaccaccgccgtgtcccggcctggcctcggggagccccggttcattatcgtcggctacgtggacgacacgcagttcgtgcgcttcgacagcgacgcggagaatccgaggatggagccgcgggcgccgtggatggagcaggaggggccggagtattgggagcggaacacacaggtctccaaggaaaatgagcagagtttccgagtgagcctggggaccgcactgagctactacaaccagagcaagggaggctctcacactctccagtggttggttggctgtgacctggggccagacggaagcctactccgagggtatgagcagtctgcctacgatggccgcgattacctcgccctgaatgaggatctgataacgtggacagcggcggacctggcagcactgaagacccgaagcaagttggagcaggctggtcttgcagagaagcgcagggcctacctggaggtcgattgcttgacgtggctccgcagatacctggagctcgggaaggagacgctgctgcacacagatcccccaaaggcgcatgtgacccatcaccccagttctcaaggtgatgtcaccctgaggtgctgggccctgggcttctaccctgctgacatcaccctgacctggcagttgaatggggaggacctgacccaggacatggagcttgtggagaccaggccttcaggggatggaaccttccagaagtgggcatctgtgatggtgccttttggggaggagcctagatacacatgccatgtggaacatgaggggctgcctgagcccctcaccctgagatgggagcctcctccatccactgactcttacatggtgatcattgctgttctggtt

SEQ ID NO: 840 - protein, 314 aa, Mus musculus
GAMALRRLLLLLVAALKLTETRAGSHSLRYFTTAVSRPGLGEPRFIIVGYVDDTQFVRFDSDAENPRMEPRAPWMEQEGPEYWERNTQVSKENEQSFRVSLGTALSYYNQSKGGSHTLQWLVGCDLGPDGSLLRGYEQSAYDGRDYLALNEDLITWTAADLAALKTRSKLEQAGLAEKRRAYLEVDCLTWLRRYLELGKETLLHTDPPKAHVTHHPSSQGDVTLRCWALGFYPADITLTWQLNGEDLTQDMELVETRPSGDGTFQKWASVMVPFGEEPRYTCHVEHEGLPEPLTLRWEPPPSTDSYMVIIAVLV

SEQ ID NO: 841 - DNA, 951 bp, Mus musculus
ggctcacactcgctgcggtatttcaccaccgccgtgtcccggcctggcctcggggagccccggttcattatcgtcggctacgtggacgacacgcagttcgtgcgcttcgacagcgacgcggagaatccgaggatggagccgcgggcgccgtggatggagcaggaggggccggagtattgggagcggaacacacaggtctccaaggaaaatgagcagagtttccgagtgagcctggggaccgcactgagctactacaaccagagcaagggaggctctcacactctccagtggttggttggctgtgacctggggccagacggaagcctactccgagggtatgagcagtctgcctacgatggccgcgattacctcgccctgaatgaggatctgataacgtggacagcggcggacctggcagcactgaagacccgaagcaagttggagcaggctggtcttgcagagaagcgcagggcctacctggaggtcgattgcttgacgtggctccgcagatacctggagctcgggaaggagacgctgctgcacacagatcccccaaaggcgcatgtgacccatcaccccagttctcaaggtgatgtcaccctgaggtgctgggccctgggcttctaccctgctgacatcaccctgacctggcagttgaatggggaggacctgacccaggacatggagcttgtggagaccaggccttcaggggatggaaccttccagaagtgggcatctgtgatggtgccttttggggaggagcctagatacacatgccatgtggaacatgaggggctgcctgagcccctcaccctgagatgggagcctcctccatccactgactcttacatggtgatcattgctgttctggttgtccttggagctgtgatcatcattggagctgtggtggcttttgtgatgaaaagagggagaaacacaggtaggaaaggt

SEQ ID NO: 842 - protein, 317 aa, Mus musculus
GSHSLRYFTTAVSRPGLGEPRFIIVGYVDDTQFVRFDSDAENPRMEPRAPWMEQEGPEYWERNTQVSKENEQSFRVSLGTALSYYNQSKGGSHTLQWLVGCDLGPDGSLLRGYEQSAYDGRDYLALNEDLITWTAADLAALKTRSKLEQAGLAEKRRAYLEVDCLTWLRRYLELGKETLLHTDPPKAHVTHHPSSQGDVTLRCWALGFYPADITLTWQLNGEDLTQDMELVETRPSGDGTFQKWASVMVPFGEEPRYTCHVEHEGLPEPLTLRWEPPPSTDSYMVIIAVLVVLGAVIIIGAVVAFVMKRGRNTGRKG

SEQ ID NO: 843 - DNA, 951 bp, Mus musculus; identical to SEQ ID NO: 841

SEQ ID NO: 844 - protein, 317 aa, Mus musculus; identical to SEQ ID NO: 842

SEQ ID NO: 845 - DNA, 795 bp, Mus musculus
ggctcacactcgctgcggtatttcaccaccgccgtgtcccggcctggcctcggggagccccggttcattatcgtcggctacgtggacgacacgcagttcgtgcgcttcgacagcgacgcggagaatccgaggatggagccgcgggcgccgtggatggagcaggaggggccggagtattgggagcggaacacacaggtctccaaggaaaatgagcagagtttccgagtgagcctggggaccgcactgagctactacaaccagagcaagggaggtgagaccccgggtcggaggtcacgacccctccacgtccccacacaggagcccagagacctcccgcatcccaagtccaaggttcgggagcagaacccacctggaatcggtttccctttcagtttggttgagcccacaggtgggcggggccggacagatcccccaaaggcgcatgtgacccatcaccccagttctcaaggtgatgtcaccctgaggtgctgggccctgggcttctaccctgctgacatcaccctgacctggcagttgaatggggaggacctgacccaggacatggagcttgtggagaccaggccttcaggggatggaaccttccagaagtgggcatctgtgatggtgccttttggggaggagcctagatacacatgccatgtggaacatgaggggctgcctgagcccctcaccctgagatgggagcctcctccatccactgactcttacatggtgatcattgctgttctggttgtccttggagcttcatcattggagctgtggtggcttttgtga

SEQ ID NO: 846 - protein, 264 aa, Mus musculus
GSHSLRYFTTAVSRPGLGEPRFIIVGYVDDTQFVRFDSDAENPRMEPRAPWMEQEGPEYWERNTQVSKENEQSFRVSLGTALSYYNQSKGGETPGRRSRPLHVPTQEPRDLPHPKSKVREQNPPGIGFPFSLVEPTGGRGRTDPPKAHVTHHPSSQGDVTLRCWALGFYPADITLTWQLNGEDLTQDMELVETRPSGDGTFQKWASVMVPFGEEPRYTCHVEHEGLPEPLTLRWEPPPSTDSYMVIIAVLVVLGASSLELWWLL

SEQ ID NO: 847 - DNA, 3810 bp, Mus musculus
ttttgaactccttccttcaaaacagtcaaggagcctgtggtgggcaagtctcctttggatagtttgacctgctgatagttcaggacagcagcagccacatcatactgttagtgttccacaacaaacacagtgaaattctgtcttaaaaagggaaatgcagcccggtggtggtggcgcacgcttttaatcccagcacttaggaggcagaggcaggtggatttctgagttagaggccagcctggtctacagagtgagttttaggacagccagggctacacacagaaaccctgtctcgaaaaagcaaaaaaaaaaaaaaaaaaaaaaagggaaatgcaaacactggcgccacagtcctgggccagcgtttttgcagcaacttcacaatctaaagtgctaaacaggcctggctgggcttgaggaagggacagttttgtttggctttggtagtgccgaggaaccagccaaggacttcatgcttactggccttggggcattcatctatgagatttttattttacatgattggaggtttcccctgtgtgcttgtacccatagaggccagaagaaggcattggattcccttgtagttagaattacagagaattgttagctaccatgtgggtgctgggaattgaacctaggtcctctggaaaggcagtcagtgctcctaacccctgagccatcttctccagccccagaaggtttttcaaaaatagtttttagttgggtatatgtgagggggtctgagcgcccttgccttgggagacgctggaattgtgggtggctgtgagccacctaacgtgggtgttgggactcaatctgggggtcctcgttgcaagagctgcagcatatgttcttaactaagtcatctccagcctctatctgttttttgggaaacgtggtctcctttaatcattgacgaaactcaaagcttgcatcagtcttgctggagcatcccaagtcctacaattatgggtttgagccaccatgggcagtttcaggccagttgtttactaagtacctgtcgtctttaccaggattcttcacagtgagttttaatgctctttaagatatccatttccataaccttggcatctaggctaacataagctatgcactttcctgtgaggaatgaaaactaattctttctgcatcctagtcccaatgaggaatcctggttgaaaaggggttacgaactacttatctccacctataactgtggacagcgatttaccccagtaacaggaagttcttagcagcagagaggaggggggctttgcttctgatcttgaactgtacaacagttggatcactttgcttcggtgactccctggttgctttgcactacaacttgtatctgcaaaactttcccctcccatttctgttttcactttgctacagacttagaatgagagcttggctgacttattccagatattaggaagctagagttacagctcaaaggtagaatacttcctttgcaaaaggcttgatgaggctggagagatggctcagcggttaagagcactgactgctcttccagaggtcctgagttcaattcccagcaaccacatggtggctcacaaccatctgtaacaggatccgatgccctcttctggtgtgtctgaagacagttacagtgtacttacataaaataaaaaattttttttaaaaaagaaaaacttgtttttaaaatttgtgtgtgtgtgtgcacacgcgcaacagtgcatatatggggatctggacaacttggaggagtcggttctctccttccaccatgtgacgtgggactcggggtttgagctacgatcatcaggcttggcagcaggtgcctttatccacagagccatctagtttttgttttaataaagtgttgaagtatttggctgcagtgagatgttagtgaagctggtctctggatttgctaagacggcaaaaggggtatttaggagttactacatggcctgtcacagcattacttgagagttacagggttgagtcccaggtcctggcttttcttgtgaaattctaagcctgcttcttgtatgaaactggcactctacctcagaagtcatataagttgtataagataactggacacaaactcctagcccaaggcactgccacactaaggctttgtagatcaacccaaataatacattgtaaatgtgtagacagacttctactagccagtcggggctttggctgcaatcatggctgttgcctaagactgctgatcacctatggatcactaggatgttttgagttcagacaagcatttaaaacactcaagtcaccaggcgtggtggcgcacacctttaatcccagcactcgggaggcagaggcaggcggatttctgagttcgaggacagcctggtctacaaagtgagttccaggacagccagggctacacagagaaaccctgtctccaaacaaacaaaaaacaagtcaggggctcaagagatggctcatgagctaagagcatttagctattacagagggtctgggtttcgttccttgtaccaacatggaagttcacacttcctgaaactgctctgggagctctcacaggcacccccttccaacctgtggattcctgcacacataggcatagacttgcaggcacatacatttaaagattaaaagcacattcaagtctggcctgagatgctgggattcatgaggcctatttttttgaagtcctataaatgtcatattaaaatgacttgtcgggttcattaacctaaaacgacataatttatggtaagaaattcaggccactgaatgacaagctcaaatttgatccacaccatgacaaaaatacttcttgtcttttttttttgtttgtttgtttttgactcctccctttgtagcaactgcatttctttagtttctcctagaagacaggaaatcctgactcttgaaaaaaattacaattctaaaattttgtatgtggcagaggtatgtactatagtgtgcctggggaggtcagaggaaaacttgttagagtctattttctgcctccaccatgtgggtcttaaggagcagactaagatcatcagaattggtagcaattgcccttacccgctgaacccactaccaccaccaccactgctggctctttaattctattctctcccccaaataaattaatgagatgtttatttgagcatttcccaagtatttactcagtgctagacaaaagaaaaaaaaatccaaacatgattcatgctatttggataaacagaagggggaaggcagagaactaacatttaagtagatatgctgtgattagcagcgcttttgaataccagtagaaccatatattttttactgtataaaggaataaaagaattaatggcagtcgacaacttaagagaggagaagtaggtgggataaggagctggtaaaaagcaaggactgaaaattgtggggaaaaaagtaacagggagggagaagtcaagaagctgaaagaacttgacagtgttagcttggagagatggggaggggctgtgacagccgaggacctgaggacctgaagaccacgagcacgtgtcgtgaagatcttgggtgggaaaatgacatcaggtatctgatgtgaattactgggtaatattaggcaaatagtgttaacctctctggatctgagcatcagatcaaagacccgaaggtgagaaggacaggagactaacaagatttaaactttgcaaagcatttcagtgacttcatgaaaccaatgcaatgggtggtaacacagcaagataaccttgggttcaaagccattccgcgaaattttagccagattctgtc

SEQ ID NO: 848 - protein, 113 aa, Mus musculus
MTSSNLIHTMTKILLVFFFCLFVFDSSLCSNCISLVSPRRQEILTLEKNYNSKILYVAEVCTIVCLGRSEENLLESIFCLHHVGLKEQTKIIRIGSNCPYPLNPLPPPPLLAL

SEQ ID NO: 849 - DNA, 1815 bp, Homo sapiens
gctttttctttccagtgttggctgacttacagctcttataaactagtggcaatttctgaacccagccggctccatctcagcttctggtttctaagtccatgtgccaaaggctgccaggaaggagacgccttcctgagtcctggatctttcttccttctggaaatctttgactgtgggtagttatttatttctgaataagagcgtccacgcatcatggacctcgcgggactgctgaagtctcagttcctgtgccacctggtcttctgctacgtctttattgcctcagggctaatcatcaacaccattcagctcttcactctcctcctctggcccattaacaagcagctcttccggaagatcaactgcagactgtcctattgcatctcaagccagctggtgatgctgctggagtggtggtcgggcacggaatgcaccatcttcacggacccgcgcgcctacctcaagtatgggaaggaaaatgccatcgtggttctcaaccacaagtttgaaattgactttctgtgtggctggagcctgtccgaacgctttgggctgttagggggctccaaggtcctggccaagaaagagctggcctatgtcccaattatcggctggatgtggtacttcaccgagatggtcttctgttcgcgcaagtgggagcaggatcgcaagacggttgccaccagtttgcagcacctccgggactaccccgagaagtattttttcctgattcactgtgagggcacacggttcacggagaagaagcatgagatcagcatgcaggtggcccgggccaaggggctgcctcgcctcaagcatcacctgttgccacgaaccaagggcttcgccatcaccgtgaggagcttgagaaatgtagtttcagctgtatatgactgtacactcaatttcagaaataatgaaaatccaacactgctgggagtcctaaacggaaagaaataccatgcagatttgtatgttaggaggatcccactggaagacatccctgaagacgatgacgagtgctcggcctggctgcacaagctctaccaggagaaggatgcctttcaggaggagtactacaggacgggcaccttcccagagacgcccatggtgcccccccggcggccctggaccctcgtgaactggctgttttgggcctcgctggtgctctaccctttcttccagttcctggtcagcatgatcaggagcgggtcttccctgacgctggccagcttcatcctcgtcttctttgtggcctccgtgggagttcgatggatgattggtgtgacggaaattgacaagggctctgcctacggcaactctgacagcaagcagaaactgaatgactgactcagggaggtgtcaccatccgaagggaaccttggggaactggtggcctctgcatatcctccttagtgggacacggtgacaaaggctgggtgagcccctgctgggcacggcggaagtcacgacctctccagccagggagtctggtctcaaggccggatggggaggaagatgttttgtaatctttttttccccatgtgctttagtgggctttggttttctttttgtgcgagtgtgtgtgagaatggctgtgtggtgagtgtgaactttgttctgtgatcatagaaagggtattttaggctgcaggggagggcagggctggggaccgaaggggacaagttcccctttcatcctttggtgctgagttttctgtaacccttggttgccagagataaagtgaaaagtgctttaggtgagatgactaaattatgcctccaagaaaaaaaaattaaagtgcttttctgggtc

SEQ ID NO: 850 - protein, 378 aa, Homo sapiens
MDLAGLLKSQFLCHLVFCYVFIASGLIINTIQLFTLLLWPINKQLFRKINCRLSYCISSQLVMLLEWWSGTECTIFTDPRAYLKYGKENAIVVLNHKFEIDFLCGWSLSERFGLLGGSKVLAKKELAYVPIIGWMWYFTEMVFCSRKWEQDRKTVATSLQHLRDYPEKYFFLIHCEGTRFTEKKHEISMQVARAKGLPRLKHHLLPRTKGFAITVRSLRNVVSAVYDCTLNFRNNENPTLLGVLNGKKYHADLYVRRIPLEDIPEDDDECSAWLHKLYQEKDAFQEEYYRTGTFPETPMVPPRRPWTLVNWLFWASLVLYPFFQFLVSMIRSGSSLTLASFILVFFVASVGVRWMIGVTEIDKGSAYGNSDSKQKLND

SEQ ID NO: 851 - DNA, 1009 bp, Homo sapiens
tttgtctcttcctgagaaacgagcaaacctgaaagctactctctcagcttcagagggaaaaaatggttgtagatttctggacttgggagcagacatttcaagaactaatccaagaggcaaaaccccgggccacatggacgctgaagttggatggcaaccttcagctagactgcctggctcaagggtggaagcaataccaacagagagcatttggctggttccggtgttcctcctgccagcgaagttgggcttccgcccaagtgcagattctgtgccacacgtactgggagcactggacatcccagggtcaggtgcgtatgaggctctttggccaaaggtgccagaagtgctcctggtcccaatatgagatgcctgagttctcctcggatagcaccatgaggattctgagcaacctggtgcagcatatactgaagaaatactatggaaatggcacgaggaagtctccagaaatgccagtaatcctggaagtgtccctggaaggatcccatgacacagccaattgtgaggcatgcactttgggcatctgtggacagggcttaaaaagctgcatgacaaagccgtccaaatccctactcccccacctaaagactgggaattcctcacctggaattggtgctgtgtacctcgcaaaccaagccaagaaccagtcagctgaggcaaaagaggctaaggggagtgggtatgagaaattagggcccagtcgagacccagatccactgaacatctgtgtctttattttgctgcttgtatttattgtagtcaaatgctttacatcagaatgatgaaaataggcttgccactttctcttattttaattccatggtagtcaatgaactggctgccactttaatataactgaaaattcattttgagaccaagcaggatcaagtttgtagaataaacactggtttcctagccatcctctgaaaacagtatgaaacatgaccaagtacataatggatttagtaataaatattgtcgaattgct

SEQ ID NO: 852 - protein, 246 aa, Homo sapiens
MVVDFWTWEQTFQELIQEAKPRATWTLKLDGNLQLDCLAQGWKQYQQRAFGWFRCSSCQRSWASAQVQILCHTYWEHWTSQGQVRMRLFGQRCQKCSWSQYEMPEFSSDSTMRILSNLVQHILKKYYGNGTRKSPEMPVILEVSLEGSHDTANCEACTLGICGQGLKSCMTKPSKSLLPHLKTGNSSPGIGAVYLANQAKNQSAEAKEAKGSGYEKLGPSRDPDPLNICVFILLLVFIVVKCFTSE

SEQ ID NO: 853 - DNA, 2109 bp, Homo sapiens
tcctatccaccctccactcccctgtcccttggtgactcatccctgagcttcccaaggaagcccccaccctctgccctttcctcccgccttccatgagtggaaaatccacctccgccccctatagcaggccagcccccttcctccccagtctccgaccccatcccccagccgaccagtttcctctccaggaccagggagcaatcacagctgccccgaccttggcttcctctgctgggtgggattgggggctgggcccccaaatgggcccctggcttcccccttcctctgggcaggggacagagagacacaggctcggggagcaggactgacttcctcttgtcccggaatgagcatgcctgccctttgcaagcaggtttgggtctcacgcagaggaaaccaaaagcaataagagggagggaaggcagagcaaccaatcaagggcagggtgagactcaaaacgagcgggctccctggggagccagacagaggctgggggtgatggcggagctacagcagctgcaggagtttgagatccccactggccgggaggctctgaggggcaaccacagtgccctgctgcgggtcgctgactactgcgaggacaactatgtgcaggccacagacaagcggaaggcgctggaggagaccatggccttcactacccaggcactggccagcgtggcctaccaggtgggcaacctggccgggcacactctgcgcatgttggacctgcagggggccgccctgcggcaggtggaagcccgtgtaagcacgctgggccagatggtgaacatgcatatggagaaggtggcccgaagggagatcggcaccttagccactgtccagcggctgccccccggccagaaggtcatcgccccagagaacctaccccctctcacgccctactgcaggagacccctcaactttggctgcctggacgacattggccatgggatcaaggacctcagcacgcagctgtcaagaacaggcaccctgtctcgaaagagcatcaaggcccctgccacacccgcctccgccaccttggggagaccaccccggattcccgagccagtgcacctgccggtggtgcccgacggcagactctccgccgcctcctctgcgttttccctggcctcggccggcagcgccgaaggtgtcggtggggcccccacgcccaaggggcaggcagcacctccagccccacctctccccagctccttggacccacctcctccaccagcagccgtcgaggtgttccagcggcctcccacgctggaggagttgtccccacccccaccggacgaagagctgcccctgccactggacctgcctcctcctccacccctggatggagatgaattggggctgcctccacccccaccaggatttgggcctgatgagcccagctgggtgcctgcctcatacttggagaaagtggtgacactgtacccatacaccagccagaaggacaatgagctctccttctctgagggcactgtcatctgtgtcactcgccgctactccgatggctggtgcgagggcgtcagctcagaggggactggattcttccctgggaactatgtggagcccagctgctgacagcccagggctctctgggcagctgatgtctgcactgagtgggtttcatgagccccaagccaaaaccagctccagtcacagctggactgggtctgcccacctcttgggctgtgagctgtgttctgtccttcctcccatcggagggagaaggggtcctggggagagagaatttatccagaggcctgctgcagatggggaagagctggaaaccaagaagtttgtcaacagaggacccctactccatgcaggacagggtctcctgctgcaagtcccaactttgaataaaacagatgatgtcctgtgactgccccacagagataaggggccaggagggattgaaaggcatcccagttctaaggctgctgctaattacagcccccaacctccaacccaccagctgacctagaagcagcatcttcccatttcctcagtacccacaaagtgcagcccacattggaccccagacacccctctgcagccattgactgcaacttgttcttttgcccattg

SEQ ID NO: 854 - protein, 366 aa, Homo sapiens
MAELQQLQEFEIPTGREALRGNHSALLRVADYCEDNYVQATDKRKALEETMAFTTQALASVAYQVGNLAGHTLRMLDLQGAALRQVEARVSTLGQMVNMHMEKVARREIGTLATVQRLPPGQKVIAPENLPPLTPYCRRPLNFGCLDDIGHGIKDLSTQLSRTGTLSRKSIKAPATPASATLGRPPRIPEPVHLPVVPDGRLSAASSAFSLASAGSAEGVGGAPTPKGQAAPPAPPLPSSLDPPPPPAAVEVFQRPPTLEELSPPPPDEELPLPLDLPPPPPLDGDELGLPPPPPGFGPDEPSWVPASYLEKVVTLYPYTSQKDNELSFSEGTVICVTRRYSDGWCEGVSSEGTGFFPGNYVEPSC

SEQ ID NO: 855 - DNA, 2437 bp, Homo sapiens
agcggctctctgagcgaagtcactgagcgagccgccaggctatgaccccaggggctctgctgatgctgctgggggcgctgggggcgccgctcgccccaggcgtccgcggctcggaggcggagggtcgactccgggagaaacttttctctggctatgatagctccgtgcggccagcgcgggaggtgggagaccgtgtcagggtcagcgttggtctcatcctggcgcaactcatcagcctgaacgagaaggatgaagagatgagcacaaaggtgtacttagacctggagtggactgactacaggctgagctgggaccctgcggagcacgacggcatcgattcgctccgcatcacggcggaatccgtgtggctccctgacgtggtgctactgaacaacaatgatgggaattttgacgtggctctggacattagcgtcgtggtgtcctccgacggctccgtgcgttggcaacccccgggcatctatcgcagcagctgcagcatccaggtcacctacttccccttcgactggcagaattgcactatggtgttcagctcctacagctacgacagctcggaggtcagcctgcagacaggcctgggtcctgacgggcaagggcatcaggaaatccacattcatgaagggactttcattgagaatggccagtgggagattatccacaagccctctcggctaatccagcctccaggcgatcctaggggagggagggaaggacagcgccaggaagtcatcttctacctcatcatccgccgcaagcctctcttctacctggtcaacgtcattgccccatgcatcctcatcactcttctggccatcttcgtcttctacctgccaccagatgcaggagagaagatggggctctcaatctttgccctgctgacccttactgtgttcctgctgctgctggctgacaaagtacctgagacctcactatcagtacccattattatcaagtacctcatgtttaccatggtcctcgtcaccttctcagtcatccttagtgtcgtggttctcaacctgcaccaccgctcaccccacacccaccaaatgcccctttgggtccgtcagatcttcattcacaaacttccgctgtacctgcgtctaaaaaggcccaaacccgagagagacctgatgccggagccccctcactgttcttctccaggaagtggctggggtcggggaacagatgaatatttcatccggaagccgccaagtgattttctcttccccaaacccaataggttccagcctgaactgtctgcccctgatctgcggcgatttatcgatggtccaaaccgggctgtggccctgcttccggagctacgggaggtcgtctcctctatcagctacatcgctcgacagctgcaggaacaggaggaccacgatgcgctgaaggaggactggcagtttgtggccatggtagtggaccgcctcttcctgtggactttcatcatcttcaccagcgttgggaccctagtcatcttcctggacgccacgtaccacttgccccctccagacccctttccttgaagactggagggttgagacccaggccccctgccagttgaagtgagagtttggtgatactgtcaagccctatccttctctgcctcttaactccttcacgaggaatctgggcctcttatttcgtttctggggactgcattggactgagggctgggtaggcaggtgtcttggacccacctgaaatgcagtatcatctgatttactctttgggatcttgaagaagctcttttgggtatcaacacctaggtcgccagtgaaatagaacacagaacaggaactagattataagccttatgaggtcaagaaatgtgacttggccgggcgcggtggctcacgcctgtaatcccagcactttgggaggccaaggcgggcggatcacctgaggtcgggagtttgagaccagcccgaccaacatggagaaaccctgtctctactaaaaatacaaaattagccaggtgtggtggtacatgcctgtaatcccagctactagggaggctgaggcaggagaatcactcgaacccgggaggcagaggttgcagtgagtcaagatcacgccattgcactccagcctgggcaacaagagcgaaactccatctcaaaaaaaaaaaagtgtcttgttcactgcagcatgcccagtgccacgcacaggtgctgacctatagtaagtgcttaacatttgttgaataggggaaagaaatttccggaagtaaatacagcaattaataatgtttataagctgggcatggtcgctcaggccagtaatcccagtgacttaggaggctgaggtgggaggattacttgaaacccacagtttgagaccagcctgggcaacatagtgagaccctgtctctaaaaaaataaaaatagaaataaagtagtgcttattgtttgca

SEQ ID NO: 856 - protein, 501 aa, Homo sapiens
MTPGALLMLLGALGAPLAPGVRGSEAEGRLREKLFSGYDSSVRPAREVGDRVRVSVGLILAQLISLNEKDEEMSTKVYLDLEWTDYRLSWDPAEHDGIDSLRITAESVWLPDVVLLNNNDGNFDVALDISVVVSSDGSVRWQPPGIYRSSCSIQVTYFPFDWQNCTMVFSSYSYDSSEVSLQTGLGPDGQGHQEIHIHEGTFIENGQWEIIHKPSRLIQPPGDPRGGREGQRQEVIFYLIIRRKPLFYLVNVIAPCILITLLAIFVFYLPPDAGEKMGLSIFALLTLTVFLLLLADKVPETSLSVPIIIKYLMFTMVLVTFSVILSVVVLNLHHRSPHTHQMPLWVRQIFIHKLPLYLRLKRPKPERDLMPEPPHCSSPGSGWGRGTDEYFIRKPPSDFLFPKPNRFQPELSAPDLRRFIDGPNRAVALLPELREVVSSISYIARQLQEQEDHDALKEDWQFVAMVVDRLFLWTFIIFTSVGTLVIFLDATYHLPPPDPFP

SEQ ID NO: 857 - DNA, 4330 bp, Homo sapiens
gggagaacccacagggagacccacagacacatatgcacgagagagacagaggaggaaagagacagagacaaaggcacagcggaagaaggcagagacagggcaggcacagaagcggcccagacagagtcctacagagggagaggccagagaagctgcagaagacacaggcagggagagacaaagatccaggaaaggagggctcaggaggagagtttggagaagccagacccctgggcacctctcccaagcccaaggactaagttttctccatttcctttaacggtcctcagcccttctgaaaactttgcctctgaccttggcaggagtccaagcccccaggctacagagaggagctttccaaagctagggtgtggaggacttggtgccctagacggcctcagtccctcccagctgcagtaccagtgccatgtcccagacaggctcgcatcccgggaggggcttggcagggcgctggctgtggggagcccaaccctgcctcctgctccccattgtgccgctctcctggctggtgtggctgcttctgctactgctggcctctctcctgccctcagcccggctggccagccccctcccccgggaggaggagatcgtgtttccagagaagctcaacggcagcgtcctgcctggctcgggcgcccctgccaggctgttgtgccgcttgcaggcctttggggagacgctgctactagagctggagcaggactccggtgtgcaggtcgaggggctgacagtgcagtacctgggccaggcgcctgagctgctgggtggagcagagcctggcacctacctgactggcaccatcaatggagatccggagtcggtggcatctctgcactgggatgggggagccctgttaggcgtgttacaatatcggggggctgaactccacctccagcccctggagggaggcacccctaactctgctgggggacctggggctcacatcctacgccggaagagtcctgccagcggtcaaggtcccatgtgcaacgtcaaggctcctcttggaagccccagccccagaccccgaagagccaagcgctttgcttcactgagtagatttgtggagacactggtggtggcagatgacaagatggccgcattccacggtgcggggctaaagcgctacctgctaacagtgatggcagcagcagccaaggccttcaagcacccaagcatccgcaatcctgtcagcttggtggtgactcggctagtgatcctggggtcaggcgaggaggggccccaagtggggcccagtgctgcccagaccctgcgcagcttctgtgcctggcagcggggcctcaacacccctgaggactcggaccctgaccactttgacacagccattctgtttacccgtcaggacctgtgtggagtctccacttgcgacacgctgggtatggctgatgtgggcaccgtctgtgacccggctcggagctgtgccattgtggaggatgatgggctccagtcagccttcactgctgctcatgaactgggtcatgtcttcaacatgctccatgacaactccaagccatgcatcagtttgaatgggcctttgagcacctctcgccatgtcatggcccctgtgatggctcatgtggatcctgaggagccctggtccccctgcagtgcccgcttcatcactgacttcctggacaatggctatgggcactgtctcttagacaaaccagaggctccattgcatctgcctgtgactttccctggcaaggactatgatgctgaccgccagtgccagctgaccttcgggcccgactcacgccattgtccacagctgccgccgccctgtgctgccctctggtgctctggccacctcaatggccatgccatgtgccagaccaaacactcgccctgggccgatggcacaccctgcgggcccgcacaggcctgcatgggtggtcgctgcctccacatggaccagctccaggacttcaatattccacaggctggtggctggggtccttggggaccatggggtgactgctctcggacctgtgggggtggtgtccagttctcctcccgagactgcacgaggcctgtcccccggaatggtggcaagtactgtgagggccgccgtacccgcttccgctcctgcaacactgaggactgcccaactggctcagccctgaccttccgcgaggagcagtgtgctgcctacaaccaccgcaccgacctcttcaagagcttcccagggcccatggactgggttcctcgctacacaggcgtggccccccaggaccagtgcaaactcacctgccaggcccaggcactgggctactactatgtgctggagccacgggtggtagatgggaccccctgttccccggacagctcctcggtctgtgtccagggccgatgcatccatgctggctgtgatcgcatcattggctccaagaagaagtttgacaagtgcatggtgtgcggaggggacggttctggttgcagcaagcagtcaggctccttcaggaaattcaggtacggatacaacaatgtggtcactatccccgcgggggccacccacattcttgtccggcagcagggaaaccctggccaccggagcatctacttggccctgaagctgccagatggctcctatgccctcaatggtgaatacacgctgatgccctcccccacagatgtggtactgcctggggcagtcagcttgcgctacagcggggccactgcagcctcagagacactgtcaggccatgggccactggcccagcctttgacactgcaagtcctagtggctggcaacccccaggacacacgcctccgatacagcttcttcgtgccccggccgaccccttcaacgccacgccccactccccaggactggctgcaccgaagagcacagattctggagatccttcggcggcgcccctgggcgggcaggaaataacctcactatcccggctgccctttctgggcaccggggcctcggacttagctgggagaaagagagagcttctgttgctgcctcatgctaagactcagtggggaggggctgtgggcgtgagacctgcccctcctctctgccctaatgcgcaggctggccctgccctggtttcctgccctgggaggcagtgatgggttagtggatggaaggggctgacagacagccctccatctaaactgccccctctgccctgcgggtcacaggagggagggggaaggcagggagggcctgggccccagttgtatttatttagtatttattcacttttatttagcaccagggaaggggacaaggactagggtcctggggaacctgacccctgacccctcatagccctcaccctggggctaggaaatccagggtggtggtgataggtataagtggtgtgtgtatgcgtgtgtgtgtgtgtgaaaatgtgtgtgtgcttatgtatgaggtacaacctgttctgctttcctcttcctgaattttattttttgggaaaagaaaagtcaagggtagggtgggccttcagggagtgagggattatctttttttttttttctttctttctttcttttttttttttgagacagaatctcgctctgtcgcccaggctggagtgcaatggcacaatctcggctcactgcatcctccgcctcccgggttcaagtgattctcatgcctcagcctcctgagtagctgggattacaggctcctgccaccacgcccggctaatttttgttttgttttgtttggagacagagtctcgctattgtcaccagggctggaatgatttcagctcactgcaaccttcgccacctgggttccagcaattctcctgcctcagcctcccgagtagctgagattataggcacctaccaccacgcccggctaatttttgtatttttagtagagacggggtttcaccatgttggccaggctggtctcgaactcctgaccttaggtgatccactcgccttcatctcccaaagtgctgggattacaggcgtgagccaccgtgcctggccacgcccaactaatttttgtatttttagtagagacagggtttcaccatgttggccaggctgctcttgaactcctgacctcaggtaatcgacctgcctcggcctcccaaagtgctgggattacaggtgtgagccaccacgcccggtacatattttttaaattgaattctactatttatgtgatccttttggagtcagacagatgtggttgcatcctaactccatgtctctgagcattagatttctcatttgccaataataatacctcccttagaagtttgttgtgaggattaaataatgtaaataaagaactagcataacactc

SEQ ID NO: 858 - protein, 837 aa, Homo sapiens
MSQTGSHPGRGLAGRWLWGAQPCLLLPIVPLSWLVWLLLLLLASLLPSARLASPLPREEEIVFPEKLNGSVLPGSGAPARLLCRLQAFGETLLLELEQDSGVQVEGLTVQYLGQAPELLGGAEPGTYLTGTINGDPESVASLHWDGGALLGVLQYRGAELHLQPLEGGTPNSAGGPGAHILRRKSPASGQGPMCNVKAPLGSPSPRPRRAKRFASLSRFVETLVVADDKMAAFHGAGLKRYLLTVMAAAAKAFKHPSIRNPVSLVVTRLVILGSGEEGPQVGPSAAQTLRSFCAWQRGLNTPEDSDPDHFDTAILFTRQDLCGVSTCDTLGMADVGTVCDPARSCAIVEDDGLQSAFTAAHELGHVFNMLHDNSKPCISLNGPLSTSRHVMAPVMAHVDPEEPWSPCSARFITDFLDNGYGHCLLDKPEAPLHLPVTFPGKDYDADRQCQLTFGPDSRHCPQLPPPCAALWCSGHLNGHAMCQTKHSPWADGTPCGPAQACMGGRCLHMDQLQDFNIPQAGGWGPWGPWGDCSRTCGGGVQFSSRDCTRPVPRNGGKYCEGRRTRFRSCNTEDCPTGSALTFREEQCAAYNHRTDLFKSFPGPMDWVPRYTGVAPQDQCKLTCQAQALGYYYVLEPRVVDGTPCSPDSSSVCVQGRCIHAGCDRIIGSKKKFDKCMVCGGDGSGCSKQSGSFRKFRYGYNNVVTIPAGATHILVRQQGNPGHRSIYLALKLPDGSYALNGEYTLMPSPTDVVLPGAVSLRYSGATAASETLSGHGPLAQPLTLQVLVAGNPQDTRLRYSFFVPRPTPSTPRPTPQDWLHRRAQILEILRRRPWAGRK

SEQ ID NO: 859 - DNA, 5501 bp, Homo sapiens
cttgactcaatcctgcaagcaagtgtgtgtgtgtccccatcccccgccccgttaacttcatagcaaataacaaatacccataaagtcccagtcgcgcagcccctccccgcgggcagcgcactatgctgctcgggtgggcgtccctgctgctgtgcgcgttccgcctgcccctggccgcggtcggccccgccgcgacacctgcccaggataaagccgggcagcctccgactgctgcagcagccgcccagccccgccggcggcagggggaggaggtgcaggagcgagccgagcctcccggccacccgcaccccctggcgcagcggcgcaggagcaaggggctggtgcagaacatcgaccaactctactccggcggcggcaaggtgggctacctcgtctacgcgggcggccggaggttcctcttggacctggagcgagatggttcggtgggcattgctggcttcgtgcccgcaggaggcgggacgagtgcgccctggcgccaccggagccactgcttctatcggggcacagtggacggtagtccccgctctctggctgtctttgacctctgtgggggtctcgacggcttcttcgcggtcaagcacgcgcgctacaccctaaagccactgctgcgcggaccctgggcggaggaagaaaaggggcgcgtgtacggggatgggtccgcacggatcctgcacgtctacacccgcgagggcttcagcttcgaggccctgccgccgcgcgccagctgcgaaacccccgcgtccacaccggaggcccacgagcatgctccggcgcacagcaacccgagcggacgcgcagcactggcctcgcagctcttggaccagtccgctctctcgcccgctgggggctcaggaccgcagacgtggtggcggcggcggcgccgctccatctcccgggcccgccaggtggagctgcttctggtggctgacgcgtccatggcgcggttgtatggccggggcctgcagcattacctgctgaccctggcctccatcgccaataggctgtacagccatgctagcatcgagaaccacatccgcctggccgtggtgaaggtggtggtgctaggcgacaaggacaagagcctggaagtgagcaagaacgctgccaccacactcaagaacttttgcaagtggcagcaccaacacaaccagctgggagatgaccatgaggagcactacgatgcagctatcctgtttactcgggaggatttatgtgggcatcattcatgtgacaccctgggaatggcagacgttgggaccatatgttctccagagcgcagctgtgctgtgattgaagacgatggcctccacgcagccttcactgtggctcacgaaatcggacatttacttggcctctcccatgacgattccaaattctgtgaagagacctttggttccacagaagataagcgcttaatgtcttccatccttaccagcattgatgcatctaagccctggtccaaatgcacttcagccaccatcacagaattcctggatgatggccatggtaactgtttgctggacctaccacgaaagcagatcctgggccccgaagaactcccaggacagacctacgatgccacccagcagtgcaacctgacattcgggcctgagtactccgtgtgtcccggcatggatgtctgtgctcgcctgtggtgtgctgtggtacgccagggccagatggtctgtctgaccaagaagctgcctgcggtggaagggacgccttgtggaaaggggagaatctgcctgcagggcaaatgtgtggacaaaaccaagaaaaaatattattcaacgtcaagccatggcaactggggatcttggggatcctggggccagtgttctcgctcatgtggaggaggagtgcagtttgcctatcgtcactgtaataaccctgctcccagaaacaacggacgctactgcacagggaagagggccatctaccgctcctgcagtctcatgccctgcccacccaatggtaaatcatttcgtcatgaacagtgtgaggccaaaaatggctatcagtctgatgcaaaaggagtcaaaacttttgtggaatgggttcccaaatatgcaggtgtcctgccagcggatgtgtgcaagctgacctgcagagccaagggcactggctactatgtggtattttctccaaaggtgaccgatggcactgaatgtaggctgtacagtaattccgtctgcgtccgggggaagtgtgtgagaactggctgtgacggcatcattggctcaaagctgcagtatgacaagtgcggagtatgtggaggagacaactccagctgtacaaagattgttggaacctttaataagaaaagtaagggttacactgacgtggtgaggattcctgaaggggcaacccacataaaagttcgacagttcaaagccaaagaccagactagattcactgcctatttagccctgaaaaagaaaaacggtgagtaccttatcaatggaaagtacatgatctccacttcagagactatcattgacatcaatggaacagtcatgaactatagcggttggagccacagggatgacttcctgcatggcatgggctactctgccacgaaggaaattctaatagtgcagattcttgcaacagaccccactaaaccattagatgtccgttatagcttttttgttcccaagaagtccactccaaaagtaaactctgtcactagtcatggcagcaataaagtgggatcacacacttcgcagccgcagtgggtcacgggcccatggctcgcctgctctaggacctgtgacacaggttggcacaccagaacggtgcagtgccaggatggaaaccggaagttagcaaaaggatgtcctctctcccaaaggccttctgcgtttaagcaatgcttgttgaagaaatgttagcctgtggttatgatcttatgcacaaagataactggaggattcagcactgatgcagtcgtggtgaacaggaggtctacctaacgcacagaaagtcatgcttcagtgacattgtcaacaggagtccaattatgggcagaatctgctctctgtgaccaaaagaggatgtgcactgcttcacgtgacagtggtgaccttgcaatatagaaaaacttgggagttattgaacatcccctgggcttacaagaaacactgatgaatgtaaaatcaggggacatttgaagatggcagaactgtctcccccttgtcacctacctctgatagaatgtctttaatggtatcataatcattttcacccataatacacagtagcttcttcttactgtttgtaaatacattctcccttggtatgtcactttatatcccctggttctattaaaatatccatatatatttctataaaaaaagtgtttgaccaaagtaggtctgcagctatttcaacttccttccgtttccagaaagagctgtggatattttactggaaattaagaacttgctgctgttttaataagatgtagtatattttctgactacaggagataaaatttcagtcaaaaaaccattttgacagcaagtatcttctgagaaattttgaaaagtaaatagatctcagtgtatctagtcacttaaatacatacacgggttcatttacttaaacctttgactgcctgtatttttttcaggtagctagccaaattaatgcataatttcagatgtagaagtagggtttgcgtgtgtgtgtgtgatcatactcaagagtctaaaaactagtttccttgtgttggaaatttaaaaggaaaaaaatcgtatttcactgtgttttcaatttatattttcacaactactttctctctccagagctttcatctgatatctcacaatgtatgatatacgtacaaaacacacagcaagttttctatcatgtccaacacattcaacactggtatacctcctaccagcaagcctttaaaatgcatttgtgtttgcttatttgttttgttcaagggttcagtaagacctacaatgttttgtatttcttgacttattttattagaaacattaaagatcacttggtagttagccacattgagaagtggttatcattgttaatgtggttaatgccaaaaagtggttaatattaataagactgtttccacaccataggcaataatttcttaatttaaaaaatctaagtatattcctattgtactaaatatttttcccaactggaaagcacttgattgtacccgtaagtgtttgagtgatgacatgtgatgattttcagaaagttgttgtttttgtttccatagcctgtttaagtaggttgtaagtttgaatagttagacatggaaattattttataagcacacacctaaagatatctttttagatgataaaatgtacacccccccatcaccaacctcacaacttagaaaatctaagttgtttgatttctttgggatttcttttgttgtgaaacactgcaaagccaatttttctttataaaaattcatagtaatcctgccaaatgtgcctattgttaaagatttgcatgtgaagatcttagggaaccactgtttgagttctacaagctcatgagagtttatttttattataagatgtttttaatataaaagaattatgtaactgatcactatattacatcatttcagtgggccaggaaaatagatgtcttgctgttttcagtattttcttaagaaattgcttttaaaacaaataattgttttacaaaaccaataattatcctttgaattttcatagactgactttgcttttgacgtagaaattttttttctcaataaattatcactttgagaaatgaggcctgtacaaggctgataacctatatgtgatggagatcacccaatgccaagggcagaaagcaaacctagttaaataggtgagaaaaaaaataataatcccagtgccatttgtctgtgcaaagagaattaggagagaggttaatgttacttttttccattttggaaataattttaatcaagtaactcaaatgtgacaaaatttatttttattttttgtggttatattcccaacaacattaaaaaatactcgaggcataaatgtagttgtctcctactctgcttctcttactatactcatacatttttaatatggtttatcaatgattcatgtttccctcaaatagtgatggtttacacctgtcatggaaacaatcctagagagctcagagcaattaaaccactattccatgcttttaagtagttttctccacctttttcttatgagtctcactagattgactgaggaatgtatgtctaaattcctggagaagatgatatggattggaaactgaaattcagagaaatggagtgttcaatagataccacgaattgtgaacaaagggaaaattctatacaactcaatctaagtcagtccactttgacttcgtactgtctttcacctttccattgttgcatcttgaattttttaaaatgtctagaattcaggatgctaggggctacttct

SEQ ID NO: 860 - protein, 930 aa, Homo sapiens
MLLGWASLLLCAFRLPLAAVGPAATPAQDKAGQPPTAAAAAQPRRRQGEEVQERAEPPGHPHPLAQRRRSKGLVQNIDQLYSGGGKVGYLVYAGGRRFLLDLERDGSVGIAGFVPAGGGTSAPWRHRSHCFYRGTVDGSPRSLAVFDLCGGLDGFFAVKHARYTLKPLLRGPWAEEEKGRVYGDGSARILHVYTREGFSFEALPPRASCETPASTPEAHEHAPAHSNPSGRAALASQLLDQSALSPAGGSGPQTWWRRRRRSISRARQVELLLVADASMARLYGRGLQHYLLTLASIANRLYSHASIENHIRLAVVKVVVLGDKDKSLEVSKNAATTLKNFCKWQHQHNQLGDDHEEHYDAAILFTREDLCGHHSCDTLGMADVGTICSPERSCAVIEDDGLHAAFTVAHEIGHLLGLSHDDSKFCEETFGSTEDKRLMSSILTSIDASKPWSKCTSATITEFLDDGHGNCLLDLPRKQILGPEELPGQTYDATQQCNLTFGPEYSVCPGMDVCARLWCAVVRQGQMVCLTKKLPAVEGTPCGKGRICLQGKCVDKTKKKYYSTSSHGNWGSWGSWGQCSRSCGGGVQFAYRHCNNPAPRNNGRYCTGKRAIYRSCSLMPCPPNGKSFRHEQCEAKNGYQSDAKGVKTFVEWVPKYAGVLPADVCKLTCRAKGTGYYVVFSPKVTDGTECRLYSNSVCVRGKCVRTGCDGIIGSKLQYDKCGVCGGDNSSCTKIVGTFNKKSKGYTDVVRIPEGATHIKVRQFKAKDQTRFTAYLALKKKNGEYLINGKYMISTSETIIDINGTVMNYSGWSHRDDFLHGMGYSATKEILIVQILATDPTKPLDVRYSFFVPKKSTPKVNSVTSHGSNKVGSHTSQPQWVTGPWLACSRTCDTGWHTRTVQCQDGNRKLAKGCPLSQRPSAFKQCLLKKC

SEQ ID NO: 861 - DNA, 3415 bp, Homo sapiens
agagcgcagcggcgagcgtgactccgccatcaggtccccggctccctccccggacctagcccactccgctgcgccagcgccgcgggcaccccggggctcggggctggggagatcatggcccgcctcttcagcccccggccgccccccagcgaagacctcttctacgagacctactacagcctgagccagcagtacccgctgctgctgctgctgctggggatcgtgctctgtgcgctcgcggcgctgctcgcagtggcctgggccagcggcagggagctgacctcagacccgagcttcctgaccactgtgctgtgcgcgctgggcggcttctcgctgctgctgggcctcgcttcccgggagcagcgactgcagcgctggacgcgtcccctgtccggcttggtatgggtcgcgctgctagcgctaggccacgccttcctgttcaccgggggcgtggtgagcgcctgggaccaggtgtcctattttctcttcgtcatcttcacggcgtatgccatgctgcccttgggcatgcgggacgccgccgtcgcgggcctcgcctcctcactctcgcatctgctggtcctcgggctgtatcttgggccacagccggactcacggcctgcactgctgccgcagttggcagcaaacgcagtgctgttcctgtgcgggaacgtggcaggagtgtaccacaaggcgctgatggagcgcgccctgcgggccacgttccgggaggcactcagctccctgcactcacgccggcggctggacaccgagaagaagcaccaggaacaccttctcttgtccatccttcctgcctacctggcccgagagatgaaggcagagatcatggcacggctgcaggcaggacaggggtcacggccagagagcactaacaatttccacagcctctatgtcaagaggcaccagggagtcagcgtgctgtatgctgacatcgtgggcttcacgcggctggccagcgagtgttcccctaaggagctggtgctcatgctcaatgagctctttggcaagttcgaccagattgccaaggagcatgaatgcatgcggatcaagatcctgggggactgttactactgtgtctctgggctgccactctcactgccagaccatgccatcaactgcgtgcgcatgggcctggacatgtgccgggccatcaggaaactgcgggcagccactggcgtggacatcaacatgcgtgtgggcgtgcactcaggcagcgtactgtgtggagtcatcgggctgcagaagtggcagtacgacgtttggtcacatgatgtcacactggctaaccacatggaggcaggcggtgtaccagggcgagtgcacatcacaggggctaccctggccctgctggcaggggcttatgctgtggaggacgcaggcatggagcatcgggacccctaccttcgggagctaggggagcctacctatctggtcatcgatccacgggcagaggaggaggatgagaagggcactgcaggaggcttgctgtcctcgcttgagggcctcaagatgcgtccatcactgctgatgacccgttacctggagtcctggggcgcagccaagccttttgcccacctgagccacggagacagccctgtgtccacctccacccctctcccggagaagaccctggcttccttcagcacccagtggagcctggatcggagccgtaccccccggggactagatgatgaactggacaccggggatgccaagttcttccaggtcattgagcagctcaactcgcagaaacagtggaagcagtcgaaggacttcaacccactgacactgtacttcagagagaaggagatggagaaagagtaccgactctctgcaatccccgccttcaaatactatgaagcctgcaccttcctggtttttctctccaacttcatcatccagatgctagtgacaaacaggcccccagctctggccatcacgtatagcatcaccttcctcctcttcctcctcatcctttttgtctgcttctcagaggacctgatgaggtgtgtcctgaaaggccccaagatgctgcactggctgcctgcactgtctggcctggtggccacacgaccaggactgagaatagccttgggcaccgccaccatcctccttgtctttgccatggccattaccagcctgttcttcttcccaacatcatcagactgccctttccaagctcccaatgtgtcctccatgatttccaacctctcctgggagctccctgggtctctgcctctcatcagtgtcccatactccatgcactgctgcacgctgggcttcctctcctgctccctctttctgcacatgagcttcgagctgaagctgctgctgctcctgctgtggctggcggcatcctgctccctcttcctgcactcccatgcctggctgtcggaatgcctcatcgtccgcctctatctgggccccttggactccaggcccggagtgctgaaggagcccaaactgatgggtgctatctccttcttcatcttcttcttcaccctccttgtcctggctcgccagaatgagtactactgccgcctggacttcctgtggaagaagaagctgaggcaggagagggaggagacagagacgatggagaacctgactcggctgctcttggagaacgtgctccctgcacacgtggccccccagttcattggccagaaccggcgcaacgaggatctctaccaccagtcctatgaatgcgtttgtgtcctcttcgcctcagtcccagacttcaaggagttctactctgaatccaacatcaatcatgagggcctagagtgtctgaggctgctcaatgagataattgctgattttgatgagctgctctccaagcccaagttcagtggggtggagaagatcaagaccatcggcagcacctacatggcagccacaggcttaaatgccacctctggacaggatgcacaacaggatgctgaacggagctgcagccaccttggcactatggtggaatttgccgtggccctggggtctaagctggacgtcatcaacaagcattcattcaacaacttccgcctgcgagtggggttgaaccatggacccgtagtagctggagttattggggcccagaagccgcaatatgacatttggggcaacacagtgaacgtggccagccgcatggagagtacaggagtccttggcaaaatccaagtgactgaggagacagcatgggccctacagtccctgggctacacctgctacagccggggtgtcatcaaggtgaaaggcaaagggcagctctgcacctacttcctgaacacagacttgacacgaactggacctccttcagctaccctaggctgagattgcactcgccttctaagaacctcaataaagagactctggggtgtctggagcccattgatgtctg

SEQ ID NO: 862 - protein, 1077 aa, Homo sapiens
MARLFSPRPPPSEDLFYETYYSLSQQYPLLLLLLGIVLCALAALLAVAWASGRELTSDPSFLTTVLCALGGFSLLLGLASREQRLQRWTRPLSGLVWVALLALGHAFLFTGGVVSAWDQVSYFLFVIFTAYAMLPLGMRDAAVAGLASSLSHLLVLGLYLGPQPDSRPALLPQLAANAVLFLCGNVAGVYHKALMERALRATFREALSSLHSRRRLDTEKKHQEHLLLSILPAYLAREMKAEIMARLQAGQGSRPESTNNFHSLYVKRHQGVSVLYADIVGFTRLASECSPKELVLMLNELFGKFDQIAKEHECMRIKILGDCYYCVSGLPLSLPDHAINCVRMGLDMCRAIRKLRAATGVDINMRVGVHSGSVLCGVIGLQKWQYDVWSHDVTLANHMEAGGVPGRVHITGATLALLAGAYAVEDAGMEHRDPYLRELGEPTYLVIDPRAEEEDEKGTAGGLLSSLEGLKMRPSLLMTRYLESWGAAKPFAHLSHGDSPVSTSTPLPEKTLASFSTQWSLDRSRTPRGLDDELDTGDAKFFQVIEQLNSQKQWKQSKDFNPLTLYFREKEMEKEYRLSAIPAFKYYEACTFLVFLSNFIIQMLVTNRPPALAITYSITFLLFLLILFVCFSEDLMRCVLKGPKMLHWLPALSGLVATRPGLRIALGTATILLVFAMAITSLFFFPTSSDCPFQAPNVSSMISNLSWELPGSLPLISVPYSMHCCTLGFLSCSLFLHMSFELKLLLLLLWLAASCSLFLHSHAWLSECLIVRLYLGPLDSRPGVLKEPKLMGAISFFIFFFTLLVLARQNEYYCRLDFLWKKKLRQEREETETMENLTRLLLENVLPAHVAPQFIGQNRRNEDLYHQSYECVCVLFASVPDFKEFYSESNINHEGLECLRLLNEIIADFDELLSKPKFSGVEKIKTIGSTYMAATGLNATSGQDAQQDAERSCSHLGTMVEFAVALGSKLDVINKHSFNNFRLRVGLNHGPVVAGVIGAQKPQYDIWGNTVNVASRMESTGVLGKIQVTEETAWALQSLGYTCYSRGVIKVKGKGQLCTYFLNTDLTRTGPPSATLG

SEQ ID NO: 863 - DNA, 753 bp, Homo sapiens
atggaagagaagctgaagaaaaccaagatcatctttgtggtgggtgggcctggctcagggaagggcacccagtgtgagaagatcgtgcagaagtatggctacacccacctctccaccggggacctcctgcggtccgaggtcagctcaggctcggccaggggcaagaagctgtcggaaatcatggagaaggggcagctggttccactggagacagtgttggacatgctccgggatgccatggtggccaaagtcaatacttccaaaggcttcctgattgatggctacccgcgggaggtgcagcaaggagaagagtttgagcgacggattggacagcccacactgctgctgtatgtggacgcaggccctgagaccatgacccagcggctcttgaaacgtggagagaccagcgggcgtgtggacgacaatgaggagaccatcaaaaagcggctggagacctattacaaggccacagaacctgtcatcgccttctatgagaaacgtggcattgtgcgcaaggtcaacgctgagggctccgtggacagtgtcttctcccaggtctgcacccacctggacgccctaaagtagcaacgctggagccgcttccccagctcagagccccgccccaccccgtcctgattcgaggtcctcctggcctgagcgcagcgcctccaccctgccctgctgagcacagacggaggaagccgcttatcctgttttcatggacagctgagcactaaaggaatttctaaggac

SEQ ID NO: 864 - protein, 194 aa, Homo sapiens
MEEKLKKTKIIFVVGGPGSGKGTQCEKIVQKYGYTHLSTGDLLRSEVSSGSARGKKLSEIMEKGQLVPLETVLDMLRDAMVAKVNTSKGFLIDGYPREVQQGEEFERRIGQPTLLLYVDAGPETMTQRLLKRGETSGRVDDNEETIKKRLETYYKATEPVIAFYEKRGIVRKVNAEGSVDSVFSQVCTHLDALK

SEQ ID NO: 865 - DNA, 2101 bp, Homo sapiens
cgaccgagacggagccgctgtcaactctccaactcagctcagctgatcggttgccgccgccgccgccgccagattctggaggcgaagaacgcaaagctgagaacatggacgttaatatcgccccactccgcgcctgggacgatttcttcccgggttccgatcgctttgcccggccggacttcagggacatttccaaatggaacaaccgcgtagtgagcaacctgctctattaccagaccaactacctggtggtggctgccatgatgatttccattgtggggtttctgagtcccttcaacatgatcctgggaggaatcgtggtggtgctggtgttcacagggtttgtgtgggcagcccacaataaagacgtccttcgccggatgaagaagcgctaccccacgacgttcgttatggtggtcatgttggcgagctatttccttatctccatgtttggaggagtcatggtctttgtgtttggcattacttttcctttgctgttgatgtttatccatgcatcgttgagacttcggaacctcaagaacaaactggagaataaaatggaaggaataggtttgaagaggacaccgatgggcattgtcctggatgccctagaacagcaggaagaaggcatcaacagactcactgactatatcagcaaagtgaaggaataaacataacttacctgagctagggttgcagcagaaattgagttgcagcttgcccttgtccagacctatgttctgcttgcgtttttgaaacaggaggtgcacgtaccacccaattatctatggcagcatgcatgtataggccgaactattatcagctctgatgtttcagagagaagacctcagaaaccgaaagaaaaccaccaccctcctattgtgtctgaagtttcacgtgtgtttatgaaatctaatgggaaatggatcacacgatttctttaagggaattaaaaaaaataaaagaattacggcttttacagcaacaatacgattatcttataggaaaaaaaaaatcattgtaaagtatcaagacaatacgagtaaatgaaaaggctgttaaagtagatgacatcatgtgttagcctgttcctaatcccctagaattgtaatgtgtgggatataaattagtttttattattctcttaaaaatcaaagatgatctctatcactttgccacctgtttgatgtgcagtggaaactggttaagccagttgttcatacttcctttacaaatataaagatagctgtttaggatattttgttacatttttgtaaatttttgaaatgctagtaatgtgttttcaccagcaagtatttgttgcaaacttaatgtcattttccttaagatggttacagctatgtaacctgtattattctggacggacttattaaaatacaaacagacaaaaaataaaacaaaacttgagttctatttaccttgcacattttttgttgttacagtgaaaaaaatggtccaagaaaatgtttgccatttttgcattgtttcgtttttaactggaacatttagaaagaaggaaatgaatgtgcattttattaattccttaggggcacaaggaggacaataatagctgatcttttgaaatttgaaaaacgtctttagatgaccaagcaaaaagactttaaaaaatggtaatgaaaatggaatgcagctactgcagctaataaaaaattttagatagcaattgttacaaccatatgcctttatagctagacattagaattatgatagcatgagtttatacattctattatttttcctccctttctcatgtttttataaataggtaataaaaaatgttttgcctgccaattgaatgatttcgtagctgaagtagaaacatttaggtttctgtagcattaaattgtgaagacaactggagtggtacttactgaagaaactctctgtatgtcctagaataagaagcaatgatgtgctgcttctgatttttcttgcattttaaattctcagccaacctacagccatgatctttagcacagtgatatcaccatgacttcacagacatggtctagaatctgtacccttacccacatatgaagaataaaattgattaaaggtt

SEQ ID NO: 866 - protein, 188 aa, Homo sapiens
MDVNIAPLRAWDDFFPGSDRFARPDFRDISKWNNRVVSNLLYYQTNYLVVAAMMISIVGFLSPFNMILGGIVVVLVFTGFVWAAHNKDVLRRMKKRYPTTFVMVVMLASYFLISMFGGVMVFVFGITFPLLLMFIHASLRLRNLKNKLENKMEGIGLKRTPMGIVLDALEQQEEGINRLTDYISKVKE

SEQ ID NO: 867 - DNA, 12462 bp, Homo sapiens
gaagatggcggcggcggcggcggtgacggcgcttcccgtgcggctgaggacgatccgccagtgagcgcggagactgcttccacttcgggcgggggagcgccggaccgaatcggctctctaggccgtggagcttgccgtcccacctccgtccaaatcgacctttcctttctatccccaaccacccctcaacccctgttttcccctgccttccttgcagaggccatggaggacgaggagagacagaagaagctggaggccggcaaagccaagcttgcccagtttcgacaaagaaaagctcagtcggatgggcagagtccttccaagaagcagaaaaaaaagagaaaaacgtcaagcagtaaacatgatgtgtcagcacaccatgatttgaatattgatcaatcacagtgtaatgaaatgtacataaatagttctcagagagtagaatcaactgtgattcctgaatctacaataatgagaactctacatagtggagaaataaccagtcatgagcagggcttctctgtggaactggaaagtgaaatttcaaccacagcagatgactgcagttcagaggtaaatggttgcagttttgtgatgagaacaggaaagcctacaaatttattaagggaagaagaatttggtgttgatgattcttattctgaacaaggagcacaagacagtccgactcatctagagatgatggaaagtgagttggctgggaagcagcatgagattgaagagctaaacagagagctggaagaaatgagggttacctatgggactgaaggactgcagcagttacaagaatttgaagctgccattaaacaaagagatggcattataacccagctcactgctaatttacaacaagcaagaagagaaaaggatgagacaatgagagaatttttagagttgacagaacagagtcaaaaattacagattcaatttcagcaattacaggctagtgaaactctgagaaacagcactcatagtagcacagctgcagacttactacaagccaaacaacagatcctcactcatcaacagcagcttgaagaacaagaccacttattagaagattatcagaaaaagaaagaagacttcacaatgcaaattagtttcttgcaagagaaaattaaagtatatgaaatggaacaagataaaaaagtagaaaactcaaataaagaagaaatacaggaaaaggagacaatcattgaagaattaaacacaaaaataatagaagaagaaaagaaaactcttgagctaaaggataaattaacaactgctgataaattactaggagaattacaagaacagattgtgcaaaagaaccaagaaataaaaaacatgaaattagagctgactaattctaagcaaaaagaaagacagtcttctgaagaaataaaacagttaatggggacagtcgaagaacttcagaagagaaatcataaagacagccagttcgaaactgatatagtacaacgaatggaacaagaaacacaaagaaagttagaacaactccgggcagagctggatgagatgtatgggcagcagatagtgcaaatgaaacaagaattaataagacaacacatggcacagatggaggaaatgaaaacacggcataagggagaaatggagaatgctttaaggtcatattcaaatattacagttaatgaagatcagataaagttaatgaatgtggcaataaatgaactgaatataaaattgcaagatactaactctcaaaaggaaaaactcaaggaagaactaggactaattttagaagaaaagtgtgctctacagagacagcttgaagaccttgttgaagaattgagcttttcaagggaacagattcagagagctagacagacaatagctgaacaagaaagtaaacttaatgaagcacataagtcccttagtacagtggaagatttgaaagctgagattgtttctgcatctgaatccagaaaggaactagaattaaaacatgaagcagaagttacaaattacaagataaaacttgaaatgttagaaaaagaaaagaatgctgtgttagacagaatggctgaatcacaagaagctgaattagagaggctgagaacacagcttctatttagtcacgaagaagagctttccaaactgaaggaagatttagaaattgaacatcgaataaatattgaaaaacttaaagataatttaggcattcactataaacagcagatagatggtttacagaatgaaatgagtcaaaagatagaaaccatgcagtttgaaaaggacaatttgataactaagcagaatcaattaattttggaaatttcaaagctaaaagatttacagcagtctcttgtaaattcaaagtcagaagaaatgactcttcaaatcaatgaacttcaaaaagaaattgaaatactcagacaagaagaaaaagaaaagggtacacttgaacaagaagttcaagaattacaacttaaaacagaattgttagaaaaacagatgaaggaaaaagagaatgatcttcaagaaaaatttgcacaacttgaagcagagaatagcattcttaaagatgaaaagaaaacccttgaagacatgttgaaaatacatactcctgttagccaagaagaaagattgattttcttagactccattaagtccaaatccaaagactctgtgtgggaaaaagaaatagaaatacttatagaggaaaatgaggacctcaaacaacaatgtattcagctaaatgaagagattgaaaagcaaaggaacactttttcatttgctgaaaaaaactttgaagttaactatcaagagttacaagaggagtatgcttgccttctcaaagtaaaagatgatttagaagacagtaaaaataaacaggaattagagtataaaagtaaacttaaagcacttaatgaagagcttcatttgcaaagaataaatccaactacagtgaaaatgaaaagttctgtctttgatgaagacaaaacttttgtagcagaaacattggaaatgggtgaggttgttgaaaaggatacaacagaactcatggaaaaacttgaggtaaccaagcgagagaaattagagctgtcacagagactgtctgatctttctgaacaattgaaacagaaacatggtgagattagttttctaaatgaagaagttaaatctttaaagcaagagaaagaacaagtttcattgagatgtagagagctagaaatcattattaaccacaacagggcagaaaatgtacagtcatgtgatactcaagtaagctctttattagatggagttgtgaccatgacaagcaggggtgctgaaggatcagtttctaaagtaaataaaagttttggtgaagaatcaaaaataatggtggaagataaagtttcttttgaaaatatgactgttggagaagaaagtaagcaagaacagttgattttggatcacttaccatctgtaacaaaggaatcatcacttagagcaactcaaccaagtgaaaatgataaacttcagaaagaactcaatgtacttaaatcagaacagaatgatttaaggctacagatggaagcccaacgcatttgcctctctctggtttattcaactcatgtggatcaggttcgtgaatatatggaaaatgaaaaagataaagctctttgcagtcttaaagaagagcttatttttgctcaagaggaaaagatcaaggaacttcagaaaatacaccagttagaactacagactatgaaaacacaagaaacaggtgatgaaggaaagcctttacatctgctcattggaaaacttcaaaaggcagtgtctgaagaatgttcttattttttacagactttatgcagtgtccttggtgaatattatactcctgctttaaaatgtgaagtaaatgcagaagacaaagagaattctggtgattacatttctgaaaatgaagatccagaattacaagattatagatatgaagttcaagactttcaagaaaatatgcacactcttctcaacaaagtaacagaagaatacaacaaactcttggtacttcaaacacgactaagcaagatctggggacagcagacagatggtatgaaacttgaatttggagaagaaaaccttccaaaagaggaaacagagtttttatcaatccattctcagatgaccaatttggaagacattgatgtcaatcataaaagcaagttatcttctctgcaagatcttgaaaaaactaaacttgaagaacaagttcaagaattagaaagcctcatatcctctttgcagcaacagttgaaagaaactgaacaaaactatgaggcagagatccactgtttacagaagaggcttcaagctgttagtgagtccacggttccgccaagcttacctgttgattcggtggtaattacagaatctgatgcacagagaacaatgtaccctggaagttgtgtgaaaaagaatattgatggtacaatagagttttctggtgaatttggagtgaaagaggaaacaaatatcgttaagttgcttgaaaaacaataccaagaacaattagaagaagaagtagctaaggttattgtgtcaatgagtatagcatttgctcaacaaactgaactgtctagaatatctgggggaaaagaaaatactgcatcatcaaagcaagcacatgctgtgtgtcagcaagaacaacattattttaatgaaatgaaattatcacaggatcaaattggttttcagacttttgagacagtggatgtgaaatttaaagaagaatttaaaccacttagtaaagagttaggagaacatggaaaggaaattttattatcaaatagtgatccccatgatataccagaatcaaaggactgtgtgctgactatttcagaagaaatgttctccaaagataaaacatttatagttagacagtctattcatgatgagatttcagtgtcaagcatggatgcttctagacaactaatgttgaatgaagaacagttggaagatatgagacaggaacttgtacgacaataccaagaacatcaacaggcaacggaattgttaaggcaagcacatatgcggcaaatggagagacagcgagaagaccaggaacagctacaagaagagattaagagacttaatagacaattagcccagagatcctccatagataatgaaaacctggtttcagagagagagagggtgcttttagaggagctggaagcactaaagcagctgtctttagctggaagagagaagctgtgttgtgagctgcgcaacagcagtacgcaaacacagaatggaaatgaaaaccaaggagaagttgaagaacaaacatttaaagaaaaggaattagacagaaaacctgaagatgtgcctcctgagattttgtctaatgaaaggtatgcactccagaaagctaataatagacttttgaagatcctcttagaagttgtaaagacaacagcagctgttgaagaaacaattggtcgccatgtccttgggattctagatagatctagtaaaagccagtcatctgccagcctaatttggaggtcagaagcagaggcatctgtaaagtcatgtgtccatgaggaacatacaagagttacagatgaatccattccctcttattctggaagtgatatgccaagaaatgacattaacatgtggtcaaaagtaactgaggaaggaacagagctgtcacaacgacttgtgaggagtggttttgctggaactgaaatagaccctgaaaatgaagaacttatgctgaacattagctctcgactacaagcagcagttgaaaaactcctagaagccataagtgaaactagcagtcagcttgaacatgcgaaagtgacacagacagagttgatgcgtgagtcatttagacagaaacaagaagcaacagagtcccttaagtgccaagaggaacttcgagagcgccttcatgaggagtccagggccagagaacagctagctgtggagctcagtaaggctgagggcgtcattgatggctatgcagatgaaaaaactctttttgaaaggcaaattcaggaaaaaactgatataatagatcgtcttgagcaggagttgttatgtgcaagtaacaggttgcaagaattggaggcagagcaacagcagatccaagaagaaagagaattactgtccagacaaaaggaagctatgaaagcagaggcaggcccagttgaacaacaattactacaggagacagaaaaattaatgaaggaaaaactagaagtacaatgtcaagctgaaaaagtacgtgatgaccttcaaaaacaagtgaaagctctagaaatagatgtggaagaacaagtcagtaggtttatagagctggaacaagaaaaaaatactgaactaatggatttaagacagcaaaaccaagcattggaaaagcagttagaaaaaatgagaaaatttttagatgagcaagccattgacagagaacatgagagagatgtattccaacaggaaatacagaaactagaacagcaacttaaggttgttcctcgattccagcctatcagtgaacatcaaactagagaggttgaacagttagcaaatcatctgaaagaaaaaacagacaaatgcagtgagcttttgctctctaaagagcagcttcaaagggatatacaagaaaggaatgaagaaatagagaaactggagttcagagtaagagaactggagcaggcgcttcttgtgagtgcagatacttttcaaaaggtagaggaccgaaaacactttggagctgtagaagctaaaccagaattgtccctagaagtacaattgcaggctgaacgagatgccatagacagaaaggaaaaagagattacaaacttagaagagcaattagaacagtttagagaagaactggaaaataagaatgaagaagttcaacaattacatatgcaattagaaatacagaaaaaggaatctactacccgcctacaagaacttgaacaggaaaacaaattatttaaggatgacatggagaaactgggacttgccataaaggaatctgatgccatgtctactcaagaccaacatgtgctatttgggaaatttgctcaaataatacaggaaaaagaggtagaaattgaccaattaaatgaacaagttacgaaactccagcagcaacttaaaattacaacagataacaaggttattgaagaaaaaaatgaactgataagggatcttgaaacccaaatagaatgtttgatgagtgatcaagaatgtgtgaagagaaatagagaagaagaaatagagcagctcaatgaagtgattgaaaaacttcaacaggaattggcaaatattggacagaagacatcaatgaatgctcattccctctcagaagaagcagacagtttaaaacatcaattggatgtggttatagctgaaaagctggccttggaacagcaagtagaaaccgctaatgaagaaatgaccttcatgaaaaatgtacttaaagaaaccaattttaaaatgaatcagctaacacaggaattattcagcttaaagagagaacgtgaaagtgtggaaaagattcaaagcataccagagaatagtgttaacgtggctatagatcatctgagcaaagacaaacctgaactagaagtagtccttacagaggatgctcttaaatccctagaaaatcagacatacttcaaatcttttgaagaaaatggcaaaggttccataattaatttggaaacaaggttgctacaacttgagagcactgttagtgcaaaggacttagaacttacccagtgttataaacaaataaaagacatgcaagaacaaggccagtttgaaacagaaatgcttcaaaagaagattgtaaacctacagaaaatagttgaagaaaaagtggctgctgctcttgtcagtcaaatccaacttgaggcagttcaggaatatgcaaaattctgtcaagataatcaaacaatttcatcagaacctgaaagaacaaatattcagaatttaaatcaactaagagaagatgagttggggtcagatatatcagcattaaccttgagaatatcagaattagaaagccaggttgttgaaatgcatactagtttgattttagaaaaagaacaagtagaaattgcagaaaaaaatgttttagaaaaagaaaagaagctgctagaactacagaagctattggagggcaatgagaaaaaacagagagagaaagaaaagaaaagaagccctcaagatgttgaagttctcaagacaactactgagctatttcatagcaatgaagaaagtggattttttaatgaactcgaggctcttagagctgaatcagtggctaccaaagcagaacttgccagttataaagaaaaggctgaaaaacttcaagaagagcttttggtaaaagaaacaaatatgacatctcttcagaaagacttaagccaagttagggatcacctcgcagaggcaaaagagaaattgtccattttagaaaaagaagatgagactgaggtacaagaaagcaaaaaggcctgcatgtttgagccacttcctataaaactgagtaagagcattgcatcccagacagatgggactctgaagatcagtagcagcaatcagactccacaaattcttgttaaaaatgcaggaatacaaattaatttacagagtgaatgttcctcagaagaagttactgaaataatcagtcagtttactgaaaaaattgagaagatgcaagaactacatgctgctgaaattttggacatggaatccagacatatttcagaaactgaaaccttaaagagggaacactatgttgccgttcagttactgaaagaggaatgtggtaccttgaaggcagtgatacagtgtctgagaagtaaagagggatcctcaattcctgagctagcacattctgatgcttaccagactagagaaatatgctccagtgattctggatcagactggggtcagggaatttatcttacacacagtcagggatttgacatagcatcagaaggccgaggagaagaaagtgaaagtgcaacagattcctttccaaagaaaataaagggattactgagagctgtccataatgaaggcatgcaggtgctttctctcactgagtctccctatagtgatggagaggaccattctattcagcaggtttcagaaccttggctagaagagagaaaagcttacatcaatacaatctcatctctaaaggatttaattacaaagatgcaactgcaaagagaagccgaggtttatgatagttctcaatctcatgagagcttctcagactggcgaggtgaactactgcttgcccttcaacaagttttcttagaagagcgtagtgttttactagcagcatttcggacggagctgacagctctaggtactacagatgcagttggtttactaaactgtttggaacagagaatacaagaacagggtgttgaatatcaagcagctatggaatgcctccagaaagcagatagaaggagtttgttatctgaaattcaggcactgcatgcacaaatgaatggtaggaaaattactctgaaaagagaacaagagagtgagaaaccaagccaagaactcttggaatataatatacagcagaagcagtctcaaatgctggagatgcaagtggagctcagcagtatgaaagacagagcaacggaactgcaggagcagctgagttctgagaaaatggtggttgctgaactgaagagtgagcttgcacaaactaaattggaactagaaacaacactcaaggcacagcataaacacctaaaagaattggaggctttcaggttggaagttaaagataagacagatgaagtacatttgcttaatgacacattagcaagtgaacagaaaaaatcaagagagctccagtgggctttggagaaagagaaagccaagttgggacgcagtgaagaacgggataaagaagaacttgaggatctgaagttttcacttgagagtcagaaacaaaggaatcttcagctaaatctacttttggaacaacagaaacaactactgaacgaatcccagcaaaaaatagaatcacagagaatgctatatgatgcccagttgtcagaagaacaaggtcgaaacttagagcttcaggtacttcttgaatctgagaaagttcgaattcgggaaatgagtagtaccctagatagggagcgggaattgcacgcacagctgcagagcagtgatggtactggacagtctcggccacccttgccctcagaggacctactgaaagagctgcagaaacagctagaggaaaaacacagtcgcatagtagaattgttaaatgagactgaaaaatataaactggattctttgcaaacacgacagcaaatggaaaaagataggcaggttcacaggaaaacactgcagacagaacaggaggccaacactgagggacagaaaaaaatgcatgagctccagtccaaagtggaagatcttcagcgccagctggaagagaaaagacaacaagtttataagttagaccttgaaggacagcgactacaaggaatcatgcaggaattccagaagcaagaactagaacgagaagaaaaacgagaaagtagaagaattctgtatcagaaccttaatgagccaaccacgtggagcttaaccagtgatagaactagaaattgggttcttcaacagaaaatagaaggagaaacaaaagaatcaaactacgctaaattgattgaaatgaatggaggaggaaccggctgtaatcatgaattagaaatgatcagacaaaagcttcaatgtgtagcttcaaaactacaggttctaccccagaaagcctctgagagactacagtttgaaacagcagatgatgaagatttcatttgggttcaggaaaatattgatgaaattattttacaactacagaaattaactggccagcaaggtgaagagcccagcttggtgtccccaagtacttcttgtggctcattgactgaaagactactgagacaaaatgctgagctgacagggcatatcagtcaactgactgaagagaagaatgacttaaggaacatggttatgaagctggaagagcagatcaggtggtatcgacagacaggagctggtagagataattcttccaggttttcattgaatggtggtgccaacattgaagccatcattgcctctgaaaaagaagtatggaacagagaaaaattgactctccagaaatctttgaaaagggcagaggctgaagtatacaaactgaaagctgaactaagaaatgactctttacttcaaactctgagccctgattctgaacatgtcactttaaagagaatttatggtaaatacttgagggcagaaagttttcgaaaggctctcatttaccagaagaaatacctgctgctgttactgggtgggttccaggaatgtgaagatgccaccttggccctgcttgcccggatgggggggcagccagctttcacggatctagaggtgatcaccaatcgcccaaagggcttcaccaggtttcggtcggccgtcagagtatccattgcaatttccagaatgaaatttttggttcgacggtggcatcgagtcacaggttctgtttccatcaatattaacagagatggctttggactgaatcaaggtgcagaaaagactgactcattttatcattcttctggtgggctggagttatatggagaaccaagacatactacgtatcgctcaagatcagatctggactatattaggtcccctttaccatttcagaataggtacccaggcactccagctgatttcaatcctggttctttagcatgttctcagcttcagaattacgatcctgacagagccctaacagattatatcactcggctagaggcactgcaaagacgacttggaactatacagtcaggttcaactactcaatttcatgctggcatgagaagataatcctttgaaacatcattaattgaagtgattttaaatagatttccttttgtaaatcaatggttcttttgtgcttttgtattgtgaatattcaatgggaccaatatgaacacagcttatgattgtatacaaatcccttgccagcacatgaaaacaaactggaatttgtatatataagcattgtgtatgtattcatgcacaataattattgaattacctgtatatttgtggaatgctaatttaaaacattaaattataaaccttgtgtatttatcaaatgggtgaaaagattaaacttttacgcattacaatactgctgaatgtgtagctcgaggtgtcctgcacttttcttataaggctactgaagttacatgttttgcctaatatattctactggtgatgaagacagataatatcacttgtagagacctatttttgtataatggtagaagttttgaattttatggggtattttgtcaagtactgaaataaaaatgacttcaccattttcaccacact

SEQ ID NO: 868 - protein, 3907 aa, Homo sapiens
MEDEERQKKLEAGKAKLAQFRQRKAQSDGQSPSKKQKKKRKTSSSKHDVSAHHDLNIDQSQCNEMYINSSQRVESTVIPESTIMRTLHSGEITSHEQGFSVELESEISTTADDCSSEVNGCSFVMRTGKPTNLLREEEFGVDDSYSEQGAQDSPTHLEMMESELAGKQHEIEELNRELEEMRVTYGTEGLQQLQEFEAAIKQRDGIITQLTANLQQARREKDETMREFLELTEQSQKLQIQFQQLQASETLRNSTHSSTAADLLQAKQQILTHQQQLEEQDHLLEDYQKKKEDFTMQISFLQEKIKVYEMEQDKKVENSNKEEIQEKETIIEELNTKIIEEEKKTLELKDKLTTADKLLGELQEQIVQKNQEIKNMKLELTNSKQKERQSSEEIKQLMGTVEELQKRNHKDSQFETDIVQRMEQETQRKLEQLRAELDEMYGQQIVQMKQELIRQHMAQMEEMKTRHKGEMENALRSYSNITVNEDQIKLMNVAINELNIKLQDTNSQKEKLKEELGLILEEKCALQRQLEDLVEELSFSREQIQRARQTIAEQESKLNEAHKSLSTVEDLKAEIVSASESRKELELKHEAEVTNYKIKLEMLEKEKNAVLDRMAESQEAELERLRTQLLFSHEEELSKLKEDLEIEHRINIEKLKDNLGIHYKQQIDGLQNEMSQKIETMQFEKDNLITKQNQLILEISKLKDLQQSLVNSKSEEMTLQINELQKEIEILRQEEKEKGTLEQEVQELQLKTELLEKQMKEKENDLQEKFAQLEAENSILKDEKKTLEDMLKIHTPVSQEERLIFLDSIKSKSKDSVWEKEIEILIEENEDLKQQCIQLNEEIEKQRNTFSFAEKNFEVNYQELQEEYACLLKVKDDLEDSKNKQELEYKSKLKALNEELHLQRINPTTVKMKSSVFDEDKTFVAETLEMGEVVEKDTTELMEKLEVTKREKLELSQRLSDLSEQLKQKHGEISFLNEEVKSLKQEKEQVSLRCRELEIIINHNRAENVQSCDTQVSSLLDGVVTMTSRGAEGSVSKVNKSFGEESKIMVEDKVSFENMTVGEESKQEQLILDHLPSVTKESSLRATQPSENDKLQKELNVLKSEQNDLRLQMEAQRICLSLVYSTHVDQVREYMENEKDKALCSLKEELIFAQEEKIKELQKIHQLELQTMKTQETGDEGKPLHLLIGKLQKAVSEECSYFLQTLCSVLGEYYTPALKCEVNAEDKENSGDYISENEDPELQDYRYEVQDFQENMHTLLNKVTEEYNKLLVLQTRLSKIWGQQTDGMKLEFGEENLPKEETEFLSIHSQMTNLEDIDVNHKSKLSSLQDLEKTKLEEQVQELESLISSLQQQLKETEQNYEAEIHCLQKRLQAVSESTVPPSLPVDSVVITESDAQRTMYPGSCVKKNIDGTIEFSGEFGVKEETNIVKLLEKQYQEQLEEEVAKVIVSMSIAFAQQTELSRISGGKENTASSKQAHAVCQQEQHYFNEMKLSQDQIGFQTFETVDVKFKEEFKPLSKELGEHGKEILLSNSDPHDIPESKDCVLTISEEMFSKDKTFIVRQSIHDEISVSSMDASRQLMLNEEQLEDMRQELVRQYQEHQQATELLRQAHMRQMERQREDQEQLQEEIKRLNRQLAQRSSIDNENLVSERERVLLEELEALKQLSLAGREKLCCELRNSSTQTQNGNENQGEVEEQTFKEKELDRKPEDVPPEILSNERYALQKANNRLLKILLEVVKTTAAVEETIGRHVLGILDRSSKSQSSASLIWRSEAEASVKSCVHEEHTRVTDESIPSYSGSDMPRNDINMWSKVTEEGTELSQRLVRSGFAGTEIDPENEELMLNISSRLQAAVEKLLEAISETSSQLEHAKVTQTELMRESFRQKQEATESLKCQEELRERLHEESRAREQLAVELSKAEGVIDGYADEKTLFERQIQEKTDIIDRLEQELLCASNRLQELEAEQQQIQEERELLSRQKEAMKAEAGPVEQQLLQETEKLMKEKLEVQCQAEKVRDDLQKQVKALEIDVEEQVSRFIELEQEKNTELMDLRQQNQALEKQLEKMRKFLDEQAIDREHERDVFQQEIQKLEQQLKVVPRFQPISEHQTREVEQLANHLKEKTDKCSELLLSKEQLQRDIQERNEEIEKLEFRVRELEQALLVSADTFQKVEDRKHFGAVEAKPELSLEVQLQAERDAIDRKEKEITNLEEQLEQFREELENKNEEVQQLHMQLEIQKKESTTRLQELEQENKLFKDDMEKLGLAIKESDAMSTQDQHVLFGKFAQIIQEKEVEIDQLNEQVTKLQQQLKITTDNKVIEEKNELIRDLETQIECLMSDQECVKRNREEEIEQLNEVIEKLQQELANIGQKTSMNAHSLSEEADSLKHQLDVVIAEKLALEQQVETANEEMTFMKNVLKETNFKMNQLTQELFSLKRERESVEKIQSIPENSVNVAIDHLSKDKPELEVVLTEDALKSLENQTYFKSFEENGKGSIINLETRLLQLESTVSAKDLELTQCYKQIKDMQEQGQFETEMLQKKIVNLQKIVEEKVAAALVSQIQLEAVQEYAKFCQDNQTISSEPERTNIQNLNQLREDELGSDISALTLRISELESQVVEMHTSLILEKEQVEIAEKNVLEKEKKLLELQKLLEGNEKKQREKEKKRSPQDVEVLKTTTELFHSNEESGFFNELEALRAESVATKAELASYKEKAEKLQEELLVKETNMTSLQKDLSQVRDHLAEAKEKLSILEKEDETEVQESKKACMFEPLPIKLSKSIASQTDGTLKISSSNQTPQILVKNAGIQINLQSECSSEEVTEIISQFTEKIEKMQELHAAEILDMESRHISETETLKREHYVAVQLLKEECGTLKAVIQCLRSKEGSSIPELAHSDAYQTREICSSDSGSDWGQGIYLTHSQGFDIASEGRGEESESATDSFPKKIKGLLRAVHNEGMQVLSLTESPYSDGEDHSIQQVSEPWLEERKAYINTISSLKDLITKMQLQREAEVYDSSQSHESFSDWRGELLLALQQVFLEERSVLLAAFRTELTALGTTDAVGLLNCLEQRIQEQGVEYQAAMECLQKADRRSLLSEIQALHAQMNGRKITLKREQESEKPSQELLEYNIQQKQSQMLEMQVELSSMKDRATELQEQLSSEKMVVAELKSELAQTKLELETTLKAQHKHLKELEAFRLEVKDKTDEVHLLNDTLASEQKKSRELQWALEKEKAKLGRSEERDKEELEDLKFSLESQKQRNLQLNLLLEQQKQLLNESQQKIESQRMLYDAQLSEEQGRNLELQVLLESEKVRIREMSSTLDRERELHAQLQSSDGTGQSRPPLPSEDLLKELQKQLEEKHSRIVELLNETEKYKLDSLQTRQQMEKDRQVHRKTLQTEQEANTEGQKKMHELQSKVEDLQRQLEEKRQQVYKLDLEGQRLQGIMQEFQKQELEREEKRESRRILYQNLNEPTTWSLTSDRTRNWVLQQKIEGETKESNYAKLIEMNGGGTGCNHELEMIRQKLQCVASKLQVLPQKASERLQFETADDEDFIWVQENIDEIILQLQKLTGQQGEEPSLVSPSTSCGSLTERLLRQNAELTGHISQLTEEKNDLRNMVMKLEEQIRWYRQTGAGRDNSSRFSLNGGANIEAIIASEKEVWNREKLTLQKSLKRAEAEVYKLKAELRNDSLLQTLSPDSEHVTLKRIYGKYLRAESFRKALIYQKKYLLLLLGGFQECEDATLALLARMGGQPAFTDLEVITNRPKGFTRFRSAVRVSIAISRMKFLVRRWHRVTGSVSININRDGFGLNQGAEKTDSFYHSSGGLELYGEPRHTTYRSRSDLDYIRSPLPFQNRYPGTPADFNPGSLACSQLQNYDPDRALTDYITRLEALQRRLGTIQSGSTTQFHAGMRR

SEQ ID NO: 869 - DNA, 12063 bp, Homo sapiens
cagattgaagaactctctttagcttttcttgtcagacagcttgcccagtttcgacaaagaaaagctcagtcggatgggcagagtccttccaagaagcagaaaaaaaagagaaaaacgtcaagcagtaaacatgatgtgtcagcacaccatgatttgaatattgatcaatcacagtgtaatgaaatgtacataaatagttctcagagagtagaatcaactgtgattcctgaatctacaataatgagaactctacatagtggagaaataaccagtcatgagcagggcttctctgtggaactggaaagtgaaatttcaaccacagcagatgactgcagttcagaggtaaatggttgcagttttgtgatgagaacaggaaagcctacaaatttattaagggaagaagaatttggtgttgatgattcttattctgaacaaggagcacaagacagtccgactcatctagagatgatggaaagtgagttggctgggaagcagcatgagattgaagagctaaacagagagctggaagaaatgagggttacctatgggactgaaggactgcagcagttacaagaatttgaagctgccattaaacaaagagatggcattataacccagctcactgctaatttacaacaagcaagaagagaaaaggatgagacaatgagagaatttttagagttgacagaacagagtcaaaaattacagattcaatttcagcaattacaggctagtgaaactctgagaaacagcactcatagtagcacagctgcagacttactacaagccaaacaacagatcctcactcatcaacagcagcttgaagaacaagaccacttattagaagattatcagaaaaagaaagaagacttcacaatgcaaattagtttcttgcaagagaaaattaaagtatatgaaatggaacaagataaaaaagtagaaaactcaaataaagaagaaatacaggaaaaggagacaatcattgaagaattaaacacaaaaataatagaagaagaaaagaaaactcttgagctaaaggataaattaacaactgctgataaattactaggagaattacaagaacagattgtgcaaaagaaccaagaaataaaaaacatgaaattagagctgactaattctaagcaaaaagaaagacagtcttctgaagaaataaaacagttaatggggacagtcgaagaacttcagaagagaaatcataaagacagccagttcgaaactgatatagtacaacgaatggaacaagaaacacaaagaaagttagaacaactccgggcagagctggatgagatgtatgggcagcagatagtgcaaatgaaacaagaattaataagacaacacatggcacagatggaggaaatgaaaacacggcataagggagaaatggagaatgctttaaggtcatattcaaatattacagttaatgaagatcagataaagttaatgaatgtggcaataaatgaactgaatataaaattgcaagatactaactctcaaaaggaaaaactcaaggaagaactaggactaattttagaagaaaagtgtgctctacagagacagcttgaagaccttgttgaagaattgagcttttcaagggaacagattcagagagctagacagacaatagctgaacaagaaagtaaacttaatgaagcacataagtcccttagtacagtggaagatttgaaagctgagattgtttctgcatctgaatccagaaaggaactagaattaaaacatgaagcagaagttacaaattacaagataaaacttgaaatgttagaaaaagaaaagaatgctgtgttagacagaatggctgaatcacaagaagctgaattagagaggctgagaacacagcttctatttagtcacgaagaagagctttccaaactgaaggaagatttagaaattgaacatcgaataaatattgaaaaacttaaagataatttaggcattcactataaacagcagatagatggtttacagaatgaaatgagtcaaaagatagaaaccatgcagtttgaaaaggacaatttgataactaagcagaatcaattaattttggaaatttcaaagctaaaagatttacagcagtctcttgtaaattcaaagtcagaagaaatgactcttcaaatcaatgaacttcaaaaagaaattgaaatactcagacaagaagaaaaagaaaagggtacacttgaacaagaagttcaagaattacaacttaaaacagaattgttagaaaaacagatgaaggaaaaagagaatgatcttcaagaaaaatttgcacaacttgaagcagagaatagcattcttaaagatgaaaagaaaacccttgaagacatgttgaaaatacatactcctgttagccaagaagaaagattgattttcttagactccattaagtccaaatccaaagactctgtgtgggaaaaagaaatagaaatacttatagaggaaaatgaggacctcaaacaacaatgtattcagctaaatgaagagattgaaaagcaaaggaacactttttcatttgctgaaaaaaactttgaagttaactatcaagagttacaagaggagtatgcttgccttctcaaagtaaaagatgatttagaagacagtaaaaataaacaggaattagagtataaaagtaaacttaaagcacttaatgaagagcttcatttgcaaagaataaatccaactacagtgaaaatgaaaagttctgtctttgatgaagacaaaacttttgtagcagaaacattggaaatgggtgaggttgttgaaaaggatacaacagaactcatggaaaaacttgaggtaaccaagcgagagaaattagagctgtcacagagactgtctgatctttctgaacaattgaaacagaaacatggtgagattagttttctaaatgaagaagttaaatctttaaagcaagagaaagaacaagtttcattgagatgtagagagctagaaatcattattaaccacaacagggcagaaaatgtacagtcatgtgatactcaagtaagctctttattagatggagttgtgaccatgacaagcaggggtgctgaaggatcagtttctaaagtaaataaaagttttggtgaagaatcaaaaataatggtggaagataaagtttcttttgaaaatatgactgttggagaagaaagtaagcaagaacagttgattttggatcacttaccatctgtaacaaaggaatcatcacttagagcaactcaaccaagtgaaaatgataaacttcagaaagaactcaatgtacttaaatcagaacagaatgatttaaggctacagatggaagcccaacgcatttgcctctctctggtttattcaactcatgtggatcaggttcgtgaatatatggaaaatgaaaaagataaagctctttgcagtcttaaagaagagcttatttttgctcaagaggaaaagatcaaggaacttcagaaaatacaccagttagaactacagactatgaaaacacaagaaacaggtgatgaaggaaagcctttacatctgctcattggaaaacttcaaaaggcagtgtctgaagaatgttcttattttttacagactttatgcagtgtccttggtgaatattatactcctgctttaaaatgtgaagtaaatgcagaagacaaagagaattctggtgattacatttctgaaaatgaagatccagaattacaagattatagatatgaagttcaagactttcaagaaaatatgcacactcttctcaacaaagtaacagaagaatacaacaaactcttggtacttcaaacacgactaagcaagatctggggacagcagacagatggtatgaaacttgaatttggagaagaaaaccttccaaaagaggaaacagagtttttatcaatccattctcagatgaccaatttggaagacattgatgtcaatcataaaagcaagttatcttctctgcaagatcttgaaaaaactaaacttgaagaacaagttcaagaattagaaagcctcatatcctctttgcagcaacagttgaaagaaactgaacaaaactatgaggcagagatccactgtttacagaagaggcttcaagctgttagtgagtccacggttccgccaagcttacctgttgattcggtggtaattacagaatctgatgcacagagaacaatgtaccctggaagttgtgtgaaaaagaatattgatggtacaatagagttttctggtgaatttggagtgaaagaggaaacaaatatcgttaagttgcttgaaaaacaataccaagaacaattagaagaagaagtagctaaggttattgtgtcaatgagtatagcatttgctcaacaaactgaactgtctagaatatctgggggaaaagaaaatactgcatcatcaaagcaagcacatgctgtgtgtcagcaagaacaacattattttaatgaaatgaaattatcacaggatcaaattggttttcagacttttgagacagtggatgtgaaatttaaagaagaatttaaaccacttagtaaagagttaggagaacatggaaaggaaattttattatcaaatagtgatccccatgatataccagaatcaaaggactgtgtgctgactatttcagaagaaatgttctccaaagataaaacatttatagttagacagtctattcatgatgagatttcagtgtcaagcatggatgcttctagacaactaatgttgaatgaagaacagttggaagatatgagacaggaacttgtacgacaataccaagaacatcaacaggcaacggaattgttaaggcaagcacatatgcggcaaatggagagacagcgagaagaccaggaacagctacaagaagagattaagagacttaatagacaattagcccagagatcctccatagataatgaaaacctggtttcagagagagagagggtgcttttagaggagctggaagcactaaagcagctgtctttagctggaagagagaagctgtgttgtgagctgcgcaacagcagtacgcaaacacagaatggaaatgaaaaccaaggagaagttgaagaacaaacatttaaagaaaaggaattagacagaaaacctgaagatgtgcctcctgagattttgtctaatgaaaggtatgcactccagaaagctaataatagacttttgaagatcctcttagaagttgtaaagacaacagcagctgttgaagaaacaattggtcgccatgtccttgggattctagatagatctagtaaaagccagtcatctgccagcctaatttggaggtcagaagcagaggcatctgtaaagtcatgtgtccatgaggaacatacaagagttacagatgaatccattccctcttattctggaagtgatatgccaagaaatgacattaacatgtggtcaaaagtaactgaggaaggaacagagctgtcacaacgacttgtgaggagtggttttgctggaactgaaatagaccctgaaaatgaagaacttatgctgaacattagctctcgactacaagcagcagttgaaaaactcctagaagccataagtgaaactagcagtcagcttgaacatgcgaaagtgacacagacagagttgatgcgtgagtcatttagacagaaacaagaagcaacagagtcccttaagtgccaagaggaacttcgagagcgccttcatgaggagtccagggccagagaacagctagctgtggagctcagtaaggctgagggcgtcattgatggctatgcagatgaaaaaactctttttgaaaggcaaattcaggaaaaaactgatataatagatcgtcttgagcaggagttgttatgtgcaagtaacaggttgcaagaattggaggcagagcaacagcagatccaagaagaaagagaattactgtccagacaaaaggaagctatgaaagcagaggcaggcccagttgaacaacaattactacaggagacagaaaaattaatgaaggaaaaactagaagtacaatgtcaagctgaaaaagtacgtgatgaccttcaaaaacaagtgaaagctctagaaatagatgtggaagaacaagtcagtaggtttatagagctggaacaagaaaaaaatactgaactaatggatttaagacagcaaaaccaagcattggaaaagcagttagaaaaaatgagaaaatttttagatgagcaagccattgacagagaacatgagagagatgtattccaacaggaaatacagaaactagaacagcaacttaaggttgttcctcgattccagcctatcagtgaacatcaaactagagaggttgaacagttagcaaatcatctgaaagaaaaaacagacaaatgcagtgagcttttgctctctaaagagcagcttcaaagggatatacaagaaaggaatgaagaaatagagaaactggagttcagagtaagagaactggagcaggcgcttcttgtagaggaccgaaaacactttggagctgtagaagctaaaccagaattgtccctagaagtacaattgcaggctgaacgagatgccatagacagaaaggaaaaagagattacaaacttagaagagcaattagaacagtttagagaagaactggaaaataagaatgaagaagttcaacaattacatatgcaattagaaatacagaaaaaggaatctactacccgcctacaagaacttgaacaggaaaacaaattatttaaggatgacatggagaaactgggacttgccataaaggaatctgatgccatgtctactcaagaccaacatgtgctatttgggaaatttgctcaaataatacaggaaaaagaggtagaaattgaccaattaaatgaacaagttacgaaactccagcagcaacttaaaattacaacagataacaaggttattgaagaaaaaaatgaactgataagggatcttgaaacccaaatagaatgtttgatgagtgatcaagaatgtgtgaagagaaatagagaagaagaaatagagcagctcaatgaagtgattgaaaaacttcaacaggaattggcaaatattggacagaagacatcaatgaatgctcattccctctcagaagaagcagacagtttaaaacatcaattggatgtggttatagctgaaaagctggccttggaacagcaagtagaaaccgctaatgaagaaatgaccttcatgaaaaatgtacttaaagaaaccaattttaaaatgaatcagctaacacaggaattattcagcttaaagagagaacgtgaaagtgtggaaaagattcaaagcataccagagaatagtgttaacgtggctatagatcatctgagcaaagacaaacctgaactagaagtagtccttacagaggatgctcttaaatccctagaaaatcagacatacttcaaatcttttgaagaaaatggcaaaggttccataattaatttggaaacaaggttgctacaacttgagagcactgttagtgcaaaggacttagaacttacccagtgttataaacaaataaaagacatgcaagaacaaggccagtttgaaacagaaatgcttcaaaagaagattgtaaacctacagaaaatagttgaagaaaaagtggctgctgctcttgtcagtcaaatccaacttgaggcagttcaggaatatgcaaaattctgtcaagataatcaaacaatttcatcagaacctgaaagaacaaatattcagaatttaaatcaactaagagaagatgagttggggtcagatatatcagcattaaccttgagaatatcagaattagaaagccaggttgttgaaatgcatactagtttgattttagaaaaagaacaagtagaaattgcagaaaaaaatgttttagaaaaagaaaagaagctgctagaactacagaagctattggagggcaatgagaaaaaacagagagagaaagaaaagaaaagaagccctcaagatgttgaagttctcaagacaactactgagctatttcatagcaatgaagaaagtggattttttaatgaactcgaggctcttagagctgaatcagtggctaccaaagcagaacttgccagttataaagaaaaggctgaaaaacttcaagaagagcttttggtaaaagaaacaaatatgacatctcttcagaaagacttaagccaagttagggatcacctcgcagaggcaaaagagaaattgtccattttagaaaaagaagatgagactgaggtacaagaaagcaaaaaggcctgcatgtttgagccacttcctataaaactgagtaagagcattgcatcccagacagatgggactctgaagatcagtagcagcaatcagactccacaaattcttgttaaaaatgcaggaatacaaattaatttacagagtgaatgttcctcagaagaagttactgaaataatcagtcagtttactgaaaaaattgagaagatgcaagaactacatgctgctgaaattttggacatggaatccagacatatttcagaaactgaaaccttaaagagggaacactatgttgccgttcagttactgaaagaggaatgtggtaccttgaaggcagtgatacagtgtctgagaagtaaagagggatcctcaattcctgagctagcacattctgatgcttaccagactagagaaatatgctccagtgattctggatcagactggggtcagggaatttatcttacacacagtcagggatttgacatagcatcagaaggccgaggagaagaaagtgaaagtgcaacagattcctttccaaagaaaataaagggattactgagagctgtccataatgaaggcatgcaggtgctttctctcactgagtctccctatagtgatggagaggaccattctattcagcaggtttcagaaccttggctagaagagagaaaagcttacatcaatacaatctcatctctaaaggatttaattacaaagatgcaactgcaaagagaagccgaggtttatgatagttctcaatctcatgagagcttctcagactggcgaggtgaactactgcttgcccttcaacaagttttcttagaagagcgtagtgttttactagcagcatttcggacggagctgacagctctaggtactacagatgcagttggtttactaaactgtttggaacagagaatacaagaacagggtgttgaatatcaagcagctatggaatgcctccagaaagcagatagaaggagtttgttatctgaaattcaggcactgcatgcacaaatgaatggtaggaaaattactctgaaaagagaacaagagagtgagaaaccaagccaagaactcttggaatataatatacagcagaagcagtctcaaatgctggagatgcaagtggagctcagcagtatgaaagacagagcaacggaactgcaggagcagctgagttctgagaaaatggtggttgctgaactgaagagtgagcttgcacaaactaaattggaactagaaacaacactcaaggcacagcataaacacctaaaagaattggaggctttcaggttggaagttaaagataagacagatgaagtacatttgcttaatgacacattagcaagtgaacagaaaaaatcaagagagctccagtgggctttggagaaagagaaagccaagttgggacgcagtgaagaacgggataaagaagaacttgaggatctgaagttttcacttgagagtcagaaacaaaggaatcttcagctaaatctacttttggaacaacagaaacaactactgaacgaatcccagcaaaaaatagaatcacagagaatgctatatgatgcccagttgtcagaagaacaaggtcgaaacttagagcttcaggtacttcttgaatctgagaaagttcgaattcgggaaatgagtagtaccctagatagggagcgggaattgcacgcacagctgcagagcagtgatggtactggacagtctcggccacccttgccctcagaggacctactgaaagagctgcagaaacagctagaggaaaaacacagtcgcatagtagaattgttaaatgagactgaaaaatataaactggattctttgcaaacacgacagcaaatggaaaaagataggcaggttcacaggaaaacactgcagacagaacaggaggccaacactgagggacagaaaaaaatgcatgagctccagtccaaagtggaagatcttcagcgccagctggaagagaaaagacaacaagtttataagttagaccttgaaggacagcgactacaaggaatcatgcaggaattccagaagcaagaactagaacgagaagaaaaacgagaaagtagaagaattctgtatcagaaccttaatgagccaaccacgtggagcttaaccagtgatagaactagaaattgggttcttcaacagaaaatagaaggagaaacaaaagaatcaaactacgctaaattgattgaaatgaatggaggaggaaccggctgtaatcatgaattagaaatgatcagacaaaagcttcaatgtgtagcttcaaaactacaggttctaccccagaaagcctctgagagactacagtttgaaacagcagatgatgaagatttcatttgggttcaggaaaatattgatgaaattattttacaactacagaaattaactggccagcaaggtgaagagcccagcttggtgtccccaagtacttcttgtggctcattgactgaaagactactgagacaaaatgctgagctgacagggcatatcagtcaactgactgaagagaagaatgacttaaggaacatggttatgaagctggaagagcagatcaggtggtatcgacagacaggagctggtagagataattcttccaggttttcattgaatggtggtgccaacattgaagccatcattgcctctgaaaaagaagtatggaacagagaaaaattgactctccagaaatctttgaaaagggcagaggctgaagtatacaaactgaaagctgaactaagaaatgactctttacttcaaactctgagccctgattctgaacatgtcactttaaagagaatttatggtaaatacttgagggcagaaagttttcgaaaggctctcatttaccagaagaaatacctgctgctgttactgggtgggttccaggaatgtgaagatgccaccttggccctgcttgcccggatgggggggcagccagctttcacggatctagaggtgatcaccaatcgcccaaagggcttcaccaggtttcggtcggccgtcagagtatccattgcaatttccagaatgaaatttttggttcgacggtggcatcgagtcacaggttctgtttccatcaatattaacagagatggctttggactgaatcaaggtgcagaaaagactgactcattttatcattcttctggtgggctggagttatatggagaaccaagacatactacgtatcgctcaagatcagatctggactatattaggtcccctttaccatttcagaataggtacccaggcactccagctgatttcaatcctggttctttagcatgttctcagcttcagaattacgatcctgacagagccctaacagattatatcactcggctagaggcactgcaaagacgacttggaactatacagtcaggtgctctgagtttaaccacatcttggcagcaccacagtgcgagacccacagctcccttctttgaaattctttcacactcattaggataatcaaagcttccagtttagtgcatgagctaattattaagttagccaaagcttaaactcttgtaaccagcagagaaactgactttaaataatttaagtgaaaatatgatttatcaccccagatcccactcctcccaaaaatgatttcctactatgttcattcagcggactgatgacacaaaatgcacaatgagcaccagtgtgcaaggtactctgagtctacagagcctaactggagaacgtattcctaagtagcgcatggcagaaagtggtaaggccgtgccgcagcactccagcctgggcagcagagcgagaccctgtctc

SEQ ID NO: 870 - protein, 3913 aa, Homo sapiens
QIEELSLAFLVRQLAQFRQRKAQSDGQSPSKKQKKKRKTSSSKHDVSAHHDLNIDQSQCNEMYINSSQRVESTVIPESTIMRTLHSGEITSHEQGFSVELESEISTTADDCSSEVNGCSFVMRTGKPTNLLREEEFGVDDSYSEQGAQDSPTHLEMMESELAGKQHEIEELNRELEEMRVTYGTEGLQQLQEFEAAIKQRDGIITQLTANLQQARREKDETMREFLELTEQSQKLQIQFQQLQASETLRNSTHSSTAADLLQAKQQILTHQQQLEEQDHLLEDYQKKKEDFTMQISFLQEKIKVYEMEQDKKVENSNKEEIQEKETIIEELNTKIIEEEKKTLELKDKLTTADKLLGELQEQIVQKNQEIKNMKLELTNSKQKERQSSEEIKQLMGTVEELQKRNHKDSQFETDIVQRMEQETQRKLEQLRAELDEMYGQQIVQMKQELIRQHMAQMEEMKTRHKGEMENALRSYSNITVNEDQIKLMNVAINELNIKLQDTNSQKEKLKEELGLILEEKCALQRQLEDLVEELSFSREQIQRARQTIAEQESKLNEAHKSLSTVEDLKAEIVSASESRKELELKHEAEVTNYKIKLEMLEKEKNAVLDRMAESQEAELERLRTQLLFSHEEELSKLKEDLEIEHRINIEKLKDNLGIHYKQQIDGLQNEMSQKIETMQFEKDNLITKQNQLILEISKLKDLQQSLVNSKSEEMTLQINELQKEIEILRQEEKEKGTLEQEVQELQLKTELLEKQMKEKENDLQEKFAQLEAENSILKDEKKTLEDMLKIHTPVSQEERLIFLDSIKSKSKDSVWEKEIEILIEENEDLKQQCIQLNEEIEKQRNTFSFAEKNFEVNYQELQEEYACLLKVKDDLEDSKNKQELEYKSKLKALNEELHLQRINPTTVKMKSSVFDEDKTFVAETLEMGEVVEKDTTELMEKLEVTKREKLELSQRLSDLSEQLKQKHGEISFLNEEVKSLKQEKEQVSLRCRELEIIINHNRAENVQSCDTQVSSLLDGVVTMTSRGAEGSVSKVNKSFGEESKIMVEDKVSFENMTVGEESKQEQLILDHLPSVTKESSLRATQPSENDKLQKELNVLKSEQNDLRLQMEAQRICLSLVYSTHVDQVREYMENEKDKALCSLKEELIFAQEEKIKELQKIHQLELQTMKTQETGDEGKPLHLLIGKLQKAVSEECSYFLQTLCSVLGEYYTPALKCEVNAEDKENSGDYISENEDPELQDYRYEVQDFQENMHTLLNKVTEEYNKLLVLQTRLSKIWGQQTDGMKLEFGEENLPKEETEFLSIHSQMTNLEDIDVNHKSKLSSLQDLEKTKLEEQVQELESLISSLQQQLKETEQNYEAEIHCLQKRLQAVSESTVPPSLPVDSVVITESDAQRTMYPGSCVKKNIDGTIEFSGEFGVKEETNIVKLLEKQYQEQLEEEVAKVIVSMSIAFAQQTELSRISGGKENTASSKQAHAVCQQEQHYFNEMKLSQDQIGFQTFETVDVKFKEEFKPLSKELGEHGKEILLSNSDPHDIPESKDCVLTISEEMFSKDKTFIVRQSIHDEISVSSMDASRQLMLNEEQLEDMRQELVRQYQEHQQATELLRQAHMRQMERQREDQEQLQEEIKRLNRQLAQRSSIDNENLVSERERVLLEELEALKQLSLAGREKLCCELRNSSTQTQNGNENQGEVEEQTFKEKELDRKPEDVPPEILSNERYALQKANNRLLKILLEVVKTTAAVEETIGRHVLGILDRSSKSQSSASLIWRSEAEASVKSCVHEEHTRVTDESIPSYSGSDMPRNDINMWSKVTEEGTELSQRLVRSGFAGTEIDPENEELMLNISSRLQAAVEKLLEAISETSSQLEHAKVTQTELMRESFRQKQEATESLKCQEELRERLHEESRAREQLAVELSKAEGVIDGYADEKTLFERQIQEKTDIIDRLEQELLCASNRLQELEAEQQQIQEERELLSRQKEAMKAEAGPVEQQLLQETEKLMKEKLEVQCQAEKVRDDLQKQVKALEIDVEEQVSRFIELEQEKNTELMDLRQQNQALEKQLEKMRKFLDEQAIDREHERDVFQQEIQKLEQQLKVVPRFQPISEHQTREVEQLANHLKEKTDKCSELLLSKEQLQRDIQERNEEIEKLEFRVRELEQALLVEDRKHFGAVEAKPELSLEVQLQAERDAIDRKEKEITNLEEQLEQFREELENKNEEVQQLHMQLEIQKKESTTRLQELEQENKLFKDDMEKLGLAIKESDAMSTQDQHVLFGKFAQIIQEKEVEIDQLNEQVTKLQQQLKITTDNKVIEEKNELIRDLETQIECLMSDQECVKRNREEEIEQLNEVIEKLQQELANIGQKTSMNAHSLSEEADSLKHQLDVVIAEKLALEQQVETANEEMTFMKNVLKETNFKMNQLTQELFSLKRERESVEKIQSIPENSVNVAIDHLSKDKPELEVVLTEDALKSLENQTYFKSFEENGKGSIINLETRLLQLESTVSAKDLELTQCYKQIKDMQEQGQFETEMLQKKIVNLQKIVEEKVAAALVSQIQLEAVQEYAKFCQDNQTISSEPERTNIQNLNQLREDELGSDISALTLRISELESQVVEMHTSLILEKEQVEIAEKNVLEKEKKLLELQKLLEGNEKKQREKEKKRSPQDVEVLKTTTELFHSNEESGFFNELEALRAESVATKAELASYKEKAEKLQEELLVKETNMTSLQKDLSQVRDHLAEAKEKLSILEKEDETEVQESKKACMFEPLPIKLSKSIASQTDGTLKISSSNQTPQILVKNAGIQINLQSECSSEEVTEIISQFTEKIEKMQELHAAEILDMESRHISETETLKREHYVAVQLLKEECGTLKAVIQCLRSKEGSSIPELAHSDAYQTREICSSDSGSDWGQGIYLTHSQGFDIASEGRGEESESATDSFPKKIKGLLRAVHNEGMQVLSLTESPYSDGEDHSIQQVSEPWLEERKAYINTISSLKDLITKMQLQREAEVYDSSQSHESFSDWRGELLLALQQVFLEERSVLLAAFRTELTALGTTDAVGLLNCLEQRIQEQGVEYQAAMECLQKADRRSLLSEIQALHAQMNGRKITLKREQESEKPSQELLEYNIQQKQSQMLEMQVELSSMKDRATELQEQLSSEKMVVAELKSELAQTKLELETTLKAQHKHLKELEAFRLEVKDKTDEVHLLNDTLASEQKKSRELQWALEKEKAKLGRSEERDKEELEDLKFSLESQKQRNLQLNLLLEQQKQLLNESQQKIESQRMLYDAQLSEEQGRNLELQVLLESEKVRIREMSSTLDRERELHAQLQSSDGTGQSRPPLPSEDLLKELQKQLEEKHSRIVELLNETEKYKLDSLQTRQQMEKDRQVHRKTLQTEQEANTEGQKKMHELQSKVEDLQRQLEEKRQQVYKLDLEGQRLQGIMQEFQKQELEREEKRESRRILYQNLNEPTTWSLTSDRTRNWVLQQKIEGETKESNYAKLIEMNGGGTGCNHELEMIRQKLQCVASKLQVLPQKASERLQFETADDEDFIWVQENIDEIILQLQKLTGQQGEEPSLVSPSTSCGSLTERLLRQNAELTGHISQLTEEKNDLRNMVMKLEEQIRWYRQTGAGRDNSSRFSLNGGANIEAIIASEKEVWNREKLTLQKSLKRAEAEVYKLKAELRNDSLLQTLSPDSEHVTLKRIYGKYLRAESFRKALIYQKKYLLLLLGGFQECEDATLALLARMGGQPAFTDLEVITNRPKGFTRFRSAVRVSIAISRMKFLVRRWHRVTGSVSININRDGFGLNQGAEKTDSFYHSSGGLELYGEPRHTTYRSRSDLDYIRSPLPFQNRYPGTPADFNPGSLACSQLQNYDPDRALTDYITRLEALQRRLGTIQSGALSLTTSWQHHSARPTAPFFEILSHSLG

SEQ ID NO: 871 - DNA, 12207 bp, Homo sapiens
cagattgaagaactctctttagcttttcttgtcagacagcttgcccagtttcgacaaagaaaagctcagtcggatgggcagagtccttccaagaagcagaaaaaaaagagaaaaacgtcaagcagtaaacatgatgtgtcagcacaccatgatttgaatattgatcaatcacagtgtaatgaaatgtacataaatagttctcagagagtagaatcaactgtgattcctgaatctacaataatgagaactctacatagtggagaaataaccagtcatgagcagggcttctctgtggaactggaaagtgaaatttcaaccacagcagatgactgcagttcagaggtaaatggttgcagttttgtgatgagaacaggaaagcctacaaatttattaagggaagaagaatttggtgttgatgattcttattctgaacaaggagcacaagacagtccgactcatctagagatgatggaaagtgagttggctgggaagcagcatgagattgaagagctaaacagagagctggaagaaatgagggttacctatgggactgaaggactgcagcagttacaagaatttgaagctgccattaaacaaagagatggcattataacccagctcactgctaatttacaacaagcaagaagagaaaaggatgagacaatgagagaatttttagagttgacagaacagagtcaaaaattacagattcaatttcagcaattacaggctagtgaaactctgagaaacagcactcatagtagcacagctgcagacttactacaagccaaacaacagatcctcactcatcaacagcagcttgaagaacaagaccacttattagaagattatcagaaaaagaaagaagacttcacaatgcaaattagtttcttgcaagagaaaattaaagtatatgaaatggaacaagataaaaaagtagaaaactcaaataaagaagaaatacaggaaaaggagacaatcattgaagaattaaacacaaaaataatagaagaagaaaagaaaactcttgagctaaaggataaattaacaactgctgataaattactaggagaattacaagaacagattgtgcaaaagaaccaagaaataaaaaacatgaaattagagctgactaattctaagcaaaaagaaagacagtcttctgaagaaataaaacagttaatggggacagtcgaagaacttcagaagagaaatcataaagacagccagttcgaaactgatatagtacaacgaatggaacaagaaacacaaagaaagttagaacaactccgggcagagctggatgagatgtatgggcagcagatagtgcaaatgaaacaagaattaataagacaacacatggcacagatggaggaaatgaaaacacggcataagggagaaatggagaatgctttaaggtcatattcaaatattacagttaatgaagatcagataaagttaatgaatgtggcaataaatgaactgaatataaaattgcaagatactaactctcaaaaggaaaaactcaaggaagaactaggactaattttagaagaaaagtgtgctctacagagacagcttgaagaccttgttgaagaattgagcttttcaagggaacagattcagagagctagacagacaatagctgaacaagaaagtaaacttaatgaagcacataagtcccttagtacagtggaagatttgaaagctgagattgtttctgcatctgaatccagaaaggaactagaattaaaacatgaagcagaagttacaaattacaagataaaacttgaaatgttagaaaaagaaaagaatgctgtgttagacagaatggctgaatcacaagaagctgaattagagaggctgagaacacagcttctatttagtcacgaagaagagctttccaaactgaaggaagatttagaaattgaacatcgaataaatattgaaaaacttaaagataatttaggcattcactataaacagcagatagatggtttacagaatgaaatgagtcaaaagatagaaaccatgcagtttgaaaaggacaatttgataactaagcagaatcaattaattttggaaatttcaaagctaaaagatttacagcagtctcttgtaaattcaaagtcagaagaaatgactcttcaaatcaatgaacttcaaaaagaaattgaaatactcagacaagaagaaaaagaaaagggtacacttgaacaagaagttcaagaattacaacttaaaacagaattgttagaaaaacagatgaaggaaaaagagaatgatcttcaagaaaaatttgcacaacttgaagcagagaatagcattcttaaagatgaaaagaaaacccttgaagacatgttgaaaatacatactcctgttagccaagaagaaagattgattttcttagactccattaagtccaaatccaaagactctgtgtgggaaaaagaaatagaaatacttatagaggaaaatgaggacctcaaacaacaatgtattcagctaaatgaagagattgaaaagcaaaggaacactttttcatttgctgaaaaaaactttgaagttaactatcaagagttacaagaggagtatgcttgccttctcaaagtaaaagatgatttagaagacagtaaaaataaacaggaattagagtataaaagtaaacttaaagcacttaatgaagagcttcatttgcaaagaataaatccaactacagtgaaaatgaaaagttctgtctttgatgaagacaaaacttttgtagcagaaacattggaaatgggtgaggttgttgaaaaggatacaacagaactcatggaaaaacttgaggtaaccaagcgagagaaattagagctgtcacagagactgtctgatctttctgaacaattgaaacagaaacatggtgagattagttttctaaatgaagaagttaaatctttaaagcaagagaaagaacaagtttcattgagatgtagagagctagaaatcattattaaccacaacagggcagaaaatgtacagtcatgtgatactcaagtaagctctttattagatggagttgtgaccatgacaagcaggggtgctgaaggatcagtttctaaagtaaataaaagttttggtgaagaatcaaaaataatggtggaagataaagtttcttttgaaaatatgactgttggagaagaaagtaagcaagaacagttgattttggatcacttaccatctgtaacaaaggaatcatcacttagagcaactcaaccaagtgaaaatgataaacttcagaaagaactcaatgtacttaaatcagaacagaatgatttaaggctacagatggaagcccaacgcatttgcctctctctggtttattcaactcatgtggatcaggttcgtgaatatatggaaaatgaaaaagataaagctctttgcagtcttaaagaagagcttatttttgctcaagaggaaaagatcaaggaacttcagaaaatacaccagttagaactacagactatgaaaacacaagaaacaggtgatgaaggaaagcctttacatctgctcattggaaaacttcaaaaggcagtgtctgaagaatgttcttattttttacagactttatgcagtgtccttggtgaatattatactcctgctttaaaatgtgaagtaaatgcagaagacaaagagaattctggtgattacatttctgaaaatgaagatccagaattacaagattatagatatgaagttcaagactttcaagaaaatatgcacactcttctcaacaaagtaacagaagaatacaacaaactcttggtacttcaaacacgactaagcaagatctggggacagcagacagatggtatgaaacttgaatttggagaagaaaaccttccaaaagaggaaacagagtttttatcaatccattctcagatgaccaatttggaagacattgatgtcaatcataaaagcaagttatcttctctgcaagatcttgaaaaaactaaacttgaagaacaagttcaagaattagaaagcctcatatcctctttgcagcaacagttgaaagaaactgaacaaaactatgaggcagagatccactgtttacagaagaggcttcaagctgttagtgagtccacggttccgccaagcttacctgttgattcggtggtaattacagaatctgatgcacagagaacaatgtaccctggaagttgtgtgaaaaagaatattgatggtacaatagagttttctggtgaatttggagtgaaagaggaaacaaatatcgttaagttgcttgaaaaacaataccaagaacaattagaagaagaagtagctaaggttattgtgtcaatgagtatagcatttgctcaacaaactgaactgtctagaatatctgggggaaaagaaaatactgcatcatcaaagcaagcacatgctgtgtgtcagcaagaacaacattattttaatgaaatgaaattatcacaggatcaaattggttttcagacttttgagacagtggatgtgaaatttaaagaagaatttaaaccacttagtaaagagttaggagaacatggaaaggaaattttattatcaaatagtgatccccatgatataccagaatcaaaggactgtgtgctgactatttcagaagaaatgttctccaaagataaaacatttatagttagacagtctattcatgatgagatttcagtgtcaagcatggatgcttctagacaactaatgttgaatgaagaacagttggaagatatgagacaggaacttgtacgacaataccaagaacatcaacaggcaacggaattgttaaggcaagcacatatgcggcaaatggagagacagcgagaagaccaggaacagctacaagaagagattaagagacttaatagacaattagcccagagatcctccatagataatgaaaacctggtttcagagagagagagggtgcttttagaggagctggaagcactaaagcagctgtctttagctggaagagagaagctgtgttgtgagctgcgcaacagcagtacgcaaacacagaatggaaatgaaaaccaaggagaagttgaagaacaaacatttaaagaaaaggaattagacagaaaacctgaagatgtgcctcctgagattttgtctaatgaaaggtatgcactccagaaagctaataatagacttttgaagatcctcttagaagttgtaaagacaacagcagctgttgaagaaacaattggtcgccatgtccttgggattctagatagatctagtaaaagccagtcatctgccagcctaatttggaggtcagaagcagaggcatctgtaaagtcatgtgtccatgaggaacatacaagagttacagatgaatccattccctcttattctggaagtgatatgccaagaaatgacattaacatgtggtcaaaagtaactgaggaaggaacagagctgtcacaacgacttgtgaggagtggttttgctggaactgaaatagaccctgaaaatgaagaacttatgctgaacattagctctcgactacaagcagcagttgaaaaactcctagaagccataagtgaaactagcagtcagcttgaacatgcgaaagtgacacagacagagttgatgcgtgagtcatttagacagaaacaagaagcaacagagtcccttaagtgccaagaggaacttcgagagcgccttcatgaggagtccagggccagagaacagctagctgtggagctcagtaaggctgagggcgtcattgatggctatgcagatgaaaaaactctttttgaaaggcaaattcaggaaaaaactgatataatagatcgtcttgagcaggagttgttatgtgcaagtaacaggttgcaagaattggaggcagagcaacagcagatccaagaagaaagagaattactgtccagacaaaaggaagctatgaaagcagaggcaggcccagttgaacaacaattactacaggagacagaaaaattaatgaaggaaaaactagaagtacaatgtcaagctgaaaaagtacgtgatgaccttcaaaaacaagtgaaagctctagaaatagatgtggaagaacaagtcagtaggtttatagagctggaacaagaaaaaaatactgaactaatggatttaagacagcaaaaccaagcattggaaaagcagttagaaaaaatgagaaaatttttagatgagcaagccattgacagagaacatgagagagatgtattccaacaggaaatacagaaactagaacagcaacttaaggttgttcctcgattccagcctatcagtgaacatcaaactagagaggttgaacagttagcaaatcatctgaaagaaaaaacagacaaatgcagtgagcttttgctctctaaagagcagcttcaaagggatatacaagaaaggaatgaagaaatagagaaactggagttcagagtaagagaactggagcaggcgcttcttgtgagtgcagatacttttcaaaaggtagaggaccgaaaacactttggagctgtagaagctaaaccagaattgtccctagaagtacaattgcaggctgaacgagatgccatagacagaaaggaaaaagagattacaaacttagaagagcaattagaacagtttagagaagaactggaaaataagaatgaagaagttcaacaattacatatgcaattagaaatacagaaaaaggaatctactacccgcctacaagaacttgaacaggaaaacaaattatttaaggatgacatggagaaactgggacttgccataaaggaatctgatgccatgtctactcaagaccaacatgtgctatttgggaaatttgctcaaataatacaggaaaaagaggtagaaattgaccaattaaatgaacaagttacgaaactccagcagcaacttaaaattacaacagataacaaggttattgaagaaaaaaatgaactgataagggatcttgaaacccaaatagaatgtttgatgagtgatcaagaatgtgtgaagagaaatagagaagaagaaatagagcagctcaatgaagtgattgaaaaacttcaacaggaattggcaaatattggacagaagacatcaatgaatgctcattccctctcagaagaagcagacagtttaaaacatcaattggatgtggttatagctgaaaagctggccttggaacagcaagtagaaaccgctaatgaagaaatgaccttcatgaaaaatgtacttaaagaaaccaattttaaaatgaatcagctaacacaggaattattcagcttaaagagagaacgtgaaagtgtggaaaagattcaaagcataccagagaatagtgttaacgtggctatagatcatctgagcaaagacaaacctgaactagaagtagtccttacagaggatgctcttaaatccctagaaaatcagacatacttcaaatcttttgaagaaaatggcaaaggttccataattaatttggaaacaaggttgctacaacttgagagcactgttagtgcaaaggacttagaacttacccagtgttataaacaaataaaagacatgcaagaacaaggccagtttgaaacagaaatgcttcaaaagaagattgtaaacctacagaaaatagttgaagaaaaagtggctgctgctcttgtcagtcaaatccaacttgaggcagttcaggaatatgcaaaattctgtcaagataatcaaacaatttcatcagaacctgaaagaacaaatattcagaatttaaatcaactaagagaagatgagttggggtcagatatatcagcattaaccttgagaatatcagaattagaaagccaggttgttgaaatgcatactagtttgattttagaaaaagaacaagtagaaattgcagaaaaaaatgttttagaaaaagaaaagaagctgctagaactacagaagctattggagggcaatgagaaaaaacagagagagaaagaaaagaaaagaagccctcaagatgttgaagttctcaagacaactactgagctatttcatagcaatgaagaaagtggattttttaatgaactcgaggctcttagagctgaatcagtggctaccaaagcagaacttgccagttataaagaaaaggctgaaaaacttcaagaagagcttttggtaaaagaaacaaatatgacatctcttcagaaagacttaagccaagttagggatcacctcgcagaggcaaaagagaaattgtccattttagaaaaagaagatgagactgaggtacaagaaagcaaaaaggcctgcatgtttgagccacttcctataaaactgagtaagagcattgcatcccagacagatgggactctgaagatcagtagcagcaatcagactccacaaattcttgttaaaaatgcaggaatacaaattaatttacagagtgaatgttcctcagaagaagttactgaaataatcagtcagtttactgaaaaaattgagaagatgcaagaactacatgctgctgaaattttggacatggaatccagacatatttcagaaactgaaaccttaaagagggaacactatgttgccgttcagttactgaaagaggaatgtggtaccttgaaggcagtgatacagtgtctgagaagtaaagaggtatttggtttttataatatgtgtttttcaacattgtgtgattctggatcagactggggtcagggaatttatcttacacacagtcagggatttgacatagcatcagaaggccgaggagaagaaagtgaaagtgcaacagattcctttccaaagaaaataaagggattactgagagctgtccataatgaaggcatgcaggtgctttctctcactgagtctccctatagtgatggagaggaccattctattcagcaggtttcagaaccttggctagaagagagaaaagcttacatcaatacaatctcatctctaaaggatttaattacaaagatgcaactgcaaagagaagccgaggtttatgatagttctcaatctcatgagagcttctcagactggcgaggtgaactactgcttgcccttcaacaagttttcttagaagagcgtagtgttttactagcagcatttcggacggagctgacagctctaggtactacagatgcagttggtttactaaactgtttggaacagagaatacaagaacagggtgttgaatatcaagcagctatggaatgcctccagaaagcagatagaaggagtttgttatctgaaattcaggcactgcatgcacaaatgaatggtaggaaaattactctgaaaagagaacaagagagtgagaaaccaagccaagaactcttggaatataatatacagcagaagcagtctcaaatgctggagatgcaagtggagctcagcagtatgaaagacagagcaacggaactgcaggagcagctgagttctgagaaaatggtggttgctgaactgaagagtgagcttgcacaaactaaattggaactagaaacaacactcaaggcacagcataaacacctaaaagaattggaggctttcaggttggaagttaaagataagacagatgaagtacatttgcttaatgacacattagcaagtgaacagaaaaaatcaagagagctccagtgggctttggagaaagagaaagccaagttgggacgcagtgaagaacgggataaagaagaacttgaggatctgaagttttcacttgagagtcagaaacaaaggaatcttcagctaaatctacttttggaacaacagaaacaactactgaacgaatcccagcaaaaaatagaatcacagagaatgctatatgatgcccagttgtcagaagaacaaggtcgaaacttagagcttcaggtacttcttgaatctgagaaagttcgaattcgggaaatgagtagtaccctagatagggagcgggaattgcacgcacagctgcagagcagtgatggtactggacagtctcggccacccttgccctcagaggacctactgaaagagctgcagaaacagctagaggaaaaacacagtcgcatagtagaattgttaaatgagactgaaaaatataaactggattctttgcaaacacgacagcaaatggaaaaagataggcaggttcacaggaaaacactgcagacagaacaggaggccaacactgagggacagaaaaaaatgcatgagctccagtccaaagtggaagatcttcagcgccagctggaagagaaaagacaacaagtttataagttagaccttgaaggacagcgactacaaggaatcatgcaggaattccagaagcaagaactagaacgagaagaaaaacgagaaagtagaagaattctgtatcagaaccttaatgagccaaccacgtggagcttaaccagtgatagaactagaaattgggttcttcaacagaaaatagaaggagaaacaaaagaatcaaactacgctaaattgattgaaatgaatggaggaggaaccggctgtaatcatgaattagaaatgatcagacaaaagcttcaatgtgtagcttcaaaactacaggttctaccccagaaagcctctgagagactacagtttgaaacagcagatgatgaagatttcatttgggttcaggaaaatattgatgaaattattttacaactacagaaattaactggccagcaaggtgaagagcccagcttggtgtccccaagtacttcttgtggctcattgactgaaagactactgagacaaaatgctgagctgacagggcatatcagtcaactgactgaagagaagaatgacttaaggaacatggttatgaagctggaagagcagatcaggtggtatcgacagacaggagctggtagagataattcttccaggttttcattgaatggtggtgccaacattgaagccatcattgcctctgaaaaagaagtatggaacagagaaaaattgactctccagaaatctttgaaaagggcagaggctgaagtatacaaactgaaagctgaactaagaaatgactctttacttcaaactctgagccctgattctgaacatgtcactttaaagagaatttatggtaaatacttgagggcagaaagttttcgaaaggctctcatttaccagaagaaatacctgctgctgttactgggtgggttccaggaatgtgaagatgccaccttggccctgcttgcccggatgggggggcagccagctttcacggatctagaggtgatcaccaatcgcccaaagggcttcaccaggtttcggtcggccgtcagagtatccattgcaatttccagaatgaaatttttggttcgacggtggcatcgagtcacaggttctgtttccatcaatattaacagagatggctttggactgaatcaaggtgcagaaaagactgactcattttatcattcttctggtgggctggagttatatggagaaccaagacatactacgtatcgctcaagatcagatctggactatattaggtcccctttaccatttcagaataggtacccaggcactccagctgatttcaatcctggttctttagcatgttctcagcttcagaattacgatcctgacagagccctaacagattatatcactcggctagaggcactgcaaagacgacttggaactatacagtcaggttcaactactcaatttcatgctggcatgagaagataatcctttgaaacatcattaattgaagtgattttaaatagatttccttttgtaaatcaatggttcttttgtgcttttgtattgtgaatattcaatgggaccaatatgaacacagcttatgattgtatacaaatcccttgccagcacatgaaaacaaactggaatttgtatatataagcattgtgtatgtattcatgcacaataattattgaattacctgtatatttgtggaatgctaatttaaaacattaaattataaaccttgtgtatttatcaaatgggtgaaaagattaaacttttacgcattacaatactgctgaatgtgtagctcgaggtgtcctgcacttttcttataaggctactgaagttacatgttttgcctaatatattctactggtgatgaagacagataatatcacttgtagagacctatttttgtataatggtagaagttttgaattttatggggtattttgtcaagtactgaaataaaaatgacttcaccattttcaccacact

SEQ ID NO: 872 - protein, 3896 aa, Homo sapiens
QIEELSLAFLVRQLAQFRQRKAQSDGQSPSKKQKKKRKTSSSKHDVSAHHDLNIDQSQCNEMYINSSQRVESTVIPESTIMRTLHSGEITSHEQGFSVELESEISTTADDCSSEVNGCSFVMRTGKPTNLLREEEFGVDDSYSEQGAQDSPTHLEMMESELAGKQHEIEELNRELEEMRVTYGTEGLQQLQEFEAAIKQRDGIITQLTANLQQARREKDETMREFLELTEQSQKLQIQFQQLQASETLRNSTHSSTAADLLQAKQQILTHQQQLEEQDHLLEDYQKKKEDFTMQISFLQEKIKVYEMEQDKKVENSNKEEIQEKETIIEELNTKIIEEEKKTLELKDKLTTADKLLGELQEQIVQKNQEIKNMKLELTNSKQKERQSSEEIKQLMGTVEELQKRNHKDSQFETDIVQRMEQETQRKLEQLRAELDEMYGQQIVQMKQELIRQHMAQMEEMKTRHKGEMENALRSYSNITVNEDQIKLMNVAINELNIKLQDTNSQKEKLKEELGLILEEKCALQRQLEDLVEELSFSREQIQRARQTIAEQESKLNEAHKSLSTVEDLKAEIVSASESRKELELKHEAEVTNYKIKLEMLEKEKNAVLDRMAESQEAELERLRTQLLFSHEEELSKLKEDLEIEHRINIEKLKDNLGIHYKQQIDGLQNEMSQKIETMQFEKDNLITKQNQLILEISKLKDLQQSLVNSKSEEMTLQINELQKEIEILRQEEKEKGTLEQEVQELQLKTELLEKQMKEKENDLQEKFAQLEAENSILKDEKKTLEDMLKIHTPVSQEERLIFLDSIKSKSKDSVWEKEIEILIEENEDLKQQCIQLNEEIEKQRNTFSFAEKNFEVNYQELQEEYACLLKVKDDLEDSKNKQELEYKSKLKALNEELHLQRINPTTVKMKSSVFDEDKTFVAETLEMGEVVEKDTTELMEKLEVTKREKLELSQRLSDLSEQLKQKHGEISFLNEEVKSLKQEKEQVSLRCRELEIIINHNRAENVQSCDTQVSSLLDGVVTMTSRGAEGSVSKVNKSFGEESKIMVEDKVSFENMTVGEESKQEQLILDHLPSVTKESSLRATQPSENDKLQKELNVLKSEQNDLRLQMEAQRICLSLVYSTHVDQVREYMENEKDKALCSLKEELIFAQEEKIKELQKIHQLELQTMKTQETGDEGKPLHLLIGKLQKAVSEECSYFLQTLCSVLGEYYTPALKCEVNAEDKENSGDYISENEDPELQDYRYEVQDFQENMHTLLNKVTEEYNKLLVLQTRLSKIWGQQTDGMKLEFGEENLPKEETEFLSIHSQMTNLEDIDVNHKSKLSSLQDLEKTKLEEQVQELESLISSLQQQLKETEQNYEAEIHCLQKRLQAVSESTVPPSLPVDSVVITESDAQRTMYPGSCVKKNIDGTIEFSGEFGVKEETNIVKLLEKQYQEQLEEEVAKVIVSMSIAFAQQTELSRISGGKENTASSKQAHAVCQQEQHYFNEMKLSQDQIGFQTFETVDVKFKEEFKPLSKELGEHGKEILLSNSDPHDIPESKDCVLTISEEMFSKDKTFIVRQSIHDEISVSSMDASRQLMLNEEQLEDMRQELVRQYQEHQQATELLRQAHMRQMERQREDQEQLQEEIKRLNRQLAQRSSIDNENLVSERERVLLEELEALKQLSLAGREKLCCELRNSSTQTQNGNENQGEVEEQTFKEKELDRKPEDVPPEILSNERYALQKANNRLLKILLEVVKTTAAVEETIGRHVLGILDRSSKSQSSASLIWRSEAEASVKSCVHEEHTRVTDESIPSYSGSDMPRNDINMWSKVTEEGTELSQRLVRSGFAGTEIDPENEELMLNISSRLQAAVEKLLEAISETSSQLEHAKVTQTELMRESFRQKQEATESLKCQEELRERLHEESRAREQLAVELSKAEGVIDGYADEKTLFERQIQEKTDIIDRLEQELLCASNRLQELEAEQQQIQEERELLSRQKEAMKAEAGPVEQQLLQETEKLMKEKLEVQCQAEKVRDDLQKQVKALEIDVEEQVSRFIELEQEKNTELMDLRQQNQALEKQLEKMRKFLDEQAIDREHERDVFQQEIQKLEQQLKVVPRFQPISEHQTREVEQLANHLKEKTDKCSELLLSKEQLQRDIQERNEEIEKLEFRVRELEQALLVSADTFQKVEDRKHFGAVEAKPELSLEVQLQAERDAIDRKEKEITNLEEQLEQFREELENKNEEVQQLHMQLEIQKKESTTRLQELEQENKLFKDDMEKLGLAIKESDAMSTQDQHVLFGKFAQIIQEKEVEIDQLNEQVTKLQQQLKITTDNKVIEEKNELIRDLETQIECLMSDQECVKRNREEEIEQLNEVIEKLQQELANIGQKTSMNAHSLSEEADSLKHQLDVVIAEKLALEQQVETANEEMTFMKNVLKETNFKMNQLTQELFSLKRERESVEKIQSIPENSVNVAIDHLSKDKPELEVVLTEDALKSLENQTYFKSFEENGKGSIINLETRLLQLESTVSAKDLELTQCYKQIKDMQEQGQFETEMLQKKIVNLQKIVEEKVAAALVSQIQLEAVQEYAKFCQDNQTISSEPERTNIQNLNQLREDELGSDISALTLRISELESQVVEMHTSLILEKEQVEIAEKNVLEKEKKLLELQKLLEGNEKKQREKEKKRSPQDVEVLKTTTELFHSNEESGFFNELEALRAESVATKAELASYKEKAEKLQEELLVKETNMTSLQKDLSQVRDHLAEAKEKLSILEKEDETEVQESKKACMFEPLPIKLSKSIASQTDGTLKISSSNQTPQILVKNAGIQINLQSECSSEEVTEIISQFTEKIEKMQELHAAEILDMESRHISETETLKREHYVAVQLLKEECGTLKAVIQCLRSKEVFGFYNMCFSTLCDSGSDWGQGIYLTHSQGFDIASEGRGEESESATDSFPKKIKGLLRAVHNEGMQVLSLTESPYSDGEDHSIQQVSEPWLEERKAYINTISSLKDLITKMQLQREAEVYDSSQSHESFSDWRGELLLALQQVFLEERSVLLAAFRTELTALGTTDAVGLLNCLEQRIQEQGVEYQAAMECLQKADRRSLLSEIQALHAQMNGRKITLKREQESEKPSQELLEYNIQQKQSQMLEMQVELSSMKDRATELQEQLSSEKMVVAELKSELAQTKLELETTLKAQHKHLKELEAFRLEVKDKTDEVHLLNDTLASEQKKSRELQWALEKEKAKLGRSEERDKEELEDLKFSLESQKQRNLQLNLLLEQQKQLLNESQQKIESQRMLYDAQLSEEQGRNLELQVLLESEKVRIREMSSTLDRERELHAQLQSSDGTGQSRPPLPSEDLLKELQKQLEEKHSRIVELLNETEKYKLDSLQTRQQMEKDRQVHRKTLQTEQEANTEGQKKMHELQSKVEDLQRQLEEKRQQVYKLDLEGQRLQGIMQEFQKQELEREEKRESRRILYQNLNEPTTWSLTSDRTRNWVLQQKIEGETKESNYAKLIEMNGGGTGCNHELEMIRQKLQCVASKLQVLPQKASERLQFETADDEDFIWVQENIDEIILQLQKLTGQQGEEPSLVSPSTSCGSLTERLLRQNAELTGHISQLTEEKNDLRNMVMKLEEQIRWYRQTGAGRDNSSRFSLNGGANIEAIIASEKEVWNREKLTLQKSLKRAEAEVYKLKAELRNDSLLQTLSPDSEHVTLKRIYGKYLRAESFRKALIYQKKYLLLLLGGFQECEDATLALLARMGGQPAFTDLEVITNRPKGFTRFRSAVRVSIAISRMKFLVRRWHRVTGSVSININRDGFGLNQGAEKTDSFYHSSGGLELYGEPRHTTYRSRSDLDYIRSPLPFQNRYPGTPADFNPGSLACSQLQNYDPDRALTDYITRLEALQRRLGTIQSGSTTQFHAGMRR

SEQ ID NO: 873 - DNA, 5789 bp, Homo sapiens
cagattgaagaactctctttagcttttcttgtcagacagcttgcccagtttcgacaaagaaaagctcagtcggatgggcagagtccttccaagaagcagaaaaaaaagagaaaaacgtcaagcagtaaacatgatgtgtcagcacaccatgatttgaatattgatcaatcacagtgtaatgaaatgtacataaatagttctcagagagtagaatcaactgtgattcctgaatctacaataatgagaactctacatagtggagaaataaccagtcatgagcagggcttctctgtggaactggaaagtgaaatttcaaccacagcagatgactgcagttcagaggtaaatggttgcagttttgtgatgagaacaggaaagcctacaaatttattaagggaagaagaatttggtgttgatgattcttattctgaacaaggagcacaagacagtccgactcatctagagatgatggaaagtgagttggctgggaagcagcatgagattgaagagctaaacagagagctggaagaaatgagggttacctatgggactgaaggactgcagcagttacaagaatttgaagctgccattaaacaaagagatggcattataacccagctcactgctaatttacaacaagcaagaagagaaaaggatgagacaatgagagaatttttagagttgacagaacagagtcaaaaattacagattcaatttcagcaattacaggctagtgaaactctgagaaacagcactcatagtagcacagctgcagacttactacaagccaaacaacagatcctcactcatcaacagcagcttgaagaacaagaccacttattagaagattatcagaaaaagaaagaagacttcacaatgcaaattagtttcttgcaagagaaaattaaagtatatgaaatggaacaagataaaaaagtagaaaactcaaataaagaagaaatacaggaaaaggagacaatcattgaagaattaaacacaaaaataatagaagaagaaaagaaaactcttgagctaaaggataaattaacaactgctgataaattactaggagaattacaagaacagattgtgcaaaagaaccaagaaataaaaaacatgaaattagagctgactaattctaagcaaaaagaaagacagtcttctgaagaaataaaacagttaatggggacagtcgaagaacttcagaagagaaatcataaagacagccagttcgaaactgatatagtacaacgaatggaacaagaaacacaaagaaagttagaacaactccgggcagagctggatgagatgtatgggcagcagatagtgcaaatgaaacaagaattaataagacaacacatggcacagatggaggaaatgaaaacacggcataagggagaaatggagaatgctttaaggtcatattcaaatattacagttaatgaagatcagataaagttaatgaatgtggcaataaatgaactgaatataaaattgcaagatactaactctcaaaaggaaaaactcaaggaagaactaggactaattttagaagaaaagtgtgctctacagagacagcttgaagaccttgttgaagaattgagcttttcaagggaacagattcagagagctagacagacaatagctgaacaagaaagtaaacttaatgaagcacataagtcccttagtacagtggaagatttgaaagctgagattgtttctgcatctgaatccagaaaggaactagaattaaaacatgaagcagaagttacaaattacaagataaaacttgaaatgttagaaaaagaaaagaatgctgtgttagacagaatggctgaatcacaagaagctgaattagagaggctgagaacacagcttctatttagtcacgaagaagagctttccaaactgaaggaagatttagaaattgaacatcgaataaatattgaaaaacttaaagataatttaggcattcactataaacagcagatagatggtttacagaatgaaatgagtcaaaagatagaaaccatgcagtttgaaaaggacaatttgataactaagcagaatcaattaattttggaaatttcaaagctaaaagatttacagcagtctcttgtaaattcaaagtcagaagaaatgactcttcaaatcaatgaacttcaaaaagaaattgaaatactcagacaagaagaaaaagaaaagggtacacttgaacaagaagttcaagaattacaacttaaaacagaattgttagaaaaacagatgaaggaaaaagagaatgatcttcaagaaaaatttgcacaacttgaagcagagaatagcattcttaaagatgaaaagaaaacccttgaagacatgttgaaaatacatactcctgttagccaagaagaaagattgattttcttagactccattaagtccaaatccaaagactctgtgtgggaaaaagaaatagaaatacttatagaggaaaatgaggacctcaaacaacaatgtattcagctaaatgaagagattgaaaagcaaaggaacactttttcatttgctgaaaaaaactttgaagttaactatcaagagttacaagaggagtatgcttgccttctcaaagtaaaagatgatttagaagacagtaaaaataaacaggaattagagtataaaagtaaacttaaagcacttaatgaagagcttcatttgcaaagaataaatccaactacagtgaaaatgaaaagttctgtctttgatgaagacaaaacttttgtagcagaaacattggaaatgggtgaggttgttgaaaaggatacaacagaactcatggaaaaacttgaggtaaccaagcgagagaaattagagctgtcacagagactgtctgatctttctgaacaattgaaacagaaacatggtgagattagttttctaaatgaagaagttaaatctttaaagcaagagaaagaacaagtttcattgagatgtagagagctagaaatcattattaaccacaacagggcagaaaatgtacagtcatgtgatactcaagtaagctctttattagatggagttgtgaccatgacaagcaggggtgctgaaggatcagtttctaaagtaaataaaagttttggtgaagaatcaaaaataatggtggaagataaagtttcttttgaaaatatgactgttggagaagaaagtaagcaagaacagttgattttggatcacttaccatctgtaacaaaggaatcatcacttagagcaactcaaccaagtgaaaatgataaacttcagaaagaactcaatgtacttaaatcagaacagaatgatttaaggctacagatggaagcccaacgcatttgcctctctctggtttattcaactcatgtggatcaggttcgtgaatatatggaaaatgaaaaagataaagctctttgcagtcttaaagaagagcttatttttgctcaagaggaaaagatcaaggaacttcagaaaatacaccagttagaactacagactatgaaaacacaagaaacaggtgatgaaggaaagcctttacatctgctcattggaaaacttcaaaaggcagtgtctgaagaatgttcttattttttacagactttatgcagtgtccttggtgaatattatactcctgctttaaaatgtgaagtaaatgcagaagacaaagagaattctggtgattacatttctgaaaatgaagatccagaattacaagattatagatatgaagttcaagactttcaagaaaatatgcacactcttctcaacaaagtaacagaagaatacaacaaactcttggtacttcaaacacgactaagcaagatctggggacagcagacagatggtatgaaacttgaatttggagaagaaaaccttccaaaagaggaaacagagtttttatcaatccattctcagatgaccaatttggaagacattgatgtcaatcataaaagcaagttatcttctctgcaagatcttgaaaaaactaaacttgaagaacaagttcaagaattagaaagcctcatatcctctttgcagcaacagttgaaagaaactgaacaaaactatgaggcagagatccactgtttacagaagaggcttcaagctgttagtgagtccacggttccgccaagcttacctgttgattcggtggtaattacagaatctgatgcacagagaacaatgtaccctggaagttgtgtgaaaaagaatattgatggtacaatagagttttctggtgaatttggagtgaaagaggaaacaaatatcgttaagttgcttgaaaaacaataccaagaacaattagaagaagaagtagctaaggttattgtgtcaatgagtatagcatttgctcaacaaactgaactgtctagaatatctgggggaaaagaaaatactgcatcatcaaagcaagcacatgctgtgtgtcagcaagaacaacattattttaatgaaatgaaattatcacaggatcaaattggttttcagacttttgagacagtggatgtgaaatttaaagaagaatttaaaccacttagtaaagagttaggagaacatggaaaggaaattttattatcaaatagtgatccccatgatataccagaatcaaaggactgtgtgctgactatttcagaagaaatgttctccaaagataaaacatttatagttagacagtctattcatgatgagatttcagtgtcaagcatggatgcttctagacaactaatgttgaatgaagaacagttggaagatatgagacaggaacttgtacgacaataccaagaacatcaacaggcaacggaattgttaaggcaagcacatatgcggcaaatggagagacagcgagaagaccaggaagctacaagaagagattaagagacttaatagacaattagcccaggtaagggtcttgtagtcccctttctctccccagttatttttttttccaaacaccaacttgaaccagatccccaattaaaacaacagtattttttatgtagccataatttttttttttttttgccgaaatctgaataaactacatatatttagcatcaggaacacactctatactaagacagcagctttagatcttgttagggacacctatctcaaccttggagtgggcattgtctttctgtcattttatttaactcctttttcaagcactggaaaagtggctacacggttttgtttttttcttttaaatcattccattagccatatatagcaaactcactttgacattttggaaataacattgtgctgaggtgctccattatgcagttactatcattcagttttactatcttcatttatagttttgtgagtccaccaattagcatctcgaaggtttacctttatctgtctttaatccatctttttaatcatgaatggaaatcggaagtagtatgcttctgaaactctttccagggaaacatctcttcttgatttgagaaatgcaaatttatttaacattcttatccctttcttgactaaatttaaatacttcttggtatttgggagctggattcttgtcaactgctgtataaaatatactcacaaaaccattgcagaaaagcaagaaatatttatgtagaagttcttatgaaaacttattgaatttaattttgaaaactgaagctaagagagataataaatatctagagataactattaacagtattctttcaaacataaaataataagataattgggagctgagcataaaacattatttggaaaaattaactttgcttttcttcattgcattttgtgaattc

SEQ ID NO: 874 - protein, 1626 aa, Homo sapiens
QIEELSLAFLVRQLAQFRQRKAQSDGQSPSKKQKKKRKTSSSKHDVSAHHDLNIDQSQCNEMYINSSQRVESTVIPESTIMRTLHSGEITSHEQGFSVELESEISTTADDCSSEVNGCSFVMRTGKPTNLLREEEFGVDDSYSEQGAQDSPTHLEMMESELAGKQHEIEELNRELEEMRVTYGTEGLQQLQEFEAAIKQRDGIITQLTANLQQARREKDETMREFLELTEQSQKLQIQFQQLQASETLRNSTHSSTAADLLQAKQQILTHQQQLEEQDHLLEDYQKKKEDFTMQISFLQEKIKVYEMEQDKKVENSNKEEIQEKETIIEELNTKIIEEEKKTLELKDKLTTADKLLGELQEQIVQKNQEIKNMKLELTNSKQKERQSSEEIKQLMGTVEELQKRNHKDSQFETDIVQRMEQETQRKLEQLRAELDEMYGQQIVQMKQELIRQHMAQMEEMKTRHKGEMENALRSYSNITVNEDQIKLMNVAINELNIKLQDTNSQKEKLKEELGLILEEKCALQRQLEDLVEELSFSREQIQRARQTIAEQESKLNEAHKSLSTVEDLKAEIVSASESRKELELKHEAEVTNYKIKLEMLEKEKNAVLDRMAESQEAELERLRTQLLFSHEEELSKLKEDLEIEHRINIEKLKDNLGIHYKQQIDGLQNEMSQKIETMQFEKDNLITKQNQLILEISKLKDLQQSLVNSKSEEMTLQINELQKEIEILRQEEKEKGTLEQEVQELQLKTELLEKQMKEKENDLQEKFAQLEAENSILKDEKKTLEDMLKIHTPVSQEERLIFLDSIKSKSKDSVWEKEIEILIEENEDLKQQCIQLNEEIEKQRNTFSFAEKNFEVNYQELQEEYACLLKVKDDLEDSKNKQELEYKSKLKALNEELHLQRINPTTVKMKSSVFDEDKTFVAETLEMGEVVEKDTTELMEKLEVTKREKLELSQRLSDLSEQLKQKHGEISFLNEEVKSLKQEKEQVSLRCRELEIIINHNRAENVQSCDTQVSSLLDGVVTMTSRGAEGSVSKVNKSFGEESKIMVEDKVSFENMTVGEESKQEQLILDHLPSVTKESSLRATQPSENDKLQKELNVLKSEQNDLRLQMEAQRICLSLVYSTHVDQVREYMENEKDKALCSLKEELIFAQEEKIKELQKIHQLELQTMKTQETGDEGKPLHLLIGKLQKAVSEECSYFLQTLCSVLGEYYTPALKCEVNAEDKENSGDYISENEDPELQDYRYEVQDFQENMHTLLNKVTEEYNKLLVLQTRLSKIWGQQTDGMKLEFGEENLPKEETEFLSIHSQMTNLEDIDVNHKSKLSSLQDLEKTKLEEQVQELESLISSLQQQLKETEQNYEAEIHCLQKRLQAVSESTVPPSLPVDSVVITESDAQRTMYPGSCVKKNIDGTIEFSGEFGVKEETNIVKLLEKQYQEQLEEEVAKVIVSMSIAFAQQTELSRISGGKENTASSKQAHAVCQQEQHYFNEMKLSQDQIGFQTFETVDVKFKEEFKPLSKELGEHGKEILLSNSDPHDIPESKDCVLTISEEMFSKDKTFIVRQSIHDEISVSSMDASRQLMLNEEQLEDMRQELVRQYQEHQQATELLRQAHMRQMERQREDQEATRRD

SEQ ID NO: 875 - DNA, 12045 bp, Homo sapiens
cagattgaagaactctctttagcttttcttgtcagacagcttgcccagtttcgacaaagaaaagctcagtcggatgggcagagtccttccaagaagcagaaaaaaaagagaaaaacgtcaagcagtaaacatgatgtgtcagcacaccatgatttgaatattgatcaatcacagtgtaatgaaatgtacataaatagttctcagagagtagaatcaactgtgattcctgaatctacaataatgagaactctacatagtggagaaataaccagtcatgagcagggcttctctgtggaactggaaagtgaaatttcaaccacagcagatgactgcagttcagaggtaaatggttgcagttttgtgatgagaacaggaaagcctacaaatttattaagggaagaagaatttggtgttgatgattcttattctgaacaaggagcacaagacagtccgactcatctagagatgatggaaagtgagttggctgggaagcagcatgagattgaagagctaaacagagagctggaagaaatgagggttacctatgggactgaaggactgcagcagttacaagaatttgaagctgccattaaacaaagagatggcattataacccagctcactgctaatttacaacaagcaagaagagaaaaggatgagacaatgagagaatttttagagttgacagaacagagtcaaaaattacagattcaatttcagcaattacaggctagtgaaactctgagaaacagcactcatagtagcacagctgcagacttactacaagccaaacaacagatcctcactcatcaacagcagcttgaagaacaagaccacttattagaagattatcagaaaaagaaagaagacttcacaatgcaaattagtttcttgcaagagaaaattaaagtatatgaaatggaacaagataaaaaagtagaaaactcaaataaagaagaaatacaggaaaaggagacaatcattgaagaattaaacacaaaaataatagaagaagaaaagaaaactcttgagctaaaggataaattaacaactgctgataaattactaggagaattacaagaacagattgtgcaaaagaaccaagaaataaaaaacatgaaattagagctgactaattctaagcaaaaagaaagacagtcttctgaagaaataaaacagttaatggggacagtcgaagaacttcagaagagaaatcataaagacagccagttcgaaactgatatagtacaacgaatggaacaagaaacacaaagaaagttagaacaactccgggcagagctggatgagatgtatgggcagcagatagtgcaaatgaaacaagaattaataagacaacacatggcacagatggaggaaatgaaaacacggcataagggagaaatggagaatgctttaaggtcatattcaaatattacagttaatgaagatcagataaagttaatgaatgtggcaataaatgaactgaatataaaattgcaagatactaactctcaaaaggaaaaactcaaggaagaactaggactaattttagaagaaaagtgtgctctacagagacagcttgaagaccttgttgaagaattgagcttttcaagggaacagattcagagagctagacagacaatagctgaacaagaaagtaaacttaatgaagcacataagtcccttagtacagtggaagatttgaaagctgagattgtttctgcatctgaatccagaaaggaactagaattaaaacatgaagcagaagttacaaattacaagataaaacttgaaatgttagaaaaagaaaagaatgctgtgttagacagaatggctgaatcacaagaagctgaattagagaggctgagaacacagcttctatttagtcacgaagaagagctttccaaactgaaggaagatttagaaattgaacatcgaataaatattgaaaaacttaaagataatttaggcattcactataaacagcagatagatggtttacagaatgaaatgagtcaaaagatagaaaccatgcagtttgaaaaggacaatttgataactaagcagaatcaattaattttggaaatttcaaagctaaaagatttacagcagtctcttgtaaattcaaagtcagaagaaatgactcttcaaatcaatgaacttcaaaaagaaattgaaatactcagacaagaagaaaaagaaaagggtacacttgaacaagaagttcaagaattacaacttaaaacagaattgttagaaaaacagatgaaggaaaaagagaatgatcttcaagaaaaatttgcacaacttgaagcagagaatagcattcttaaagatgaaaagaaaacccttgaagacatgttgaaaatacatactcctgttagccaagaagaaagattgattttcttagactccattaagtccaaatccaaagactctgtgtgggaaaaagaaatagaaatacttatagaggaaaatgaggacctcaaacaacaatgtattcagctaaatgaagagattgaaaagcaaaggaacactttttcatttgctgaaaaaaactttgaagttaactatcaagagttacaagaggagtatgcttgccttctcaaagtaaaagatgatttagaagacagtaaaaataaacaggaattagagtataaaagtaaacttaaagcacttaatgaagagcttcatttgcaaagaataaatccaactacagtgaaaatgaaaagttctgtctttgatgaagacaaaacttttgtagcagaaacattggaaatgggtgaggttgttgaaaaggatacaacagaactcatggaaaaacttgaggtaaccaagcgagagaaattagagctgtcacagagactgtctgatctttctgaacaattgaaacagaaacatggtgagattagttttctaaatgaagaagttaaatctttaaagcaagagaaagaacaagtttcattgagatgtagagagctagaaatcattattaaccacaacagggcagaaaatgtacagtcatgtgatactcaagtaagctctttattagatggagttgtgaccatgacaagcaggggtgctgaaggatcagtttctaaagtaaataaaagttttggtgaagaatcaaaaataatggtggaagataaagtttcttttgaaaatatgactgttggagaagaaagtaagcaagaacagttgattttggatcacttaccatctgtaacaaaggaatcatcacttagagcaactcaaccaagtgaaaatgataaacttcagaaagaactcaatgtacttaaatcagaacagaatgatttaaggctacagatggaagcccaacgcatttgcctctctctggtttattcaactcatgtggatcaggttcgtgaatatatggaaaatgaaaaagataaagctctttgcagtcttaaagaagagcttatttttgctcaagaggaaaagatcaaggaacttcagaaaatacaccagttagaactacagactatgaaaacacaagaaacaggtgatgaaggaaagcctttacatctgctcattggaaaacttcaaaaggcagtgtctgaagaatgttcttattttttacagactttatgcagtgtccttggtgaatattatactcctgctttaaaatgtgaagtaaatgcagaagacaaagagaattctggtgattacatttctgaaaatgaagatccagaattacaagattatagatatgaagttcaagactttcaagaaaatatgcacactcttctcaacaaagtaacagaagaatacaacaaactcttggtacttcaaacacgactaagcaagatctggggacagcagacagatggtatgaaacttgaatttggagaagaaaaccttccaaaagaggaaacagagtttttatcaatccattctcagatgaccaatttggaagacattgatgtcaatcataaaagcaagttatcttctctgcaagatcttgaaaaaactaaacttgaagaacaagttcaagaattagaaagcctcatatcctctttgcagcaacagttgaaagaaactgaacaaaactatgaggcagagatccactgtttacagaagaggcttcaagctgttagtgagtccacggttccgccaagcttacctgttgattcggtggtaattacagaatctgatgcacagagaacaatgtaccctggaagttgtgtgaaaaagaatattgatggtacaatagagttttctggtgaatttggagtgaaagaggaaacaaatatcgttaagttgcttgaaaaacaataccaagaacaattagaagaagaagtagctaaggttattgtgtcaatgagtatagcatttgctcaacaaactgaactgtctagaatatctgggggaaaagaaaatactgcatcatcaaagcaagcacatgctgtgtgtcagcaagaacaacattattttaatgaaatgaaattatcacaggatcaaattggttttcagacttttgagacagtggatgtgaaatttaaagaagaatttaaaccacttagtaaagagttaggagaacatggaaaggaaattttattatcaaatagtgatccccatgatataccagaatcaaaggactgtgtgctgactatttcagaagaaatgttctccaaagataaaacatttatagttagacagtctattcatgatgagatttcagtgtcaagcatggatgcttctagacaactaatgttgaatgaagaacagttggaagatatgagacaggaacttgtacgacaataccaagaacatcaacaggcaacggaattgttaaggcaagcacatatgcggcaaatggagagacagcgagaagaccaggaacagctacaagaagagattaagagacttaatagacaattagcccagagatcctccatagataatgaaaacctggtttcagagagagagagggtgcttttagaggagctggaagcactaaagcagctgtctttagctggaagagagaagctgtgttgtgagctgcgcaacagcagtacgcaaacacagaatggaaatgaaaaccaaggagaagttgaagaacaaacatttaaagaaaaggaattagacagaaaacctgaagatgtgcctcctgagattttgtctaatgaaaggtatgcactccagaaagctaataatagacttttgaagatcctcttagaagttgtaaagacaacagcagctgttgaagaaacaattggtcgccatgtccttgggattctagatagatctagtaaaagccagtcatctgccagcctaatttggaggtcagaagcagaggcatctgtaaagtcatgtgtccatgaggaacatacaagagttacagatgaatccattccctcttattctggaagtgatatgccaagaaatgacattaacatgtggtcaaaagtaactgaggaaggaacagagctgtcacaacgacttgtgaggagtggttttgctggaactgaaatagaccctgaaaatgaagaacttatgctgaacattagctctcgactacaagcagcagttgaaaaactcctagaagccataagtgaaactagcagtcagcttgaacatgcgaaagtgacacagacagagttgatgcgtgagtcatttagacagaaacaagaagcaacagagtcccttaagtgccaagaggaacttcgagagcgccttcatgaggagtccagggccagagaacagctagctgtggagctcagtaaggctgagggcgtcattgatggctatgcagatgaaaaaactctttttgaaaggcaaattcaggaaaaaactgatataatagatcgtcttgagcaggagttgttatgtgcaagtaacaggttgcaagaattggaggcagagcaacagcagatccaagaagaaagagaattactgtccagacaaaaggaagctatgaaagcagaggcaggcccagttgaacaacaattactacaggagacagaaaaattaatgaaggaaaaactagaagtacaatgtcaagctgaaaaagtacgtgatgaccttcaaaaacaagtgaaagctctagaaatagatgtggaagaacaagtcagtaggtttatagagctggaacaagaaaaaaatactgaactaatggatttaagacagcaaaaccaagcattggaaaagcagttagaaaaaatgagaaaatttttagatgagcaagccattgacagagaacatgagagagatgtattccaacaggaaatacagaaactagaacagcaacttaaggttgttcctcgattccagcctatcagtgaacatcaaactagagaggttgaacagttagcaaatcatctgaaagaaaaaacagacaaatgcagtgagcttttgctctctaaagagcagcttcaaagggatatacaagaaaggaatgaagaaatagagaaactggagttcagagtaagagaactggagcaggcgcttcttgtgagtgcagatacttttcaaaaggtagaggaccgaaaacactttggagctgtagaagctaaaccagaattgtccctagaagtacaattgcaggctgaacgagatgccatagacagaaaggaaaaagagattacaaacttagaagagcaattagaacagtttagagaagaactggaaaataagaatgaagaagttcaacaattacatatgcaattagaaatacagaaaaaggaatctactacccgcctacaagaacttgaacaggaaaacaaattatttaaggatgacatggagaaactgggacttgccataaaggaatctgatgccatgtctactcaagaccaacatgtgctatttgggaaatttgctcaaataatacaggaaaaagaggtagaaattgaccaattaaatgaacaagttacgaaactccagcagcaacttaaaattacaacagataacaaggttattgaagaaaaaaatgaactgataagggatcttgaaacccaaatagaatgtttgatgagtgatcaagaatgtgtgaagagaaatagagaagaagaaatagagcagctcaatgaagtgattgaaaaacttcaacaggaattggcaaatattggacagaagacatcaatgaatgctcattccctctcagaagaagcagacagtttaaaacatcaattggatgtggttatagctgaaaagctggccttggaacagcaagtagaaaccgctaatgaagaaatgaccttcatgaaaaatgtacttaaagaaaccaattttaaaatgaatcagctaacacaggaattattcagcttaaagagagaacgtgaaagtgtggaaaagattcaaagcataccagagaatagtgttaacgtggctatagatcatctgagcaaagacaaacctgaactagaagtagtccttacagaggatgctcttaaatccctagaaaatcagacatacttcaaatcttttgaagaaaatggcaaaggttccataattaatttggaaacaaggttgctacaacttgagagcactgttagtgcaaaggacttagaacttacccagtgttataaacaaataaaagacatgcaagaacaaggccagtttgaaacagaaatgcttcaaaagaagattgtaaacctacagaaaatagttgaagaaaaagtggctgctgctcttgtcagtcaaatccaacttgaggcagttcaggaatatgcaaaattctgtcaagataatcaaacaatttcatcagaacctgaaagaacaaatattcagaatttaaatcaactaagagaagatgagttggggtcagatatatcagcattaaccttgagaatatcagaattagaaagccaggttgttgaaatgcatactagtttgattttagaaaaagaacaagtagaaattgcagaaaaaaatgttttagaaaaagaaaagaagctgctagaactacagaagctattggagggcaatgagaaaaaacagagagagaaagaaaagaaaagaagccctcaagatgttgaagttctcaagacaactactgagctatttcatagcaatgaagaaagtggattttttaatgaactcgaggctcttagagctgaatcagtggctaccaaagcagaacttgccagttataaagaaaaggctgaaaaacttcaagaagagcttttggtaaaagaaacaaatatgacatctcttcagaaagacttaagccaagttagggatcacctcgcagaggcaaaagagaaattgtccattttagaaaaagaagatgagactgaggtacaagaaagcaaaaaggcctgcatgtttgagccacttcctataaaactgagtaagagcattgcatcccagacagatgggactctgaagatcagtagcagcaatcagactccacaaattcttgttaaaaatgcaggaatacaaattaatttacagagtgaatgttcctcagaagaagttactgaaataatcagtcagtttactgaaaaaattgagaagatgcaagaactacatgctgctgaaattttggacatggaatccagacatatttcagaaactgaaaccttaaagagggaacactatgttgccgttcagttactgaaagaggaatgtggtaccttgaaggcagtgatacagtgtctgagaagtaaagagggattactgagagctgtccataatgaaggcatgcaggtgctttctctcactgagtctccctatagtgatggagaggaccattctattcagcaggtttcagaaccttggctagaagagagaaaagcttacatcaatacaatctcatctctaaaggatttaattacaaagatgcaactgcaaagagaagccgaggtttatgatagttctcaatctcatgagagcttctcagactggcgaggtgaactactgcttgcccttcaacaagttttcttagaagagcgtagtgttttactagcagcatttcggacggagctgacagctctaggtactacagatgcagttggtttactaaactgtttggaacagagaatacaagaacagggtgttgaatatcaagcagctatggaatgcctccagaaagcagatagaaggagtttgttatctgaaattcaggcactgcatgcacaaatgaatggtaggaaaattactctgaaaagagaacaagagagtgagaaaccaagccaagaactcttggaatataatatacagcagaagcagtctcaaatgctggagatgcaagtggagctcagcagtatgaaagacagagcaacggaactgcaggagcagctgagttctgagaaaatggtggttgctgaactgaagagtgagcttgcacaaactaaattggaactagaaacaacactcaaggcacagcataaacacctaaaagaattggaggctttcaggttggaagttaaagataagacagatgaagtacatttgcttaatgacacattagcaagtgaacagaaaaaatcaagagagctccagtgggctttggagaaagagaaagccaagttgggacgcagtgaagaacgggataaagaagaacttgaggatctgaagttttcacttgagagtcagaaacaaaggaatcttcagctaaatctacttttggaacaacagaaacaactactgaacgaatcccagcaaaaaatagaatcacagagaatgctatatgatgcccagttgtcagaagaacaaggtcgaaacttagagcttcaggtacttcttgaatctgagaaagttcgaattcgggaaatgagtagtaccctagatagggagcgggaattgcacgcacagctgcagagcagtgatggtactggacagtctcggccacccttgccctcagaggacctactgaaagagctgcagaaacagctagaggaaaaacacagtcgcatagtagaattgttaaatgagactgaaaaatataaactggattctttgcaaacacgacagcaaatggaaaaagataggcaggttcacaggaaaacactgcagacagaacaggaggccaacactgagggacagaaaaaaatgcatgagctccagtccaaagtggaagatcttcagcgccagctggaagagaaaagacaacaagtttataagttagaccttgaaggacagcgactacaaggaatcatgcaggaattccagaagcaagaactagaacgagaagaaaaacgagaaagtagaagaattctgtatcagaaccttaatgagccaaccacgtggagcttaaccagtgatagaactagaaattgggttcttcaacagaaaatagaaggagaaacaaaagaatcaaactacgctaaattgattgaaatgaatggaggaggaaccggctgtaatcatgaattagaaatgatcagacaaaagcttcaatgtgtagcttcaaaactacaggttctaccccagaaagcctctgagagactacagtttgaaacagcagatgatgaagatttcatttgggttcaggaaaatattgatgaaattattttacaactacagaaattaactggccagcaaggtgaagagcccagcttggtgtccccaagtacttcttgtggctcattgactgaaagactactgagacaaaatgctgagctgacagggcatatcagtcaactgactgaagagaagaatgacttaaggaacatggttatgaagctggaagagcagatcaggtggtatcgacagacaggagctggtagagataattcttccaggttttcattgaatggtggtgccaacattgaagccatcattgcctctgaaaaagaagtatggaacagagaaaaattgactctccagaaatctttgaaaagggcagaggctgaagtatacaaactgaaagctgaactaagaaatgactctttacttcaaactctgagccctgattctgaacatgtcactttaaagagaatttatggtaaatacttgagggcagaaagttttcgaaaggctctcatttaccagaagaaatacctgctgctgttactgggtgggttccaggaatgtgaagatgccaccttggccctgcttgcccggatgggggggcagccagctttcacggatctagaggtgatcaccaatcgcccaaagggcttcaccaggtttcggtcggccgtcagagtatccattgcaatttccagaatgaaatttttggttcgacggtggcatcgagtcacaggttctgtttccatcaatattaacagagatggctttggactgaatcaaggtgcagaaaagactgactcattttatcattcttctggtgggctggagttatatggagaaccaagacatactacgtatcgctcaagatcagatctggactatattaggtcccctttaccatttcagaataggtacccaggcactccagctgatttcaatcctggttctttagcatgttctcagcttcagaattacgatcctgacagagccctaacagattatatcactcggctagaggcactgcaaagacgacttggaactatacagtcaggttcaactactcaatttcatgctggcatgagaagataatcctttgaaacatcattaattgaagtgattttaaatagatttccttttgtaaatcaatggttcttttgtgcttttgtattgtgaatattcaatgggaccaatatgaacacagcttatgattgtatacaaatcccttgccagcacatgaaaacaaactggaatttgtatatataagcattgtgtatgtattcatgcacaataattattgaattacctgtatatttgtggaatgctaatttaaaacattaaattataaaccttgtgtatttatcaaatgggtgaaaagattaaacttttacgcattacaatactgctgaatgtgtagctcgaggtgtcctgcacttttcttataaggctactgaagttacatgttttgcctaatatattctactggtgatgaagacagataatatcacttgtagagacctatttttgtataatggtagaagttttgaattttatggggtattttgtcaagtactgaaataaaaatgacttcaccattttcaccacact

SEQ ID NO: 876 - protein, 3842 aa, Homo sapiens
QIEELSLAFLVRQLAQFRQRKAQSDGQSPSKKQKKKRKTSSSKHDVSAHHDLNIDQSQCNEMYINSSQRVESTVIPESTIMRTLHSGEITSHEQGFSVELESEISTTADDCSSEVNGCSFVMRTGKPTNLLREEEFGVDDSYSEQGAQDSPTHLEMMESELAGKQHEIEELNRELEEMRVTYGTEGLQQLQEFEAAIKQRDGIITQLTANLQQARREKDETMREFLELTEQSQKLQIQFQQLQASETLRNSTHSSTAADLLQAKQQILTHQQQLEEQDHLLEDYQKKKEDFTMQISFLQEKIKVYEMEQDKKVENSNKEEIQEKETIIEELNTKIIEEEKKTLELKDKLTTADKLLGELQEQIVQKNQEIKNMKLELTNSKQKERQSSEEIKQLMGTVEELQKRNHKDSQFETDIVQRMEQETQRKLEQLRAELDEMYGQQIVQMKQELIRQHMAQMEEMKTRHKGEMENALRSYSNITVNEDQIKLMNVAINELNIKLQDTNSQKEKLKEELGLILEEKCALQRQLEDLVEELSFSREQIQRARQTIAEQESKLNEAHKSLSTVEDLKAEIVSASESRKELELKHEAEVTNYKIKLEMLEKEKNAVLDRMAESQEAELERLRTQLLFSHEEELSKLKEDLEIEHRINIEKLKDNLGIHYKQQIDGLQNEMSQKIETMQFEKDNLITKQNQLILEISKLKDLQQSLVNSKSEEMTLQINELQKEIEILRQEEKEKGTLEQEVQELQLKTELLEKQMKEKENDLQEKFAQLEAENSILKDEKKTLEDMLKIHTPVSQEERLIFLDSIKSKSKDSVWEKEIEILIEENEDLKQQCIQLNEEIEKQRNTFSFAEKNFEVNYQELQEEYACLLKVKDDLEDSKNKQELEYKSKLKALNEELHLQRINPTTVKMKSSVFDEDKTFVAETLEMGEVVEKDTTELMEKLEVTKREKLELSQRLSDLSEQLKQKHGEISFLNEEVKSLKQEKEQVSLRCRELEIIINHNRAENVQSCDTQVSSLLDGVVTMTSRGAEGSVSKVNKSFGEESKIMVEDKVSFENMTVGEESKQEQLILDHLPSVTKESSLRATQPSENDKLQKELNVLKSEQNDLRLQMEAQRICLSLVYSTHVDQVREYMENEKDKALCSLKEELIFAQEEKIKELQKIHQLELQTMKTQETGDEGKPLHLLIGKLQKAVSEECSYFLQTLCSVLGEYYTPALKCEVNAEDKENSGDYISENEDPELQDYRYEVQDFQENMHTLLNKVTEEYNKLLVLQTRLSKIWGQQTDGMKLEFGEENLPKEETEFLSIHSQMTNLEDIDVNHKSKLSSLQDLEKTKLEEQVQELESLISSLQQQLKETEQNYEAEIHCLQKRLQAVSESTVPPSLPVDSVVITESDAQRTMYPGSCVKKNIDGTIEFSGEFGVKEETNIVKLLEKQYQEQLEEEVAKVIVSMSIAFAQQTELSRISGGKENTASSKQAHAVCQQEQHYFNEMKLSQDQIGFQTFETVDVKFKEEFKPLSKELGEHGKEILLSNSDPHDIPESKDCVLTISEEMFSKDKTFIVRQSIHDEISVSSMDASRQLMLNEEQLEDMRQELVRQYQEHQQATELLRQAHMRQMERQREDQEQLQEEIKRLNRQLAQRSSIDNENLVSERERVLLEELEALKQLSLAGREKLCCELRNSSTQTQNGNENQGEVEEQTFKEKELDRKPEDVPPEILSNERYALQKANNRLLKILLEVVKTTAAVEETIGRHVLGILDRSSKSQSSASLIWRSEAEASVKSCVHEEHTRVTDESIPSYSGSDMPRNDINMWSKVTEEGTELSQRLVRSGFAGTEIDPENEELMLNISSRLQAAVEKLLEAISETSSQLEHAKVTQTELMRESFRQKQEATESLKCQEELRERLHEESRAREQLAVELSKAEGVIDGYADEKTLFERQIQEKTDIIDRLEQELLCASNRLQELEAEQQQIQEERELLSRQKEAMKAEAGPVEQQLLQETEKLMKEKLEVQCQAEKVRDDLQKQVKALEIDVEEQVSRFIELEQEKNTELMDLRQQNQALEKQLEKMRKFLDEQAIDREHERDVFQQEIQKLEQQLKVVPRFQPISEHQTREVEQLANHLKEKTDKCSELLLSKEQLQRDIQERNEEIEKLEFRVRELEQALLVSADTFQKVEDRKHFGAVEAKPELSLEVQLQAERDAIDRKEKEITNLEEQLEQFREELENKNEEVQQLHMQLEIQKKESTTRLQELEQENKLFKDDMEKLGLAIKESDAMSTQDQHVLFGKFAQIIQEKEVEIDQLNEQVTKLQQQLKITTDNKVIEEKNELIRDLETQIECLMSDQECVKRNREEEIEQLNEVIEKLQQELANIGQKTSMNAHSLSEEADSLKHQLDVVIAEKLALEQQVETANEEMTFMKNVLKETNFKMNQLTQELFSLKRERESVEKIQSIPENSVNVAIDHLSKDKPELEVVLTEDALKSLENQTYFKSFEENGKGSIINLETRLLQLESTVSAKDLELTQCYKQIKDMQEQGQFETEMLQKKIVNLQKIVEEKVAAALVSQIQLEAVQEYAKFCQDNQTISSEPERTNIQNLNQLREDELGSDISALTLRISELESQVVEMHTSLILEKEQVEIAEKNVLEKEKKLLELQKLLEGNEKKQREKEKKRSPQDVEVLKTTTELFHSNEESGFFNELEALRAESVATKAELASYKEKAEKLQEELLVKETNMTSLQKDLSQVRDHLAEAKEKLSILEKEDETEVQESKKACMFEPLPIKLSKSIASQTDGTLKISSSNQTPQILVKNAGIQINLQSECSSEEVTEIISQFTEKIEKMQELHAAEILDMESRHISETETLKREHYVAVQLLKEECGTLKAVIQCLRSKEGLLRAVHNEGMQVLSLTESPYSDGEDHSIQQVSEPWLEERKAYINTISSLKDLITKMQLQREAEVYDSSQSHESFSDWRGELLLALQQVFLEERSVLLAAFRTELTALGTTDAVGLLNCLEQRIQEQGVEYQAAMECLQKADRRSLLSEIQALHAQMNGRKITLKREQESEKPSQELLEYNIQQKQSQMLEMQVELSSMKDRATELQEQLSSEKMVVAELKSELAQTKLELETTLKAQHKHLKELEAFRLEVKDKTDEVHLLNDTLASEQKKSRELQWALEKEKAKLGRSEERDKEELEDLKFSLESQKQRNLQLNLLLEQQKQLLNESQQKIESQRMLYDAQLSEEQGRNLELQVLLESEKVRIREMSSTLDRERELHAQLQSSDGTGQSRPPLPSEDLLKELQKQLEEKHSRIVELLNETEKYKLDSLQTRQQMEKDRQVHRKTLQTEQEANTEGQKKMHELQSKVEDLQRQLEEKRQQVYKLDLEGQRLQGIMQEFQKQELEREEKRESRRILYQNLNEPTTWSLTSDRTRNWVLQQKIEGETKESNYAKLIEMNGGGTGCNHELEMIRQKLQCVASKLQVLPQKASERLQFETADDEDFIWVQENIDEIILQLQKLTGQQGEEPSLVSPSTSCGSLTERLLRQNAELTGHISQLTEEKNDLRNMVMKLEEQIRWYRQTGAGRDNSSRFSLNGGANIEAIIASEKEVWNREKLTLQKSLKRAEAEVYKLKAELRNDSLLQTLSPDSEHVTLKRIYGKYLRAESFRKALIYQKKYLLLLLGGFQECEDATLALLARMGGQPAFTDLEVITNRPKGFTRFRSAVRVSIAISRMKFLVRRWHRVTGSVSININRDGFGLNQGAEKTDSFYHSSGGLELYGEPRHTTYRSRSDLDYIRSPLPFQNRYPGTPADFNPGSLACSQLQNYDPDRALTDYITRLEALQRRLGTIQSGSTTQFHAGMRR

SEQ ID NO: 877 - DNA, 1395 bp, Homo sapiens
ccttttgaatagagtgaagcagcaagagcaagagaaataatgttacaactgcatttctcaagactgctgctatggagatttcaaacttgaccttccctgccaggttctgctttgaaggcttacttattactacagacatcgctgatattaaaagcagttttattgctcgtctaattagatgtttatatttttattcttctcttcaaggacttaattatgctagtttaaaaggtgtttttgtttgcttgcttttatttttgttttttgattttttttggtttttgttttggtttgggtttttttgagggggcatcaagattgatagagacctaagtttttttagatttgtagtttttttcctggactttccccttccttttattgtgcagttgtatgaattaattttataacatttatttgatagtgctaaaaaagaaactttttatactgctatggtagatcttgataaactaaaaagaactttttaatgtattagaaaattgataaagcaaattaggaatctcggcagctgtatcttctgggatggattcttatagcacctatttggcaactgtcaaagtcagtggctcgtggttagaagagcaagatgaagacatttatgaggttgaatctcgcgtgcctttaccacatccttttcctctttgtgaacatttggatgaaaataactcagtaattgttaatacttctattttccattttattcataaaagaaacgggcatatattaaagcttatttctaaaatttcactgcctacccctccttattcacttgaacatgcgaaagtgacacagacagagttgatgcgtgagtcatttagacagaaacaagaagcaacagagtcccttaagtgccaagaggaacttcgagagcgccttcatgaggagtccagggccagagaacagctagctgtggagctcagtaaggctgagggcgtcattgatggctatgcagatgaaaaaactctttttgaaaggcaaattcaggaaaaaactgatataatagatcgtcttgagcaggagttgttatgtgcaagtaacaggttgcaagaattggaggcagagcaacagcagatccaagaagaaagagaattactgtccagacaaaaggaagctatgaaagcagaggcaggcccagttgaacaacaattactacaggagacagaaaaattaatgaaggaaaaactagaagtacaatgtcaagctgaaaaagtacgtgatgaccttcaaaaacaagtgaaagctctagaaatagatgtggaagaacaagtcagtaggtttatagagctggaacaagaaaaaaatactgaactaatggatttaagacagcaaaaccaagcattggaaaagcagttagaaaaaatgagaaaattttta

SEQ ID NO: 878 - protein, 284 aa, Homo sapiens
MDSYSTYLATVKVSGSWLEEQDEDIYEVESRVPLPHPFPLCEHLDENNSVIVNTSIFHFIHKRNGHILKLISKISLPTPPYSLEHAKVTQTELMRESFRQKQEATESLKCQEELRERLHEESRAREQLAVELSKAEGVIDGYADEKTLFERQIQEKTDIIDRLEQELLCASNRLQELEAEQQQIQEERELLSRQKEAMKAEAGPVEQQLLQETEKLMKEKLEVQCQAEKVRDDLQKQVKALEIDVEEQVSRFIELEQEKNTELMDLRQQNQALEKQLEKMRKFL

SEQ ID NO: 879 - DNA, 1580 bp, Homo sapiens
acagtagctcacacctgtaatcccagcactttggaaggccgaggtgggcggatcacctgagctcaggagtttgagaccagcctgtctctactaacaatataaaaattagctgggagtcacggtgggcgcctgtaatcccagctactcgggaggctgaggcaggagaattgcttgaacccaggagacagaggttgtagtgagctgagatcgcaccactgcactctagccttggcaacagtgcaagactgtctcaaaaacagcaacagagagcaggacgtgagacttctacctgctcactcagaatcatttctgcaccaaccatggccacgtttgtggagctcagtaccaaagccaagatgcccattgtgggcctgggcacttggaagtctcctcttggcaaagtgaaagaagcagtgaaggtggccattgatgcaggatatcggcacattgactgtgcctatgtctatcagaatgaacatgaagtgggggaagccatccaagagaagatccaagagaaggctgtgaagcgggaggacctgttcatcgtcagcaagttgtggcccactttctttgagagaccccttgtgaggaaagcctttgagaagaccctcaaggacctgaagctgagctatctggacgtctatcttattcactggccacagggattcaagtctggggatgaccttttccccaaagatgataaaggtaatgccatcggtggaaaagcaacgttcttggatgcctgggaggccatggaggagctggtggatgaggggctggtgaaagcccttggggtctccaatttcagccacttccagatcgagaagctcttgaacaaacctggactgaaatataaaccagtgactaaccaggttgagtgtcacccatacctcacacaggagaaactgatccagtactgccactccaagggcatcaccgttacggcctacagccccctgggctctccggatagaccttgggccaagccagaagacccttccctgctggaggatcccaagattaaggagattgctgcaaagcacaaaaaaaccgcagcccaggttctgatccgtttccatatccagaggaatgtgattgtcatccccaagtctgtgacaccagcacgcattgttgagaacattcaggtctttgactttaaattgagtgatgaggagatggcaaccatactcagcttcaacagaaactggagggcctgtaacgtgttgcaatcctctcatttggaagactatcccttcaatgcagaatattgaggttgaatctcctggtgagattatacaggagattctctttcttcgctgaagtgtgactacctccactcatgtcccattttagccaagcttatttaagatcacagtgaacttagtcctgttatagacgagaatcgaggtgctgttttagacatttatttctgtatgttcaactaggatcagaatatcacagaaaagcatggcttgaataaggaaatgacaattttttccacttatctgatcagaacaaatgtttattaagcatcagaaactctgccaacactgaggatgtaaagatcaataaaaaaaata

SEQ ID NO: 880 - protein, 316 aa, Homo sapiens
MATFVELSTKAKMPIVGLGTWKSPLGKVKEAVKVAIDAGYRHIDCAYVYQNEHEVGEAIQEKIQEKAVKREDLFIVSKLWPTFFERPLVRKAFEKTLKDLKLSYLDVYLIHWPQGFKSGDDLFPKDDKGNAIGGKATFLDAWEAMEELVDEGLVKALGVSNFSHFQIEKLLNKPGLKYKPVTNQVECHPYLTQEKLIQYCHSKGITVTAYSPLGSPDRPWAKPEDPSLLEDPKIKEIAAKHKKTAAQVLIRFHIQRNVIVIPKSVTPARIVENIQVFDFKLSDEEMATILSFNRNWRACNVLQSSHLEDYPFNAEY

SEQ ID NO: 881 - DNA, 1966 bp, Homo sapiens
agtaaccccgagtctgcggaagtggtgacccgtgggacgcggctgagacaggagactgaaaggaaccataatttgtgacatcagttgttttctttgataagcagctatttatgattctggaagattaaggcagataggaaaccccatctgagattttaataaatccctcaaacaataaaccacatcatggacatacagctggaccctgccagagatgacctgcctctcatggccaacaccagccacatacttgtgaagcactatgtactggatttggatgtggattttgaaagtcaagtcattgaggggaccatagtgcttttcctcgaggatggaaacagattcaagaaacagaatagctctattgaggaagcctgccaatcagaatcaaacaaagcctgcaaatttgggatgcctgaaccctgccatattcccgtgacaaatgcaaggaccttctcatctgaaatggaatataatgattttgcaatctgtagtaaaggtgaaaaagatacttctgataaagatggtaaccatgacaaccaggaacatgcttctgggatttctagctcaaagtactgctgtgacacagggaatcatgggagtgaggattttttgctagtgttggactgctgtgatttatctgtgttaaaagtcgaggaggtggatgttgctgctgtgccaggtctggaaaaatttacaaggtctcctgagctcacggttgtttctgaggagttcaggaatcagattgtacgtgaacttgtgactttgcctgcaaatcgttggagggagcagttagactattacgctcgctgcagccaggctcctggctgtggggaactcctctttgacactgacacttggagcttgcagataaggaagacaggggctcagacagctactgactttcctcatgctatcaggatatggtacaaaactaaacctgaagggcgatcggttacatggacctcagaccagagtggcaggccatgtgtttatactgtgggatctcccataaacaacagggccctttttccatgccaggagccacccgttgccatgtcaacatggcaggctacagttcgagcagctgcatcttttgttgttttaatgagtggggaaaattctgccaaaccaacgcagctttgggaagagtgctcaagctggtattactatgtaactatgccaatgccagcctccaccttcacaattgcagtgggatgctggacagaaatgaagatggagacatggtcatcaaatgatttggcaacagagagacccttctcaccttctgaggccaacttcaggcatgttggtgtttgcagtcacatggaatacccctgccgcttccagaatgcttctgccaccacccaggagatcattcctcatcgggtctttgcccctgtgtgcctcacgggtgcctgccaagagacccttctgcggctgatccctccttgcctctcagcagcacattctgttctgggagcacacccgttctctcggctggatgttctcatcgtccctgccaactttccaagtctggggatggccagcccacacatcatgttcctctctcagagcatcttgacaggagggaaccatctctgtgggacccgcctctgccatgaaattgcccatgcctggtttggcctagccatcggggcccgagactggacggaggagtggctgagtgaaggcttcgccactcacttggaggatgtgttttgggccacagcacagcagctggccccctatgaggcccgggagcagcaggagctgagggcttgtctgcgctggcgtcgcctccaggacgagatgcaatgctcccccgaggagatgcaggtgttaaggtttccacatgttggcggatgcagtggaagcttctcttgagatctttgccacactgttcaacatgtttgaccactctgtcctaaaaacgctttcttcttaaagcactttctcctcctgg

SEQ ID NO: 882 - protein, 566 aa, Homo sapiens
MDIQLDPARDDLPLMANTSHILVKHYVLDLDVDFESQVIEGTIVLFLEDGNRFKKQNSSIEEACQSESNKACKFGMPEPCHIPVTNARTFSSEMEYNDFAICSKGEKDTSDKDGNHDNQEHASGISSSKYCCDTGNHGSEDFLLVLDCCDLSVLKVEEVDVAAVPGLEKFTRSPELTVVSEEFRNQIVRELVTLPANRWREQLDYYARCSQAPGCGELLFDTDTWSLQIRKTGAQTATDFPHAIRIWYKTKPEGRSVTWTSDQSGRPCVYTVGSPINNRALFPCQEPPVAMSTWQATVRAAASFVVLMSGENSAKPTQLWEECSSWYYYVTMPMPASTFTIAVGCWTEMKMETWSSNDLATERPFSPSEANFRHVGVCSHMEYPCRFQNASATTQEIIPHRVFAPVCLTGACQETLLRLIPPCLSAAHSVLGAHPFSRLDVLIVPANFPSLGMASPHIMFLSQSILTGGNHLCGTRLCHEIAHAWFGLAIGARDWTEEWLSEGFATHLEDVFWATAQQLAPYEAREQQELRACLRWRRLQDEMQCSPEEMQVLRFPHVGGCSGSFS

SEQ ID NO: 883 - DNA, 2819 bp, Homo sapiens
gtctgcggaagtggtgacccgtgggacgcggctgagacaggagactgaaaggaaccataatttgtgacatcagttgttttctttgataagcagctatttatgattctggaagattaaggcagataggaaaccccatctgagattttaataaatccctcaaacaataaaccacatcatggacatacagctggaccctgccagagatgacctgcctctcatggccaacaccagccacatacttgtgaagcactatgtactggatttggatgtggattttgaaagtcaagtcattgaggggaccatagtgcttttcctcgaggatggaaacagattcaagaaacagaatagctctattgaggaagcctgccaatcagaatcaaacaaagcctgcaaatttgggatgcctgaaccctgccatattcccgtgacaaatgcaaggaccttctcatctgaaatggaatataatgattttgcaatctgtagtaaaggtgaaaaagatacttctgataaagatggtaaccatgacaaccaggaacatgcttctgggatttctagctcaaagtactgctgtgacacagggaatcatgggagtgaggattttttgctagtgttggactgctgtgatttatctgtgttaaaagtcgaggaggtggatgttgctgctgtgccaggtctggaaaaatttacaaggtctcctgagctcacggttgtttctgaggagttcaggaatcagattgtacgtgaacttgtgactttgcctgcaaatcgttggagggagcagttagactattacgctcgctgcagccaggctcctggctgtggggaactcctctttgacactgacacttggagcttgcagataaggaagacaggggctcagacagctactgactttcctcatgctatcaggatatggtacaaaactaaacctgaagggcgatcggttacatggacctcagaccagagtggcaggccatgtgtttatactgtgggatctcccataaacaacagggccctttttccatgccaggagccacccgttgccatgtcaacatggcaggctacagttcgagcagctgcatcttttgttgttttaatgagtggggaaaattctgccaaaccaacgcagctttgggaagagtgctcaagctggtattactatgtaactatgccaatgccagcctccaccttcacaattgcagtgggatgctggacagaaatgaagatggagacatggtcatcaaatgatttggcaacagagagacccttctcaccttctgaggccaacttcaggcatgttggtgtttgcagtcacatggaatacccctgccgcttccagaatgcttctgccaccacccaggagatcattcctcatcgggtctttgcccctgtgtgcctcacgggtgcctgccaagagacccttctgcggctgatccctccttgcctctcagcagcacattctgttctgggagcacacccgttctctcggctggatgttctcatcgtccctgccaactttccaagtctggggatggccagacccagtaaagacaaaactggccacacaagtgactcgggagcatctgttatcaagcatggacttaatccggagaagatcttcatgcaggtgcattatttaaagggctacttccttcttcggtttcttgccaaaagacttggagatgaaacctatttttcatttttaagaaaatttgtgcacacatttcatggacagctgattctttcccaggatttccttcaaatgctactggagaacattccagaagaaaaaaggcttgagctgtctgttgaaaacatctaccaagactggcttgagagttccggaataccaaagccgctgcagagggagcgtcgcgccggggcggagtgcgggcttgcgcggcaagtgcgcgccgaggtcacgaaatggattggagtgaaccggagaccccgaaaacggaagcgcagggagaaggaagaggtgtttgaaaagcttcttccagaccagctggtcttgcttctggagcatctcttggagcagaagactctgagcccccgaactctgcaaagcctccagaggacataccacctccaggatcaggatgcagaggttcgccatcggtggtgtgaactcattgttaagcacaagttcacgaaagcctacaaaagtgtggagaggttccttcaggaggatcaggccatgggtgtgtacctctacggggagctgatggtgagtgaggacgccagacagcagcagctcgcccgtaggtgcttcgagcggaccaaggagcagatggataggtcctcagcccaggtggtggccgaaatgttattttaacgaggaaagaccacagcaagattctttcattcgtctcctcctagcctgggggaccaggctcgaactgaccctggacatcaaaggagggattatgtggctgctaaagccatcggcccacagccctgttcacatcttggtgcttctctttcccagaggctggtcccagccaggcacacacaaaaggcagattctcgtaaacgcagcctccctccctggaggctgcctcctgccctggatctggagtggagctgctctgagattttgagttcttctgcagagatgattaaatatatccaagagacattggaaaacctgctgaacattttacattggtctgctcagcacatggctggatgcggatatttctataattccagaaagtcacacagctcctctgtatgagaccagtgggcgccatttaaaagaacaggatgagaatctaagatatattattaataaatgtaatggattttttttttgt

SEQ ID NO: 884 - protein, 720 aa, Homo sapiens
MDIQLDPARDDLPLMANTSHILVKHYVLDLDVDFESQVIEGTIVLFLEDGNRFKKQNSSIEEACQSESNKACKFGMPEPCHIPVTNARTFSSEMEYNDFAICSKGEKDTSDKDGNHDNQEHASGISSSKYCCDTGNHGSEDFLLVLDCCDLSVLKVEEVDVAAVPGLEKFTRSPELTVVSEEFRNQIVRELVTLPANRWREQLDYYARCSQAPGCGELLFDTDTWSLQIRKTGAQTATDFPHAIRIWYKTKPEGRSVTWTSDQSGRPCVYTVGSPINNRALFPCQEPPVAMSTWQATVRAAASFVVLMSGENSAKPTQLWEECSSWYYYVTMPMPASTFTIAVGCWTEMKMETWSSNDLATERPFSPSEANFRHVGVCSHMEYPCRFQNASATTQEIIPHRVFAPVCLTGACQETLLRLIPPCLSAAHSVLGAHPFSRLDVLIVPANFPSLGMARPSKDKTGHTSDSGASVIKHGLNPEKIFMQVHYLKGYFLLRFLAKRLGDETYFSFLRKFVHTFHGQLILSQDFLQMLLENIPEEKRLELSVENIYQDWLESSGIPKPLQRERRAGAECGLARQVRAEVTKWIGVNRRPRKRKRREKEEVFEKLLPDQLVLLLEHLLEQKTLSPRTLQSLQRTYHLQDQDAEVRHRWCELIVKHKFTKAYKSVERFLQEDQAMGVYLYGELMVSEDARQQQLARRCFERTKEQMDRSSAQVVAEMLF

SEQ ID NO: 885 - DNA, 2070 bp, Homo sapiens
atgtcaacatggcaggctacagttcgagcagctgcatcttttgttgttttaatgagtggggaaaattctgccaaaccaacgcagctttgggaagagtgctcaagctggtattactatgtaactatgccaatgccagcctccaccttcacaattgcagtgggatgctggacagaaatgaagatggagacatggtcatcaaatgatttggcaacagagagacccttctcaccttctgaggccaacttcaggcatgttggtgtttgcagtcacatggaatacccctgccgcttccagaatgcttctgccaccacccaggagatcattcctcatcgggtctttgcccctgtgtgcctcacgggtgcctgccaagagacccttctgcggctgatccctccttgcctctcagcagcacattctgttctgggagcacacccgttctctcggctggatgttctcatcgtccctgccaactttccaagtctggggatggccagcccacacatcatgttcctctctcagagcatcttgacaggagggaaccatctctgtgggacccgcctctgccatgaaattgcccatgcctggtttggcctagccatcggggcccgagactggacggaggagtggctgagtgaaggcttcgccactcacttggaggatgtgttttgggccacagcacagcagctggccccctatgaggcccgggagcagcaggagctgagggcttgtctgcgctggcgtcgcctccaggacgagatgcaatgctcccccgaggagatgcaggtgttaagacccagtaaagacaaaactggccacacaagtgactcgggagcatctgttatcaagcatggacttaatccggagaagatcttcatgcaggtgcattatttaaagggctacttccttcttcggtttcttgccaaaagacttggagatgaaacctatttttcatttttaagaaaatttgtgcacacatttcatggacagctgattctttcccaggatttccttcaaatgctactggagaacattccagaagaaaaaaggcttgagctgtctgttgaaaacatctaccaagactggcttgagagttccggaataccaaagccgctgcagagggagcgtcgcgccggggcggagtgcgggcttgcgcggcaagtgcgcgccgaggtcacgaaatggattggagtgaaccggagaccccgaaaacggaagcgcagggagaaggaagaggtgtttgaaaagcttcttccagaccagctggtcttgcttctggagcatctcttggagcagaagactctgagcccccgaactctgcaaagcctccagaggacataccacctccaggatcaggatgcagaggttcgccatcggtggtgtgaactcattgttaagcacaagttcacgaaagcctacaaaagtgtggagaggttccttcaggaggatcaggccatgggtgtgtacctctacggggagctgatggtgagtgaggacgccagacagcagcagctcgcccgtaggtgcttcgagcggaccaaggagcagatggataggtcctcagcccaggtggtggccgaaatgttattttaacgaggaaagaccacagcaagattctttcattcgtctcctcctagcctgggggaccaggctcgaactgaccctggacatcaaaggagggattatgtggctgctaaagccatcggcccacagccctgttcacatcttggtgcttctctttcccagaggctggtcccagccaggcacacacaaaaggcagattctcgtaaacgcagcctccctccctggaggctgcctcctgccctggatctggagtggagctgctctgagattttgagttcttctgcagagatgattaaatatatccaagagacattggaaaacctgctgaacattttacattggtctgctcagcacatggctggatgcggatatttctataattccagaaagtcacacagctcctctgtatgagaccagtgggcgccatttaaaagaacaggatgagaatctaagatatattattaataaatgtaatggattttttttttg

SEQ ID NO: 886 - protein, 529 aa, Homo sapiens
MSTWQATVRAAASFVVLMSGENSAKPTQLWEECSSWYYYVTMPMPASTFTIAVGCWTEMKMETWSSNDLATERPFSPSEANFRHVGVCSHMEYPCRFQNASATTQEIIPHRVFAPVCLTGACQETLLRLIPPCLSAAHSVLGAHPFSRLDVLIVPANFPSLGMASPHIMFLSQSILTGGNHLCGTRLCHEIAHAWFGLAIGARDWTEEWLSEGFATHLEDVFWATAQQLAPYEAREQQELRACLRWRRLQDEMQCSPEEMQVLRPSKDKTGHTSDSGASVIKHGLNPEKIFMQVHYLKGYFLLRFLAKRLGDETYFSFLRKFVHTFHGQLILSQDFLQMLLENIPEEKRLELSVENIYQDWLESSGIPKPLQRERRAGAECGLARQVRAEVTKWIGVNRRPRKRKRREKEEVFEKLLPDQLVLLLEHLLEQKTLSPRTLQSLQRTYHLQDQDAEVRHRWCELIVKHKFTKAYKSVERFLQEDQAMGVYLYGELMVSEDARQQQLARRCFERTKEQMDRSSAQVVAEMLF

SEQ ID NO: 887 - DNA, 3318 bp, Homo sapiens
atgaaagtgaccgtgtgcttcggcaggacgggcatcgtggtgccctgcaaggagggccagctgcgcgtcggcgagctcacccagcaggcgctgcagcggtacctgaagacccgggagaagggtcctggttactgggtgaagattcatcacttagaatatacagatggaggaatcctggatccagatgatgtcttggcagatgttgttgaagataaagacaaggtactgattgctgtgtttgaagaacaagaaccactccacaagattgagagccccagtggaaaccctgcagatcggcagagcccagatgcttttgagacagaagtggccgcccaactggccgcatttaagccaattggtggggagattgaagtaaccccttctgctctaaaactaggcactccactgctggtgaggagaagcagtgacccagtgccaggcccacctgctgatacccagccaagcgcttcacaccctggtggccagagtctgaaactggttgttccagattccacgcagaacttggaagacagagaagttttgaatggtgtacagacagaactactaacttcgccaagaactaaggacacattgagtgatatgacaagaacagtggagatttctggggaaggaggcccattgggaatacatgtagtgcccttcttttcatctctgagtggaaggattctaggactcttcatccgaggcattgaagacaacagcaggtccaagcgggagggactatttcacgaaaatgaatgtattgtaaaaatcaacaatgtggatctcgtagacaaaacctttgctcaggctcaagatgtcttccgccaggcaatgaaatctccaagtgtgctcctccacgtgcttcctccacaaaaccgtgaacagtatgaaaagtcagtcattggctctcttaacatttttggtaataatgatggcgttttgaaaaccaaagtgccgcctcctgtccatggaaaatcgggactaaagacagcaaatctcacaggaaccgatagtcctgaaacagatgcatcagcttccctgcaacaaaacaagagtccccgagtaccaaggctgggaggaaaaccatcctctccctcactctcgcctctcatgggatttggcagcaataaaaatgcaaagaaaattaagattgacctaaagaaaggccctgaaggacttggtttcactgtggttaccagagactcttccatacatggtcccggtcccatttttgtaaaaaacattttaccaaagggagcagcaataaaagatggccgcctacaatcaggggacagaattttggaggtaaatgggagagatgtcaccggacgaacccaggaagagcttgtggccatgctcaggagcaccaagcagggggagacagcatcgctggtcattgcccgccaagaaggacattttctgccccgagagttgaaaggagaacctgactgctgtgcactctctctggagacaagcgagcagctcacctttgagatccccctgaatgattcaggttctgctggcctcggggtgagcttaaaagggaacaaatccagagaaactggaacagacttggggatttttatcaaatccatcattcatggaggcgctgcttttaaggatggtcgtctgcgaatgaatgaccagctgattgcagttaatggggaatctcttttgggaaagtccaaccacgaagctatggaaacacttaggcggtcaatgtccatggagggaaacatccgagggatgatccagttggtgattctgaggaggccagagagaccaatggaggatcctgcagagtgtggggcattttccaagccatgctttgagaactgtcaaaatgctgtaaccacctctaggcgaaatgataatagtatcctgcatccacttggcacttgcagtccacaagacaaacagaaaggtctattgctgcccaatgacggatgggccgagagtgaagttccaccttctccaacaccacattctgctctgggattgggcctcgaagattacagccacagctctggggtggattcagcagtatattttccagatcagcacatcaacttcagatctgtgacaccggccaggcagcctgaatcaattaatttgaaagcctcgaagagcatggaccttgtgccagatgaaagcaaggttcactcattggctggacaaaaatcggaatctccaagcaaagattttggtccaactctgggtttgaaaaagtccagctccttggagagtctgcagactgcagtggccgaggtcaggaagaatgaccttccctttcacaggccccggccgcacatggttcgaggccgaggctgcaatgagagctttagagcagccattgacaaatcctacgatggacctgaagaaatagaagctgacggtctgtctgataagagctctcactctggccaaggagctctgaattgtgagtctgcccctcaggggaattcggagctagaggacatggaaaataaagccaggaaagtcaaaaaaacgaaagagaaggagaagaaaaaggaaaagggcaaattgaaagtcaaggagaaaaagcgcaaagaggagaatgaagatccagaaaggaaaataaagaagaagggcttcggcgccatgctgagatttggaaagaagaaagaggataagggtggaaaggctgagcagaaaggtactctgaaacatggtggcctgagagaagaagagctggagaaaatgaaagaagagcgtgaaagtggccgtcctacgggtggaagcactgaccgtatccagaagttgcggaaagagtattatcaggctcggagggaaggtttccctttatatgaagacgacgaaggaagagcaaggccatctgagtatgacctactctgggtgcctggaaggggtccagatgggaatgcacacaacctccgctttgaagggatggagaggcagtacgcatccttacccaggggaggacccgcagatcctgtagactatctgccagcagcacctcgggggctctacaaggaaagggagcttccctattatccaggggctcatcctatgcaccctcccaaagggagctatccccgccccacagagctcagggtggcagatctccggtatcctcagcactacccacccccgccagctccccagcacaaaggaccctttcgacaagacgttccgccttcccctccccagcaccaaagaatgccagcctatcaggaaacaggcagaccagggccccgtgggggcagcccagaccagtacccttaccgaacccaggattcccggcagaagaaccccatgactgcagccgtatag

SEQ ID NO: 888 - protein, 1105 aa, Homo sapiens
MKVTVCFGRTGIVVPCKEGQLRVGELTQQALQRYLKTREKGPGYWVKIHHLEYTDGGILDPDDVLADVVEDKDKVLIAVFEEQEPLHKIESPSGNPADRQSPDAFETEVAAQLAAFKPIGGEIEVTPSALKLGTPLLVRRSSDPVPGPPADTQPSASHPGGQSLKLVVPDSTQNLEDREVLNGVQTELLTSPRTKDTLSDMTRTVEISGEGGPLGIHVVPFFSSLSGRILGLFIRGIEDNSRSKREGLFHENECIVKINNVDLVDKTFAQAQDVFRQAMKSPSVLLHVLPPQNREQYEKSVIGSLNIFGNNDGVLKTKVPPPVHGKSGLKTANLTGTDSPETDASASLQQNKSPRVPRLGGKPSSPSLSPLMGFGSNKNAKKIKIDLKKGPEGLGFTVVTRDSSIHGPGPIFVKNILPKGAAIKDGRLQSGDRILEVNGRDVTGRTQEELVAMLRSTKQGETASLVIARQEGHFLPRELKGEPDCCALSLETSEQLTFEIPLNDSGSAGLGVSLKGNKSRETGTDLGIFIKSIIHGGAAFKDGRLRMNDQLIAVNGESLLGKSNHEAMETLRRSMSMEGNIRGMIQLVILRRPERPMEDPAECGAFSKPCFENCQNAVTTSRRNDNSILHPLGTCSPQDKQKGLLLPNDGWAESEVPPSPTPHSALGLGLEDYSHSSGVDSAVYFPDQHINFRSVTPARQPESINLKASKSMDLVPDESKVHSLAGQKSESPSKDFGPTLGLKKSSSLESLQTAVAEVRKNDLPFHRPRPHMVRGRGCNESFRAAIDKSYDGPEEIEADGLSDKSSHSGQGALNCESAPQGNSELEDMENKARKVKKTKEKEKKKEKGKLKVKEKKRKEENEDPERKIKKKGFGAMLRFGKKKEDKGGKAEQKGTLKHGGLREEELEKMKEERESGRPTGGSTDRIQKLRKEYYQARREGFPLYEDDEGRARPSEYDLLWVPGRGPDGNAHNLRFEGMERQYASLPRGGPADPVDYLPAAPRGLYKERELPYYPGAHPMHPPKGSYPRPTELRVADLRYPQHYPPPPAPQHKGPFRQDVPPSPPQHQRMPAYQETGRPGPRGGSPDQYPYRTQDSRQKNPMTAAV

SEQ ID NO: 889 - DNA, 3411 bp, Homo sapiens
atgaaagtgaccgtgtgcttcggcaggacgggcatcgtggtgccctgcaaggagggccagctgcgcgtcggcgagctcacccagcaggcgctgcagcggtacctgaagacccgggagaagggtcctggttactgggtgaagattcatcacttagaatatacagatggaggaatcctggatccagatgatgtcttggcagatgttgttgaagataaagacaagctgattgctgtgtttgaagaacaagaaccactccacaagattgagagccccagtggaaaccctgcagatcggcagagcccagatgcttttgagacagaagtggccgcccaactggccgcatttaagccaattggtggggagattgaagtaaccccttctgctctaaaactaggcactccactgctggtgaggagaagcagtgacccagtgccaggcccacctgctgatacccagccaagcgcttcacaccctggtggccagagtctgaaactggttgttccagattccacgcagaacttggaagacagagaagttttgaatggtgtacagacagaactactaacttcgccaagaactaaggacacattgagtgatatgacaagaacagtggagatttctggggaaggaggcccattgggaatacatgtagtgcccttcttttcatctctgagtggaaggattctaggactcttcatccgaggcattgaagacaacagcaggtccaagcgggagggactatttcacgaaaatgaatgtattgtaaaaatcaacaatgtggatctcgtagacaaaacctttgctcaggctcaagatgtcttccgccaggcaatgaaatctccaagtgtgctcctccacgtgcttcctccacaaaaccgtgaacagtatgaaaagtcagtcattggctctcttaacatttttggtaataatgatggcgttttgaaaaccaaagtgccgcctcctgtccatggaaaatcgggactaaagacagcaaatctcacaggaaccgatagtcctgaaacagatgcatcagcttccctgcaacaaaacaagagtccccgagtaccaaggctgggaggaaaaccatcctctccctcactctcgcctctcatgggatttggcagcaataaaaatgcaaagaaaattaagattgacctaaagaaaggccctgaaggacttggtttcactgtggttaccagagactcttccatacatggtcccggtcccatttttgtaaaaaacattttaccaaagggagcagcaataaaagatggccgcctacaatcaggggacagaattttggaggtaaatgggagagatgtcaccggacgaacccaggaagagcttgtggccatgctcaggagcaccaagcagggggagacagcatcgctggtcattgcccgccaagaaggacattttctgccccgagagttgaaaggagaacctgactgctgtgcactctctctggagacaagcgagcagctcacctttgagatccccctgaatgattcaggttctgctggcctcggggtgagcttaaaagggaacaaatccagagaaactggaacagacttggggatttttatcaaatccatcattcatggaggcgctgcttttaaggatggtcgtctgcgaatgaatgaccagctgattgcagttaatggggaatctcttttgggaaagtccaaccacgaagctatggaaacacttaggcggtcaatgtccatggagggaaacatccgagggatgatccagttggtgattctgaggaggccagagagaccaatggaggatcctgcagagtgtggggcattttccaagccatgctttgagaactgtcaaaatgctgtaaccacctctaggcgaaatgataatagtatcctgcatccacttggcacttgcagtccacaagacaaacagaaaggtctattgctgcccaatgacggatgggccgagagtgaagttccaccttctccaacaccacattctgctctgggattgggcctcgaagattacagccacagctctggggtggattcagcagtatattttccagatcagcacatcaacttcagatctgtgacaccggccaggcagcctgaatcaattaatttgaaagcctcgaagagcatggaccttgtgccagatgaaagcaaggttcactcattggctggacaaaaatcggacggtctgtctgataagagctctcactctggccaaggagctctgaattgtgagtctgcccctcaggggaattcggagctagaggacatggaaaataaagccaggaaagtcaaaaaaacgaaagagaaggagaagaaaaaggaaaagggcaaattgaaagtcaaggagaaaaagcgcaaagaggagaatgaagatccagaaaggaaaataaagaagaagggcttcggcgccatgctgagatttggaaagaagaaagaggataagggtggaaaggctgagcagaaaggtactctgaaacatggtggcctgagagaagaagagctggagaaaatgaaagaagagcgtgaaaggattggagcaaaacatcaggagctaagggaaaagcaggcaagaggtcttcttgattatgctactggtgcaattggatcagtgtatgatatggatgatgatgaaatggaccccaattatgccagagtgaaccactttcgggaaccatgcacatcagcaaatgtctttagatctccatctccccctcgagctggaccatttggttaccctcgggatggccatccactgtctccagaaagagaccacttagagggtctctatgccaaggtcaacaagccataccatccactggttccagctgacagtggccgtcctacgggtggaagcactgaccgtatccagaagttgcggaaagagtattatcaggctcggagggaaggtttccctttatatgaagacgacgaaggaagagcaaggccatctgagtatgacctactctgggtgcctggaaggggtccagatgggaatgcacacaacctccgctttgaagggatggagaggcagtacgcatccttacccaggggaggacccgcagatcctgtagactatctgccagcagcacctcgggggctctacaaggaaagggagcttccctattatccaggggctcatcctatgcaccctcccaaagggagctatccccgccccacagagctcagggtggcagatctccggtatcctcagcactacccacccccgccagctccccagcacaaaggaccctttcgacaagacgttccgccttcccctccccagcaccaaagaatgccagcctatcaggaaacaggcagaccagggccccgtgggggcagcccagaccagtacccttaccgaacccaggattcccggcagaagaaccccatgactgcagccgtatag

SEQ ID NO: 890 - protein, 1136 aa, Homo sapiens
MKVTVCFGRTGIVVPCKEGQLRVGELTQQALQRYLKTREKGPGYWVKIHHLEYTDGGILDPDDVLADVVEDKDKLIAVFEEQEPLHKIESPSGNPADRQSPDAFETEVAAQLAAFKPIGGEIEVTPSALKLGTPLLVRRSSDPVPGPPADTQPSASHPGGQSLKLVVPDSTQNLEDREVLNGVQTELLTSPRTKDTLSDMTRTVEISGEGGPLGIHVVPFFSSLSGRILGLFIRGIEDNSRSKREGLFHENECIVKINNVDLVDKTFAQAQDVFRQAMKSPSVLLHVLPPQNREQYEKSVIGSLNIFGNNDGVLKTKVPPPVHGKSGLKTANLTGTDSPETDASASLQQNKSPRVPRLGGKPSSPSLSPLMGFGSNKNAKKIKIDLKKGPEGLGFTVVTRDSSIHGPGPIFVKNILPKGAAIKDGRLQSGDRILEVNGRDVTGRTQEELVAMLRSTKQGETASLVIARQEGHFLPRELKGEPDCCALSLETSEQLTFEIPLNDSGSAGLGVSLKGNKSRETGTDLGIFIKSIIHGGAAFKDGRLRMNDQLIAVNGESLLGKSNHEAMETLRRSMSMEGNIRGMIQLVILRRPERPMEDPAECGAFSKPCFENCQNAVTTSRRNDNSILHPLGTCSPQDKQKGLLLPNDGWAESEVPPSPTPHSALGLGLEDYSHSSGVDSAVYFPDQHINFRSVTPARQPESINLKASKSMDLVPDESKVHSLAGQKSDGLSDKSSHSGQGALNCESAPQGNSELEDMENKARKVKKTKEKEKKKEKGKLKVKEKKRKEENEDPERKIKKKGFGAMLRFGKKKEDKGGKAEQKGTLKHGGLREEELEKMKEERERIGAKHQELREKQARGLLDYATGAIGSVYDMDDDEMDPNYARVNHFREPCTSANVFRSPSPPRAGPFGYPRDGHPLSPERDHLEGLYAKVNKPYHPLVPADSGRPTGGSTDRIQKLRKEYYQARREGFPLYEDDEGRARPSEYDLLWVPGRGPDGNAHNLRFEGMERQYASLPRGGPADPVDYLPAAPRGLYKERELPYYPGAHPMHPPKGSYPRPTELRVADLRYPQHYPPPPAPQHKGPFRQDVPPSPPQHQRMPAYQETGRPGPRGGSPDQYPYRTQDSRQKNPMTAAV

SEQ ID NO: 891 - DNA, 3435 bp, Homo sapiens
atgaaagtgaccgtgtgcttcggcaggacgggcatcgtggtgccctgcaaggagggccagctgcgcgtcggcgagctcacccagcaggcgctgcagcggtacctgaagacccgggagaagggtcctggttactgggtgaagattcatcacttagaatatacagatggaggaatcctggatccagatgatgtcttggcagatgttgttgaagataaagacaagatactgattgctgtgtttgaagaacaagaaccactccacaagattgagagccccagtggaaaccctgcagatcggcagagcccagatgcttttgagacagaagtggccgcccaactggccgcatttaagccaattggtggggagattgaagtaaccccttctgctctaaaactaggcactccactgctggtgaggagaagcagtgacccagtgccaggcccacctgctgatacccagccaagcgcttcacaccctggtggccagagtctgaaactggttgttccagattccacgcagaacttggaagacagagaagttttgaatggtgtacagacagaactactaacttcgccaagaactaaggacacattgagtgatatgacaagaacagtggagatttctggggaaggaggcccattgggaatacatgtagtgcccttcttttcatctctgagtggaaggattctaggactcttcatccgaggcattgaagacaacagcaggtccaagcgggagggactatttcacgaaaatgaatgtattgtaaaaatcaacaatgtggatctcgtagacaaaacctttgctcaggctcaagatgtcttccgccaggcaatgaaatctccaagtgtgctcctccacgtgcttcctccacaaaaccgtgaacagtatgaaaagtcagtcattggctctcttaacatttttggtaataatgatggcgttttgaaaaccaaagtgccgcctcctgtccatggaaaatcgggactaaagacagcaaatctcacaggaaccgatagtcctgaaacagatgcatcagcttccctgcaacaaaacaagagtccccgagtaccaaggctgggaggaaaaccatcctctccctcactctcgcctctcatgggatttggcagcaataaaaatgcaaagaaaattaagattgacctaaagaaaggccctgaaggacttggtttcactgtggttaccagagactcttccatacatggtcccggtcccatttttgtaaaaaacattttaccaaagggagcagcaataaaagatggccgcctacaatcaggggacagaattttggaggtaaatgggagagatgtcaccggacgaacccaggaagagcttgtggccatgctcaggagcaccaagcagggggagacagcatcgctggtcattgcccgccaagaaggacattttctgccccgagagttggatggtcgtctgcgaatgaatgaccagctgattgcagttaatggggaatctcttttgggaaagtccaaccacgaagctatggaaacacttaggcggtcaatgtccatggagggaaacatccgagggatgatccagttggtgattctgaggaggccagagagaccaatggaggatcctgcagagtgtggggcattttccaagccatgctttgagaactgtcaaaatgctgtaaccacctctaggcgaaatgataatagtatcctgcatccacttggcacttgcagtccacaagacaaacagaaaggtctattgctgcccaatgacggatgggccgagagtgaagttccaccttctccaacaccacattctgctctgggattgggcctcgaagattacagccacagctctggggtggattcagcagtatattttccagatcagcacatcaacttcagatctgtgacaccggccaggcagcctgaatcaattaatttgaaagcctcgaagagcatggaccttgtgccagatgaaagcaaggttcactcattggctggacaaaaatcggaatctccaagcaaagattttggtccaactctgggtttgaaaaagtccagctccttggagagtctgcagactgcagtggccgaggtcaggaagaatgaccttccctttcacaggccccggccgcacatggttcgaggccgaggctgcaatgagagctttagagcagccattgacaaatcctacgatggacctgaagaaatagaagctgacggtctgtctgataagagctctcactctggccaaggagctctgaattgtgagtctgcccctcaggggaattcggagctagaggacatggaaaataaagccaggaaagtcaaaaaaacgaaagagaaggagaagaaaaaggaaaagggcaaattgaaagtcaaggagaaaaagcgcaaagaggagaatgaagatccagaaaggaaaataaagaagaagggcttcggcgccatgctgagatttggaaagaagaaagaggataagggtggaaaggctgagcagaaaggtactctgaaacatggtggcctgagagaagaagagctggagaaaatgaaagaagagcgtgaaaggattggagcaaaacatcaggagctaagggaaaagcaggcaagaggtcttcttgattatgctactggtgcaattggatcagtgtatgatatggatgatgatgaaatggaccccaattatgccagagtgaaccactttcgggaaccatgcacatcagcaaatgtctttagatctccatctccccctcgagctggaccatttggttaccctcgggatggccatccactgtctccagaaagagaccacttagagggtctctatgccaaggtcaacaagccataccatccactggttccagctgacagtggccgtcctacgggtggaagcactgaccgtatccagaagttgcggaaagagtattatcaggctcggagggaaggtttccctttatatgaagacgacgaaggaagagcaaggccatctgagtatgacctactctgggtgcctggaaggggtccagatgggaatgcacacaacctccgctttgaagggatggagaggcagtacgcatccttacccaggggaggacccgcagatcctgtagactatctgccagcagcacctcgggggctctacaaggaaagggagcttccctattatccaggggctcatcctatgcaccctcccaaagggagctatccccgccccacagagctcagggtggcagatctccggtatcctcagcactacccacccccgccagctccccagcacaaaggaccctttcgacaagacgttccgccttcccctccccagcaccaaagaatgccagcctatcaggaaacaggcagaccagggccccgtgggggcagcccagaccagtacccttaccgaacccaggattcccggcagaagaaccccatgactgcagccgtatag

SEQ ID NO: 892 - protein, 1144 aa, Homo sapiens
MKVTVCFGRTGIVVPCKEGQLRVGELTQQALQRYLKTREKGPGYWVKIHHLEYTDGGILDPDDVLADVVEDKDKILIAVFEEQEPLHKIESPSGNPADRQSPDAFETEVAAQLAAFKPIGGEIEVTPSALKLGTPLLVRRSSDPVPGPPADTQPSASHPGGQSLKLVVPDSTQNLEDREVLNGVQTELLTSPRTKDTLSDMTRTVEISGEGGPLGIHVVPFFSSLSGRILGLFIRGIEDNSRSKREGLFHENECIVKINNVDLVDKTFAQAQDVFRQAMKSPSVLLHVLPPQNREQYEKSVIGSLNIFGNNDGVLKTKVPPPVHGKSGLKTANLTGTDSPETDASASLQQNKSPRVPRLGGKPSSPSLSPLMGFGSNKNAKKIKIDLKKGPEGLGFTVVTRDSSIHGPGPIFVKNILPKGAAIKDGRLQSGDRILEVNGRDVTGRTQEELVAMLRSTKQGETASLVIARQEGHFLPRELDGRLRMNDQLIAVNGESLLGKSNHEAMETLRRSMSMEGNIRGMIQLVILRRPERPMEDPAECGAFSKPCFENCQNAVTTSRRNDNSILHPLGTCSPQDKQKGLLLPNDGWAESEVPPSPTPHSALGLGLEDYSHSSGVDSAVYFPDQHINFRSVTPARQPESINLKASKSMDLVPDESKVHSLAGQKSESPSKDFGPTLGLKKSSSLESLQTAVAEVRKNDLPFHRPRPHMVRGRGCNESFRAAIDKSYDGPEEIEADGLSDKSSHSGQGALNCESAPQGNSELEDMENKARKVKKTKEKEKKKEKGKLKVKEKKRKEENEDPERKIKKKGFGAMLRFGKKKEDKGGKAEQKGTLKHGGLREEELEKMKEERERIGAKHQELREKQARGLLDYATGAIGSVYDMDDDEMDPNYARVNHFREPCTSANVFRSPSPPRAGPFGYPRDGHPLSPERDHLEGLYAKVNKPYHPLVPADSGRPTGGSTDRIQKLRKEYYQARREGFPLYEDDEGRARPSEYDLLWVPGRGPDGNAHNLRFEGMERQYASLPRGGPADPVDYLPAAPRGLYKERELPYYPGAHPMHPPKGSYPRPTELRVADLRYPQHYPPPPAPQHKGPFRQDVPPSPPQHQRMPAYQETGRPGPRGGSPDQYPYRTQDSRQKNPMTAAV

SEQ ID NO: 893 - DNA, 3618 bp, Homo sapiens
atgaaagtgaccgtgtgcttcggcaggacgggcatcgtggtgccctgcaaggagggccagctgcgcgtcggcgagctcacccagcaggcgctgcagcggtacctgaagacccgggagaagggtcctggttactgggtgaagattcatcacttagaatatacagatggaggaatcctggatccagatgatgtcttggcagatgttgttgaagataaagacaagctgattgctgtgtttgaagaacaagaaccactccacaagattgagagccccagtggaaaccctgcagatcggcagagcccagatgcttttgagacagaagtggccgcccaactggccgcatttaagccaattggtggggagattgaagtaaccccttctgctctaaaactaggcactccactgctggtgaggagaagcagtgacccagtgccaggcccacctgctgatacccagccaagcgcttcacaccctggtggccagagtctgaaactggttgttccagattccacgcagaacttggaagacagagaagttttgaatggtgtacagacagaactactaacttcgccaagaactaaggacacattgagtgatatgacaagaacagtggagatttctggggaaggaggcccattgggaatacatgtagtgcccttcttttcatctctgagtggaaggattctaggactcttcatccgaggcattgaagacaacagcaggtccaagcgggagggactatttcacgaaaatgaatgtattgtaaaaatcaacaatgtggatctcgtagacaaaacctttgctcaggctcaagatgtcttccgccaggcaatgaaatctccaagtgtgctcctccacgtgcttcctccacaaaaccgtgaacagtatgaaaagtcagtcattggctctcttaacatttttggtaataatgatggcgttttgaaaaccaaagtgccgcctcctgtccatggaaaatcgggactaaagacagcaaatctcacaggaaccgatagtcctgaaacagatgcatcagcttccctgcaacaaaacaagagtccccgagtaccaaggctgggaggaaaaccatcctctccctcactctcgcctctcatgggatttggcagcaataaaaatgcaaagaaaattaagattgacctaaagaaaggccctgaaggacttggtttcactgtggttaccagagactcttccatacatggtcccggtcccatttttgtaaaaaacattttaccaaagggagcagcaataaaagatggccgcctacaatcaggggacagaattttggaggtaaatgggagagatgtcaccggacgaacccaggaagagcttgtggccatgctcaggagcaccaagcagggggagacagcatcgctggtcattgcccgccaagaaggacattttctgccccgagagttgaaaggagaacctgactgctgtgcactctctctggagacaagcgagcagctcacctttgagatccccctgaatgattcaggttctgctggcctcggggtgagcttaaaagggaacaaatccagagaaactggaacagacttggggatttttatcaaatccatcattcatggaggcgctgcttttaaggatggtcgtctgcgaatgaatgaccagctgattgcagttaatggggaatctcttttgggaaagtccaaccacgaagctatggaaacacttaggcggtcaatgtccatggagggaaacatccgagggatgatccagttggtgattctgaggaggccagagagaccaatggaggatcctgcagagtgtggggcattttccaagccatgctttgagaactgtcaaaatgctgtaaccacctctaggcgaaatgataatagtatcctgcatccacttggcacttgcagtccacaagacaaacagaaaggtctattgctgcccaatgacggatgggccgagagtgaagttccaccttctccaacaccacattctgctctgggattgggcctcgaagattacagccacagctctggggtggattcagcagtatattttccagatcagcacatcaacttcagatctgtgacaccggccaggcagcctgaatcaattaatttgaaagcctcgaagagcatggaccttgtgccagatgaaagcaaggttcactcattggctggacaaaaatcggaatctccaagcaaagattttggtccaactctgggtttgaaaaagtccagctccttggagagtctgcagactgcagtggccgaggtcaggaagaatgaccttccctttcacaggccccggccgcacatggttcgaggccgaggctgcaatgagagctttagagcagccattgacaaatcctacgatggacctgaagaaatagaagctgacggtctgtctgataagagctctcactctggccaaggagctctgaattgtgagtctgcccctcaggggaattcggagctagaggacatggaaaataaagccaggaaagtcaaaaaaacgaaagagaaggagaagaaaaaggaaaagggcaaattgaaagtcaaggagaaaaagcgcaaagaggagaatgaagatccagaaaggaaaataaagaagaagggcttcggcgccatgctgagatttggaaagaagaaagaggataagggtggaaaggctgagcagaaaggtactctgaaacatggtggcctgagagaagaagagctggagaaaatgaaagaagagcgtgaaaggattggagcaaaacatcaggagctaagggaaaagcaggcaagaggtcttcttgattatgctactggtgcaattggatcagtgtatgatatggatgatgatgaaatggaccccaattatgccagagtgaaccactttcgggaaccatgcacatcagcaaatgtctttagatctccatctccccctcgagctggaccatttggttaccctcgggatggccatccactgtctccagaaagagaccacttagagggtctctatgccaaggtcaacaagccataccatccactggttccagctgacagtggccgtcctacgggtggaagcactgaccgtatccagaagttgcggaaagagtattatcaggctcggagggaaggtttccctttatatgaagacgacgaaggaagagcaaggccatctgagtatgacctactctgggtgcctggaaggggtccagatgggaatgcacacaacctccgctttgaagggatggagaggcagtacgcatccttacccaggggaggacccgcagatcctgtagactatctgccagcagcacctcgggggctctacaaggaaagggagcttccctattatccaggggctcatcctatgcaccctcccaaagggagctatccccgccccacagagctcagggtggcagatctccggtatcctcagcactacccacccccgccagctccccagcacaaaggaccctttcgacaagacgttccgccttcccctccccagcaccaaagaatgccagcctatcaggaaacaggcagaccagggccccgtgggggcagcccagaccagtacccttaccgaacccaggattcccggcagaagaaccccatgactgcagccgtatag

SEQ ID NO: 894 - protein, 1205 aa, Homo sapiens
MKVTVCFGRTGIVVPCKEGQLRVGELTQQALQRYLKTREKGPGYWVKIHHLEYTDGGILDPDDVLADVVEDKDKLIAVFEEQEPLHKIESPSGNPADRQSPDAFETEVAAQLAAFKPIGGEIEVTPSALKLGTPLLVRRSSDPVPGPPADTQPSASHPGGQSLKLVVPDSTQNLEDREVLNGVQTELLTSPRTKDTLSDMTRTVEISGEGGPLGIHVVPFFSSLSGRILGLFIRGIEDNSRSKREGLFHENECIVKINNVDLVDKTFAQAQDVFRQAMKSPSVLLHVLPPQNREQYEKSVIGSLNIFGNNDGVLKTKVPPPVHGKSGLKTANLTGTDSPETDASASLQQNKSPRVPRLGGKPSSPSLSPLMGFGSNKNAKKIKIDLKKGPEGLGFTVVTRDSSIHGPGPIFVKNILPKGAAIKDGRLQSGDRILEVNGRDVTGRTQEELVAMLRSTKQGETASLVIARQEGHFLPRELKGEPDCCALSLETSEQLTFEIPLNDSGSAGLGVSLKGNKSRETGTDLGIFIKSIIHGGAAFKDGRLRMNDQLIAVNGESLLGKSNHEAMETLRRSMSMEGNIRGMIQLVILRRPERPMEDPAECGAFSKPCFENCQNAVTTSRRNDNSILHPLGTCSPQDKQKGLLLPNDGWAESEVPPSPTPHSALGLGLEDYSHSSGVDSAVYFPDQHINFRSVTPARQPESINLKASKSMDLVPDESKVHSLAGQKSESPSKDFGPTLGLKKSSSLESLQTAVAEVRKNDLPFHRPRPHMVRGRGCNESFRAAIDKSYDGPEEIEADGLSDKSSHSGQGALNCESAPQGNSELEDMENKARKVKKTKEKEKKKEKGKLKVKEKKRKEENEDPERKIKKKGFGAMLRFGKKKEDKGGKAEQKGTLKHGGLREEELEKMKEERERIGAKHQELREKQARGLLDYATGAIGSVYDMDDDEMDPNYARVNHFREPCTSANVFRSPSPPRAGPFGYPRDGHPLSPERDHLEGLYAKVNKPYHPLVPADSGRPTGGSTDRIQKLRKEYYQARREGFPLYEDDEGRARPSEYDLLWVPGRGPDGNAHNLRFEGMERQYASLPRGGPADPVDYLPAAPRGLYKERELPYYPGAHPMHPPKGSYPRPTELRVADLRYPQHYPPPPAPQHKGPFRQDVPPSPPQHQRMPAYQETGRPGPRGGSPDQYPYRTQDSRQKNPMTAAV

SEQ ID NO: 895 - DNA, 3572 bp, Homo sapiens
gcctttctggggcctgggggatcctcttgcactggtgggtggagagaagcgcctgcagccaaccagggtcaggctgtgctcacagtttcctctggcggcatgtaaaggctccacaaaggagttgggagttcaaatgaggctgctgcggacggcctgaggatggaccccaagccctggacctgccgagcgtggcactgaggcagcggctgacgctactgtgagggaaagaaggttgtgagcagccccgcaggacccctggccagccctggccccagcctctgccggagccctctgtggaggcagagccagtggagcccagtgaggcagggctgcttggcagccaccggcctgcaactcaggaacccctccagaggccatggacaggctgccccgctgacggccagggtgaagcatgtgaggagccgccccggagccaagcaggagggaagaggctttcatagattctattcacaaagaataaccaccattttgcaaggaccatgaggccactgtgcgtgacatgctggtggctcggactgctggctgccatgggagctgttgcaggccaggaggacggttttgagggcactgaggagggctcgccaagagagttcatttacctaaacaggtacaagcgggcgggcgagtcccaggacaagtgcacctacaccttcattgtgccccagcagcgggtcacgggtgccatctgcgtcaactccaaggagcctgaggtgcttctggagaaccgagtgcataagcaggagctagagctgctcaacaatgagctgctcaagcagaagcggcagatcgagacgctgcagcagctggtggaggtggacggcggcattgtgagcgaggtgaagctgctgcgcaaggagagccgcaacatgaactcgcgggtcacgcagctctacatgcagctcctgcacgagatcatccgcaagcgggacaacgcgttggagctctcccagctggagaacaggatcctgaaccagacagccgacatgctgcagctggccagcaagtacaaggacctggagcacaagtaccagcacctggccacactggcccacaaccaatcagagatcatcgcgcagcttgaggagcactgccagagggtgccctcggccaggcccgtcccccagccaccccccgctgccccgccccgggtctaccaaccacccacctacaaccgcatcatcaaccagatctctaccaacgagatccagagtgaccagaacctgaaggtgctgccaccccctctgcccactatgcccactctcaccagcctcccatcttccaccgacaagccgtcgggcccatggagagactgcctgcaggccctggaggatggccacgacaccagctccatctacctggtgaagccggagaacaccaaccgcctcatgcaggtgtggtgcgaccagagacacgaccccgggggctggaccgtcatccagagacgcctggatggctctgttaacttcttcaggaactgggagacgtacaagcaagggtttgggaacattgacggcgaatactggctgggcctggagaacatttactggctgacgaaccaaggcaactacaaactcctggtgaccatggaggactggtccggccgcaaagtctttgcagaatacgccagtttccgcctggaacctgagagcgagtattataagctgcggctggggcgctaccatggcaatgcgggtgactcctttacatggcacaacggcaagcagttcaccaccctggacagagatcatgatgtctacacaggaaactgtgcccactaccagaagggaggctggtggtataacgcctgtgcccactccaacctcaacggggtctggtaccgcgggggccattaccggagccgctaccaggacggagtctactgggctgagttccgaggaggctcttactcactcaagaaagtggtgatgatgatccgaccgaaccccaacaccttccactaagccagctccccctcctgacctctcgtggccattgccaggagcccaccctggtcacgctggccacagcacaaagaacaactcctcaccagttcatcctgaggctgggaggaccgggatgctggattctgttttccgaagtcactgcagcggatgatggaactgaatcgatacggtgttttctgtccctcctactttccttcacaccagacagcccctcatgtctccaggacaggacaggactacagacaactctttctttaaataaattaagtctctacaataaaaacacaactgcaaagtaccttcataatatacatgtgtatgagcctcccttgtgcacgtatgtgtataccacatatatatgcatttagatatacatcacatgtgatatatctagatccatatataggtttgccttagatacctaaatacacatatattcagttctcagatgttgaagctgtcaccagcagctttgctcttaggagaaaagcatttcattagtgttgtattacttgagtctaagggtagatcacagactgtgtggtctcaactgaaaggatcacccttggcatctgtgtgcctggattcttccagaatgtctacaatgctaatctctcacatagaggttcccagcttcttaagaaccccttttggcacctaatcaaatttcaaaatccctccccccacattttcatacttttccccattctcaggacttttcaccatccatcacccacttatcccttcatttgacaccattcattaagtgccttctgtgtgtcagtccctggccactcactgcagttcaaggccccctttccgctctgctgtactcctcgcctacctactccttgccttttctgtcgcacagccccttctttccaggcgagattcctcagcttctgagtaggaaacactccgggctccaggtttctggttgggaagggaaggccaggccaaaagctccaccggccgtatagataatgtactcgcagttttgtatcttccattcatactttaacctacaggtcatttgagtcttcacacaaataataacctatctggccaggagaattatctcagaacagaagtcatcagatcatcagagcccccagatggctacagaccagagattccacgctctcaggctgactagagtccgcatctcatctccaaactacacttccctggagaacaagtgccacaaaaatgaaaacaggccacttctcaggagttgaataatcaggggtcaccggaccccttggttgatgcactgcagcatggtggctttctgagtcctgttggccaccaagtgtcagcctcagcactcccgggactattgccaagaaggggcaagggatgagtcaagaaggtgagacccttcccggtgggcacgtgggccaggctgtgtgagatgttggatgtttggtactgtccatgtctgggtgtgtgcctattacctcagcatttctcacaaagtgtaccatgtagcatgttttgtgtatataaaagggagggtttttttaaaaatatattcccagattatccttgtaatgacacgaatctgcaataaaagccatcagtgct

SEQ ID NO: 896 - protein, 493 aa, Homo sapiens
MRPLCVTCWWLGLLAAMGAVAGQEDGFEGTEEGSPREFIYLNRYKRAGESQDKCTYTFIVPQQRVTGAICVNSKEPEVLLENRVHKQELELLNNELLKQKRQIETLQQLVEVDGGIVSEVKLLRKESRNMNSRVTQLYMQLLHEIIRKRDNALELSQLENRILNQTADMLQLASKYKDLEHKYQHLATLAHNQSEIIAQLEEHCQRVPSARPVPQPPPAAPPRVYQPPTYNRIINQISTNEIQSDQNLKVLPPPLPTMPTLTSLPSSTDKPSGPWRDCLQALEDGHDTSSIYLVKPENTNRLMQVWCDQRHDPGGWTVIQRRLDGSVNFFRNWETYKQGFGNIDGEYWLGLENIYWLTNQGNYKLLVTMEDWSGRKVFAEYASFRLEPESEYYKLRLGRYHGNAGDSFTWHNGKQFTTLDRDHDVYTGNCAHYQKGGWWYNACAHSNLNGVWYRGGHYRSRYQDGVYWAEFRGGSYSLKKVVMMIRPNPNTFH

SEQ ID NO: 897 - DNA, 4149 bp, Homo sapiens
aaggcgctggcggccggcggctgccccagttctccgccgaggcggtgaggcgcctggccgggctgctccgcagggcactgatccgcgtggcccgcgaggcgcagcgcctgagcgtgctgcacgccaagtgcacccgctttgaggtgcagagcgccgtgcgcctggtgcacagctgggcgctggccgagagctgcgcgctggcagccgtcaaggcgctgtccctgtacagcatgagcgccggcgacgggctgcgccggggcaagtccgcgcgctgcggcctcaccttctcagtgggtcgctttttccgctggatggtggacacccgaatctccgtgcgcatccacgagtacgcagccatctccctcaccgcctgcatggagaacctggtggaggagatccgggccagggtgatggccagccacagccctgatggcggaggggccggaggcggggaggtgtctgctgaggccctggagatggtcatcaacaacgacgccgagctctggggcgtcttgcagccctatgagcatctcatctgcggcaagaacgccaatggtgtcctctccctccccgcatacttcagcccctacaacggcgggtccctgggccatgacgagcgagccgatgcctatgcccagctggagctccgaaccctggagcagtccctcctggccacctgcgtgggcagcatctcggagctgagtgacttggtctcccgtgccatgcaccacatgcaggggcgtcaccccctgtgcccgggtgccagccctgcccgccaggcccgccagccgccacagcccatcacttggtcccccgacgccctccacacgctctactactttctgcggtgtccacagatggagtccatggagaaccccaacctggaccccccgagaatgaccttgaacaatgaacggcccttcatgctgctgccgcccctcatggagtggatgcgcgtggccatcacctacgcagagcaccgccgcagcctcaccgtggacagcggcgacatccggcaggcagcccggctgctgctgcctggtctggactgtgaacctcggcagctcaaacccgaacactgtttcagttccttccggaggctggatgcccgagcagctactgaaaaattcaaccaggacctgggtttccgcatgctcaactgtgggaggacggacctcatcaaccaagccatcgaggccttgggtccggatggggttaacaccatggatgaccagggtatgacgccactgatgtacgcctgcgctgctggggacgaagcgatggtccagatgttgattgatgctggggcaaacttggacatccaggttccaagcaactcccccaggcacccttccatccaccccgacagccggcactggacctcactgacattcgctgtgctgcatggacacatctctgtggtccagttgctgctggatgctggtgcccatgtcgagggctcggcagtgaacggcggcgaggacagctatgcggagacgcccctgcagctggcctctgcggcagggaactatgagctggtcagtttgttgctgagccgaggcgccgaccccctcctcagcatgctggaggcccacggcatgggctcctccctccacgaggacatgaactgcttcagccactcagctgcccacggccacaggaacgtcctgaggaagctcctgacgcagccacagcaggctaaagcggacgtgctgtccctggaggagatcctggccgagggtgtggaggaaagtgatgcgtcgagccagggcagtggcagcgaggggcccgtgcggctgagccggacccgcaccaaggccctacaggaggccatgtactacagcgctgagcacggctacgtggacatcaccatggagctgagggcactgggagtcccctggaagctgcacatctggatcgagtctctgaggacctcgttctcgcagtcgcggtactcggtggtgcagagcctcctgcgggacttcagctccatcagagaggaggagtacaacgaggagctggtgaccgagggcttgcagctcatgttcgacatcctcaagaccagcaaaaacgactccgtcatccagcaactggctaccatcttcacccactgctatggcagcagtcccatccccagcatcccagagatccggaagaccctgccggccaggctagatccacactttttgaacaataaggagatgtcagatgtgaccttcctggtggaaggaaagctgttttatgcacataaagtcctgctggtgacagcttctaacaggttcaagacactaatgaccaataaatcagaacaggatggggacagcagcaagaccatcgagatcagcgacatgaagtaccacatttttcagatgatgatgcagtatctgtactacggaggaacagaatccatggagatccccaccactgacatcctggagctgctgtcagctgccagcctgttccagctggatgccctgcagaggcactgcgagatcctgtgctcccagaccctcagcatggagagtgccgtgaacacctacaaatatgccaagatccacaatgccccagaactggccctgttctgtgagggcttcttcctcaagcacatgaaggccctactggagcaggatgccttccggcagctcatctacggccgcagcagcaaagtgcagggcctggatccactgcaggacctgcagaacaccctggcagagcgcgtgcactctgtctacatcacctcccgggtgtgaggcagggggcggaggctgccgaggccagggcctgtggaggtgccagggcccaccatgtcggggtatggttgtaggccctcttggagccaggttcacggggctgtttcctcctcctcccccagatgtcccccctgtcaccgggcagctcaccctcatctcctctgccctagagctgtttgttcaatcactgatgggcaaaggggagatgtagctaactggtggccctcctccccatctcagtttgcaactcaagggcagccatgcactcccccggggtgtcgctctcccctcctgcaggtcagcagctgatcctgatccacctccgcccaggccctccaagctctactcacccctagggcctcagtaaactcagaccatcccaactggggctcctgggggtacaggaatccttatgaatgtatagaatgcatactgcctaggcccccagtcgtctgcagtaattcaaaagctggtatttttcttcctaaatgtcacatagcaaaggctgcccaaatccccaaacttgttcttcaaaggtttgacaggcttaatgtgggcatccagtggcctgtggacccccccctgccaccacgactgctgccacccggagttcccccattgtctttggtgcctgggcttccagagtccctcccatcaggactaccagcttgctcagttagcagcagagggcagttccccagcttgatggtttctgagctaagtctggcatggaggggcaaggggtaggggatggggtgctgtgtaggaatggcctcagctcttgttttgctgctggttttaggggccaaagtaaatgggtggattctggaacctcaggcctagactaggttgcctttgtgggggcgatgaagcagagtcccctggtcaagtctctcggctcctttaatgtaggattgagagctgggcaaacaggtcccactggggactgtgactcttggagattaaaggacagggcattgatggaaggtaagggccaggagaagaggcctttctgctgtgtcccctcacggccttgccctcgaattctgcaggccctgggctcccctgacacctgtcatatttatggaccagacactggggcagcatcaggcacagtctgtctgggtgcaacttcttcagctgtctggccgcaccttaaaaactatttattcaccaaaagccccaggcatttcagaaggtggcactcaggtcaccctgaaaagcccccaggggcttgcaattctggaaaatattttgactagctgcttggctggatgtacaaagaaataggcattattttattgctgtaatattgtatgatactttaactgtacaataatgttgtcacttactgtaaatgtactatggttttattaacaataaacactcattaacaatg

SEQ ID NO: 898 - protein, 839 aa, Homo sapiens
MSAGDGLRRGKSARCGLTFSVGRFFRWMVDTRISVRIHEYAAISLTACMENLVEEIRARVMASHSPDGGGAGGGEVSAEALEMVINNDAELWGVLQPYEHLICGKNANGVLSLPAYFSPYNGGSLGHDERADAYAQLELRTLEQSLLATCVGSISELSDLVSRAMHHMQGRHPLCPGASPARQARQPPQPITWSPDALHTLYYFLRCPQMESMENPNLDPPRMTLNNERPFMLLPPLMEWMRVAITYAEHRRSLTVDSGDIRQAARLLLPGLDCEPRQLKPEHCFSSFRRLDARAATEKFNQDLGFRMLNCGRTDLINQAIEALGPDGVNTMDDQGMTPLMYACAAGDEAMVQMLIDAGANLDIQVPSNSPRHPSIHPDSRHWTSLTFAVLHGHISVVQLLLDAGAHVEGSAVNGGEDSYAETPLQLASAAGNYELVSLLLSRGADPLLSMLEAHGMGSSLHEDMNCFSHSAAHGHRNVLRKLLTQPQQAKADVLSLEEILAEGVEESDASSQGSGSEGPVRLSRTRTKALQEAMYYSAEHGYVDITMELRALGVPWKLHIWIESLRTSFSQSRYSVVQSLLRDFSSIREEEYNEELVTEGLQLMFDILKTSKNDSVIQQLATIFTHCYGSSPIPSIPEIRKTLPARLDPHFLNNKEMSDVTFLVEGKLFYAHKVLLVTASNRFKTLMTNKSEQDGDSSKTIEISDMKYHIFQMMMQYLYYGGTESMEIPTTDILELLSAASLFQLDALQRHCEILCSQTLSMESAVNTYKYAKIHNAPELALFCEGFFLKHMKALLEQDAFRQLIYGRSSKVQGLDPLQDLQNTLAERVHSVYITSRV

SEQ ID NO: 899 - DNA, 1442 bp, Homo sapiens
ccggacccggagccagcgcggagcacctgcgcccgcggctgacaccttcgctcgcagtttgttcgcagtttactcgcacaccagtttcccccaccgcgctttggattagtgtgatctcagctcaaggcaaaggtgggatatcatggcatctatctgggttggacaccgaggaacagtaagagattatccagactttagcccatcagtggatgctgaagctattcagaaagcaatcagaggaattggaactgatgagaaaatgctcatcagcattctgactgagaggtcaaatgcacagcggcagctgattgttaaggaatatcaagcagcatatggaaaggagctgaaagatgacttgaagggtgatctctctggccactttgagcatctcatggtggccctagtgactccaccagcagtctttgatgcaaagcagctaaagaaatccatgaagggcgcgggaacaaacgaagatgccttgattgaaatcttaactaccaggacaagcaggcaaatgaaggatatctctcaagcctattatacagtatacaagaagagtcttggagatgacattagttccgaaacatctggtgacttccggaaagctctgttgactttggcagatggcagaagagatgaaagtctgaaagtggatgagcatctggccaaacaagatgcccagattctctataaagctggtgagaacagatggggcacggatgaagacaaattcactgagatcctgtgtttaaggagctttcctcaattaaaactaacatttgatgaatacagaaatatcagccaaaaggacattgtggacagcataaaaggagaattatctgggcattttgaagacttactgttggccatagttaattgtgtgaggaacacgccggcctttttagccgaaagactgcatcgagccttgaagggtattggaactgatgagtttactctgaaccgaataatggtgtccagatcagaaattgaccttttggacattcgaacagagttcaagaagcattatggctattccctatattcagcaattaaatcggatacttctggagactatgaaatcacactcttaaaaatctgtggtggagatgactgaaccaagaagataatctccaaaggtccacgatgggctttcccaacagctccaccttacttcttctcatactatttaagagaacaagcaaatataaacagcaacttgtgttcctaacaggaattttcattgttctataacaacaacaacaaaagcgattattattttagagcatctcatttataatgtagcagctcataaatgaaattgaaaatggtattaaagatctgcaactactatccaacttatatttctgctttcaaagttaagaatctttatagttctactccattaaatataaagcaagataataaaaattgttgcttttgtt

SEQ ID NO: 900 - protein, 323 aa, Homo sapiens
MASIWVGHRGTVRDYPDFSPSVDAEAIQKAIRGIGTDEKMLISILTERSNAQRQLIVKEYQAAYGKELKDDLKGDLSGHFEHLMVALVTPPAVFDAKQLKKSMKGAGTNEDALIEILTTRTSRQMKDISQAYYTVYKKSLGDDISSETSGDFRKALLTLADGRRDESLKVDEHLAKQDAQILYKAGENRWGTDEDKFTEILCLRSFPQLKLTFDEYRNISQKDIVDSIKGELSGHFEDLLLAIVNCVRNTPAFLAERLHRALKGIGTDEFTLNRIMVSRSEIDLLDIRTEFKKHYGYSLYSAIKSDTSGDYEITLLKICGGDD

SEQ ID NO: 901 - DNA, 546 bp, Homo sapiens
gggctggcggccggggagctgcgtagctcccggccccgcggccatgcccaagcggagctgccccttcgcggacgtggccccgctacagctcaaggtccgcgtgagccagagggagttgagccgcggcgtgtgcgccgagcgctactcgcaggaggtcttcgacccatctggggtagcgtccattgcctgttcctcatgcgtgcgagccgtggatgggaaggcggtctgcggtcagtgtgagcgagccctgtgcgggcagtgtgtgcgcacctgctggggctgcggctccgtggcctgtaccctgtgtggcctcgtggactgcagtgacatgtacgagaaagtgctgtgcaccagctgtgccatgttcgagacctgaggctggctcaagccggctgccttcaccgggagccacgccgtgcatggcagccttccctggacgagcgctcggtgttcacactgaactgtggggtcgacgggaggggtgccttttacatgttctattttgtatcctaatgacagaatgaataaacctctttatatttgcac

SEQ ID NO: 902 - protein, 110 aa, Homo sapiens
MPKRSCPFADVAPLQLKVRVSQRELSRGVCAERYSQEVFDPSGVASIACSSCVRAVDGKAVCGQCERALCGQCVRTCWGCGSVACTLCGLVDCSDMYEKVLCTSCAMFET

SEQ ID NO: 903 - DNA, 733 bp, Homo sapiens
gcggccggggagctgcgtagctcccggccccgcggccatgcccaagcggagctgccccttcgcggacgtggccccgctacagctcaaggtccgcgtgagccagagggagttgagccgcggcgtgtgcgccgagcgctactcgcaggaggtcttcgagaagaccaagcgactcctgttcctcggggcccaggcctacctggaccacgtgtgggatgaaggctgtgccgtcgttcacctgccagagtccccaaagcctggccctacaggggccccgagggctgcacgtgggcagatgctgattggaccagacggccgcctgatcaggagccttgggcaggcctccgaagctgacccatctggggtagcgtccattgcctgttcctcatgcgtgcgagccgtggatgggaaggcggtctgcggtcagtgtgagcgagccctgtgcgggcagtgtgtgcgcacctgctggggctgcggctccgtggcctgtaccctgtgtggcctcgtggactgcagtgacatgtacgagaaagtgctgtgcaccagctgtgccatgttcgagacctgaggctggctcaagccggctgccttcaccgggagccacgccgtgcatggcagccttccctggacgagcgctcggtgttcacactgaactgtggggtcgacgggaggggtgccttttacatgttctattttgtatcctaatgacagaatgaataaacctctttatatttgc

SEQ ID NO: 904 - protein, 175 aa, Homo sapiens
MPKRSCPFADVAPLQLKVRVSQRELSRGVCAERYSQEVFEKTKRLLFLGAQAYLDHVWDEGCAVVHLPESPKPGPTGAPRAARGQMLIGPDGRLIRSLGQASEADPSGVASIACSSCVRAVDGKAVCGQCERALCGQCVRTCWGCGSVACTLCGLVDCSDMYEKVLCTSCAMFET

SEQ ID NO: 905 - DNA, 4927 bp, Homo sapiens
acccgcgagcggacggcggccgcgtagtgaggacctggacatcgctgtgtggctggccacggtgcacctggagcagtatgcagacacgttccgacggcatggcctggctacagcaggtgcagcccggggcctgggccacgaggagttgaagcagttgggcatcagcgccacagggcaccggaaacgcattctacgcctgctacagacaggcaccgaagagggctccctggatcccaaatcagatagtgccatggaaccatcccccagcccagccccgcaagcccagccccctaagcccgtgccgaagcccaggaccgtgtttggtggactcagtggccctgccaccactcagagacctgggctgagcccagccctcgggggaccaggagtgtccaggagcccagagcccagcccaaggcctcctcctctccccacttcctcctctgagcagtcttcagccctaaatactgtggagatgatgcctaattccatctacttcggcctggactcaagaggcagggcacaggcagctcaggacaaggccccagacagctcccaaatctctgcccccacccctgccctcaggcccacaacaggcacagtgcacatcatggatcctggttgcctgtactatggtgtccaacctgtggggactccaggagcccccgacagaagagagagcagaggtgtttgtcagggcagggctgaacacaggctcagcagacaggatctggaggcacgggaggatgctggctatgccagccttgagctacctggagactccaccctcttatcgcccaccctggaaacagaggagaccagtgatgacctcatttcaccctatgccagcttctccttcacggcagaccgcctcacgcccctgctcagtggctggctagacaagctctcccctcagggaaactatgtcttccagagacgctttgtgcagttcaatgggaggagtctgatgtactttggcagtgacaaggaccccttccctaagggtgtgatacctttgactgccattgagatgacccgcagcagcaaggacaacaagttccaggtcatcaccggccagagggtgttcgtgttccgcacagagagcgaggctcagcgggacatgtggtgctccacgctgcagtcctgtctgaaggagcagcgcctcctgggccacccccggcccccccaaccaccccgacccctccgcacgggcatgctggagctgcgtggacacaaggccaaggtgtttgctgccttgagccctggagagctggcactgtacaagagtgagcaggccttctctctgggcatcgggatctgcttcatcgaactgcagggctgcagcgtccgggagaccaagagtcgaagctttgacctgctcacaccccatcgctgcttcagcttcacagccgagtctgggggtgctcggcagagctgggcggccgctctgcaggaagcagtaaccgagaccctgtctgactacgaggtggctgagaagatctggtctaatcgggccaaccggcagtgtgcggactgtgggtcctcccgcccagattgggctgctgtcaatttgggggtggtcatctgcaagcagtgtgcaggtcagcaccgggccctgggttctgggatctccaaggtgcagagcctgaagctggacacgagtgtctggagtaatgagatagtacagttattcattgtcctgggaaatgatcgtgccaaccgcttctgggcagggaccctacccccaggtgagggactacatccagatgcgacccctggcccccggggagagttcatctcccgaaagtaccgtctgggtctcttccggaagccccaccctcagtacccagatcatagccagcttctccaggcactgtgtgcagctgtggcaagacccaacctgctgaagaacatgacccagctcctctgtgttgaggcctttgaagacccctcccctggtgtgtacaatgaggtggtggtgcgtgctacttacagcggcttcctgtactgcagtcccgtcagcaacaaagctggaccctcaccccctcgcaggggccgggatgctcccccgcgcctttggtgtgtgctgggagcagctctggaaatgtttgcatcggaaaacagccctgaacccctcagcctcatacagccccaggatattgtatgtctgggtgtgagccccccacccactgacccaggtgacaggttccccttttcctttgagctcatcctcgctggggggaggatccagcattttggcacagatggagctgacagtctggaggcctggactagtgctgtgggcaagtggttctccccgctgagctgccaccagctgctgggccccgggctgctgcggctgggccgcctatggctgcggtccccctcccatacagccccggcccctggtctctggctgtcagggtttggcctccttcgtggtgaccacctcttcctgtgctcagcgccgggcccaggccccccagcccctgaggacatggtgcatctgcggcggctacaggagatcagtgtggtttctgcagctgacaccccagataagaaagagcatttggtcctggtggagacaggaaggaccctgtatctgcaaggagagggccggctggacttcacggcatggaacgcagccattgggggcgcggctggtgggggcggcacagggctgcaggagcagcagatgagccggggtgacatccccatcatcgtggatgcctgcatcagttttgttacccagcatgagctgccccagaagaatcagcgcctggagaaatataaagatgtgattggctgcctgccgcgggtcaaccgccgcacactggccaccctcattgggcatctctatcgggtgcagaaatgtgcggctctaaaccagatgtgcacgcggaacttggctctgctgtttgcacccagcgtgttccagacggatgggcgaggggagcacgaggtgcgagtgctgcaagagctcattgatggctacatctctgtctttgatatcgattctgaccaggtagctcagattgacttggaggtcagtcttatcaccacctggaaggacgtgcagctgtctcaggctggagacctcatcatggaagtttatatagagcagcagctcccagacaactgtgtcaccctgaaggtgtccccaaccctgactgctgaggagctgactaaccaggtactggagatgcgggggacagcagctgggatggacttgtgggtgacttttgagattcgcgagcatggggagctggagcggccactgcatcccaaggaaaaggtcttagagcaggctttacaatggtgccagctcccagagccctgctcagcttccctgctcttgaaaaaagtccccctggcccaagctggctgcctcttcacaggtatccgacgtgagagcccacgggtggggctgttgcggtgtcgtgaggagccacctcgcttgctgggaagccgcttccaggagaggttctttctgctgcgtggccgctgcctgctgctgctcaaggagaagaaaagctctaaaccagaacgggagtggcctttggaaggtgccaaggtctacctgggaatccgcaagaagttaaagcccccaacaccgtggggcttcacattgatactagagaagatgcacctctacttgtcctgcactgacgaggatgaaatgtgggattggaccaccagcatccttaaagcccagcacgatgaccagcagccagtggtcttacgacgccattcctcctctgaccttgcccgtcagaagtttggcactatgcctttgctgcctatccgtggggatgacagtggagccaccctcctctctgccaatcagaccctgcggcgactacacaaccggaggaccctgtccatgttctttccaatgaagtcatcccaggggtctgtggaggagcaagaggagctggaggagcctgtgtacgaggagccagtgtatgaggaagtaggggccttccctgagttgatccaggacacttctacctccttctccaccacacgggagtggacagtgaagccagagaaccccctcaccagccagaagtcattggatcaaccctttctctccaagtcaagcacccttggccaggaggagaggccacctgagccccctccaggccccccttcaaagagcagtccccaggcacgggggtccctagaggaacagctgctccaggagctcagcagcctcatcctgaggaaaggagagaccactgcaggcctgggaagtccttcccagccatccagcccccaatcccccagccccactggccttccaacacagacacctggcttccccacccaacccccatgcacttccagtccaccctccagccagcccctcacatgaccctaggaccagcagtctgagagggtaggtaccagaagacccagaaactcttatcgtggcactgttgcagcttcctctgccctggctggaaagactccagaatccagtgtggtgctgtggaaggagcactggactaaaggcttcagtggctgcgtgtcccaggacaggtcatggcccctctctgggcccagcccatttatctataccatgaggtaactgaagtaaggagagcagtgaatgtcaaactgtgtttcttagagccataagccccacatattatccctgaacaagggcagctcctgctttatatatttgatacgtaggggttccatgagagattttgggttttaaaggaatggttttactgcattaaagaaaaaaaatgctttggaaaccagaggcctgggtgatgttaaagtctatcctgtcccacttcctacattctgggactaccgtgaagcctggagtagggagagcgagtttgggagctgggactcggggagtcaaaaatagatgagtaattgtcaataaacctgggaaccaaaagac

SEQ ID NO: 906 - protein, 74 aa, Homo sapiens
MKCGIGPPASLKPSTMTSSQWSYDAIPPLTLPVRSLALCLCCLSVGMTVEPPSSLPIRPCGDYTTGGPCPCSFQ

SEQ ID NO: 907 - DNA, 5533 bp, Homo sapiens
ctcagttggatgtgcagtcaggcaggagcagagctttgacccagacccagggtgggcaggaactgaggggccaactctagcactgacttactgtgaacctggggcaagccccttcccctctctgggcctcagtttccttaacttcaaatgaagtcccttccctaagtagagagccattgctgttgttctgggatggctctgcttccagatcgcaggcctttcagcatctttctttggaggaagattggaggctggtgctcactgtccaggcctcagactctggggcagagagggggattctcagcctgagccctcccttcaccctgcccctccccccagcaatggcctgagcccccatggctgcccctcaggacctggacatcgctgtgtggctggccacggtgcacctggagcagtatgcagacacgttccgacggcatggcctggctacagcaggtgcagcccggggcctgggccacgaggagttgaagcagttgggcatcagcgccacagggcaccggaaacgcattctacgcctgctacagacaggcaccgaagagggctccctggatcccaaatcagatagtgccatggaaccatcccccagcccagccccgcaagcccagccccctaagcccgtgccgaagcccaggaccgtgtttggtggactcagtggccctgccaccactcagagacctgggctgagcccagccctcgggggaccaggagtgtccaggagcccagagcccagcccaaggcctcctcctctccccacttcctcctctgagcagtcttcagccctaaatactgtggagatgatgcctaattccatctacttcggcctggactcaagaggcagggcacaggcagctcaggacaaggccccagacagctcccaaatctctgcccccacccctgccctcaggcccacaacaggcacagtgcacatcatggatcctggttgcctgtactatggtgtccaacctgtggggactccaggagcccccgacagaagagagagcagaggtgtttgtcagggcagggctgaacacaggctcagcagacaggatctggaggcacgggaggatgctggctatgccagccttgagctacctggagactccaccctcttatcgcccaccctggaaacagaggagaccagtgatgacctcatttcaccctatgccagcttctccttcacggcagaccgcctcacgcccctgctcagtggctggctagacaagctctcccctcagggaaactatgtcttccagagacgctttgtgcagttcaatgggaggagtctgatgtactttggcagtgacaaggaccccttccctaagggtgtgatacctttgactgccattgagatgacccgcagcagcaaggacaacaagttccaggtcatcaccggccagagggtgttcgtgttccgcacagagagcgaggctcagcgggacatgtggtgctccacgctgcagtcctgtctgaaggagcagcgcctcctgggccacccccggcccccccaaccaccccgacccctccgcacgggcatgctggagctgcgtggacacaaggccaaggtgtttgctgccttgagccctggagagctggcactgtacaagagtgagcaggccttctctctgggcatcgggatctgcttcatcgaactgcagggctgcagcgtccgggagaccaagagtcgaagctttgacctgctcacaccccatcgctgcttcagcttcacagccgagtctgggggtgctcggcagagctgggcggccgctctgcaggaagcagtaaccgagaccctgtctgactacgaggtggctgagaagatctggtctaatcgggccaaccggcagtgtgcggactgtgggtcctcccgcccagattgggctgctgtcaatttgggggtggtcatctgcaagcagtgtgcaggtcagcaccgggccctgggttctgggatctccaaggtgcagagcctgaagctggacacgagtgtctggagtaatgagatagtacagttattcattgtcctgggaaatgatcgtgccaaccgcttctgggcagggaccctacccccaggtgagggactacatccagatgcgacccctggcccccggggagagttcatctcccgaaagtaccgtctgggtctcttccggaagccccaccctcagtacccagatcatagccagcttctccaggcactgtgtgcagctgtggcaagacccaacctgctgaagaacatgacccagctcctctgtgttgaggcctttgaaggcgaggagccctggttccccccagcccctgatggcagctgccctggcctcttgccctcagacccctcccctggtgtgtacaatgaggtggtggtgcgtgctacttacagcggcttcctgtactgcagtcccgtcagcaacaaagctggaccctcaccccctcgcaggggccgggatgctcccccgcgcctttggtgtgtgctgggagcagctctggaaatgtttgcatcggaaaacagccctgaacccctcagcctcatacagccccaggatattgtatgtctgggtgtgagccccccacccactgacccaggtgacaggttccccttttcctttgagctcatcctcgctggggggaggatccagcattttggcacagatggagctgacagtctggaggcctggactagtgctgtgggcaagtggttctccccgctgagctgccaccagctgctgggccccgggctgctgcggctgggccgcctatggctgcggtccccctcccatacagccccggcccctggtctctggctgtcagggtttggcctccttcgtggtgaccacctcttcctgtgctcagcgccgggcccaggccccccagcccctgaggacatggtgcatctgcggcggctacaggagatcagtgtggtttctgcagctgacaccccagataagaaagagcatttggtcctggtggagacaggaaggaccctgtatctgcaaggagagggccggctggacttcacggcatggaacgcagccattgggggcgcggctggtgggggcggcacagggctgcaggagcagcagatgagccggggtgacatccccatcatcgtggatgcctgcatcagttttgttacccagcatgggctccggctggaaggtgtataccggaaagggggcgctcgtgcccgcagcctgagactcctggctgagttccgtcgggatgcccggtcggtgaagctccgaccaggggagcactttgtggaggatgtcactgacacactcaaacgcttctttcgtgagctcgatgaccctgtgacctctgcacggttgctgcctcgctggagggaggctgctgagctgccccagaagaatcagcgcctggagaaatataaagatgtgattggctgcctgccgcgggtcaaccgccgcacactggccaccctcattgggcatctctatcgggtgcagaaatgtgcggctctaaaccagatgtgcacgcggaacttggctctgctgtttgcacccagcgtgttccagacggatgggcgaggggagcacgaggtgcgagtgctgcaagagctcattgatggctacatctctgtctttgatatcgattctgaccaggtagctcagattgacttggaggtcagtcttatcaccacctggaaggacgtgcagctgtctcaggctggagacctcatcatggaagtttatatagagcagcagctcccagacaactgtgtcaccctgaaggtgtccccaaccctgactgctgaggagctgactaaccaggtactggagatgcgggggacagcagctgggatggacttgtgggtgacttttgagattcgcgagcatggggagctggagcggccactgcatcccaaggaaaaggtcttagagcaggctttacaatggtgccagctcccagagccctgctcagcttccctgctcttgaaaaaagtccccctggcccaagctggctgcctcttcacaggtatccgacgtgagagcccacgggtggggctgttgcggtgtcgtgaggagccacctcgcttgctgggaagccgcttccaggagaggttctttctgctgcgtggccgctgcctgctgctgctcaaggagaagaaaagctctaaaccagaacgggagtggcctttggaaggtgccaaggtctacctgggaatccgcaagaagttaaagcccccaacaccgtggggcttcacattgatactagagaagatgcacctctacttgtcctgcactgacgaggatgaaatgtgggattggaccaccagcatccttaaagcccagcacgatgaccagcagccagtggtcttacgacgccattcctcctctgaccttgcccgtcagaagtttggcactatgcctttgctgcctatccgtggggatgacagtggagccaccctcctctctgccaatcagaccctgcggcgactacacaaccggaggaccctgtccatgttctttccaatgaagtcatcccaggggtctgtggaggagcaagaggagctggaggagcctgtgtacgaggagccagtgtatgaggaagtaggggccttccctgagttgatccaggacacttctacctccttctccaccacacgggagtggacagtgaagccagagaaccccctcaccagccagaagtcattggatcaaccctttctctccaagtcaagcacccttggccaggaggagaggccacctgagccccctccaggccccccttcaaagagcagtccccaggcacgggggtccctagaggaacagctgctccaggagctcagcagcctcatcctgaggaaaggagagaccactgcaggcctgggaagtccttcccagccatccagcccccaatcccccagccccactggccttccaacacagacacctggcttccccacccaacccccatgcacttccagtccaccctccagccagcccctcacatgaccctaggaccagcagtctgagagggtaggtaccagaagacccagaaactcttatcgtggcactgttgcagcttcctctgccctggctggaaagactccagaatccagtgtggtgctgtggaaggagcactggactaaaggcttcagtggctgcgtgtcccaggacaggtcatggcccctctctgggcccagcccatttatctataccatgaggtaactgaagtaaggagagcagtgaatgtcaaactgtgtttcttagagccataagccccacatattatccctgaacaagggcagctcctgctttatatatttgatacgtaggggttccatgagagattttgggttttaaaggaatggttttactgcattaaagaaaaaaaatgctttggaaaccagaggcctgggtgatgttaaagtctatcctgtcccacttcctacattctgggactaccgtgaagcctggagtagggagagcgagtttgggagctgggactcggggagtcaaaaatagatgagtaattgtcaataaacctgggaacc

SEQ ID NO: 908 - protein, 1544 aa, Homo sapiens
MAAPQDLDIAVWLATVHLEQYADTFRRHGLATAGAARGLGHEELKQLGISATGHRKRILRLLQTGTEEGSLDPKSDSAMEPSPSPAPQAQPPKPVPKPRTVFGGLSGPATTQRPGLSPALGGPGVSRSPEPSPRPPPLPTSSSEQSSALNTVEMMPNSIYFGLDSRGRAQAAQDKAPDSSQISAPTPALRPTTGTVHIMDPGCLYYGVQPVGTPGAPDRRESRGVCQGRAEHRLSRQDLEAREDAGYASLELPGDSTLLSPTLETEETSDDLISPYASFSFTADRLTPLLSGWLDKLSPQGNYVFQRRFVQFNGRSLMYFGSDKDPFPKGVIPLTAIEMTRSSKDNKFQVITGQRVFVFRTESEAQRDMWCSTLQSCLKEQRLLGHPRPPQPPRPLRTGMLELRGHKAKVFAALSPGELALYKSEQAFSLGIGICFIELQGCSVRETKSRSFDLLTPHRCFSFTAESGGARQSWAAALQEAVTETLSDYEVAEKIWSNRANRQCADCGSSRPDWAAVNLGVVICKQCAGQHRALGSGISKVQSLKLDTSVWSNEIVQLFIVLGNDRANRFWAGTLPPGEGLHPDATPGPRGEFISRKYRLGLFRKPHPQYPDHSQLLQALCAAVARPNLLKNMTQLLCVEAFEGEEPWFPPAPDGSCPGLLPSDPSPGVYNEVVVRATYSGFLYCSPVSNKAGPSPPRRGRDAPPRLWCVLGAALEMFASENSPEPLSLIQPQDIVCLGVSPPPTDPGDRFPFSFELILAGGRIQHFGTDGADSLEAWTSAVGKWFSPLSCHQLLGPGLLRLGRLWLRSPSHTAPAPGLWLSGFGLLRGDHLFLCSAPGPGPPAPEDMVHLRRLQEISVVSAADTPDKKEHLVLVETGRTLYLQGEGRLDFTAWNAAIGGAAGGGGTGLQEQQMSRGDIPIIVDACISFVTQHGLRLEGVYRKGGARARSLRLLAEFRRDARSVKLRPGEHFVEDVTDTLKRFFRELDDPVTSARLLPRWREAAELPQKNQRLEKYKDVIGCLPRVNRRTLATLIGHLYRVQKCAALNQMCTRNLALLFAPSVFQTDGRGEHEVRVLQELIDGYISVFDIDSDQVAQIDLEVSLITTWKDVQLSQAGDLIMEVYIEQQLPDNCVTLKVSPTLTAEELTNQVLEMRGTAAGMDLWVTFEIREHGELERPLHPKEKVLEQALQWCQLPEPCSASLLLKKVPLAQAGCLFTGIRRESPRVGLLRCREEPPRLLGSRFQERFFLLRGRCLLLLKEKKSSKPEREWPLEGAKVYLGIRKKLKPPTPWGFTLILEKMHLYLSCTDEDEMWDWTTSILKAQHDDQQPVVLRRHSSSDLARQKFGTMPLLPIRGDDSGATLLSANQTLRRLHNRRTLSMFFPMKSSQGSVEEQEELEEPVYEEPVYEEVGAFPELIQDTSTSFSTTREWTVKPENPLTSQKSLDQPFLSKSSTLGQEERPPEPPPGPPSKSSPQARGSLEEQLLQELSSLILRKGETTAGLGSPSQPSSPQSPSPTGLPTQTPGFPTQPPCTSSPPSSQPLT

SEQ ID NO: 909 - DNA, 4017 bp, Homo sapiens
ggtctcgggttgcgcgctgggcctggagggagggggcggcccccgcaccggtccgagttgcggccgcgtggactgcgacccgcgccgcgccgcaccgcgccgcgccctgggaacgccgctccccgcgcgccaacggacccggggaagcccttctggggtccgaggccgcgctgcggggccgcccacgctgcgctccaggagccagagcctgcagggtgggtgtcgggacatgctgatcttccctcaagacagctggcgggcgctctggtcatggaggactgcaatgtgcactcggccgccagcatcctggcctcggtgaaggagcaggaggcccgcttcgagaggctgacacgggcactggagcaggagcggcgccatgttgccctacagctggagcgtgcccagcagcctggcatggtcagtggtggcatgggcagtgggcagcccctgccaatggcctggcaacagctggtcctccaggagcagagcccaggcagccaggcctcactggccacgatgccggaggcacctgatgtgctggaggagaccgtgacggtggaggaggaccccggcacacccacttcccatgtgtctattgtcacatccgaagatggcacaacccggcgcaccgagaccaaggtcaccaagactgtcaagacggtgaccactcggacagtacgccaggtgcccgtgggcccagatggactccccctgctggatggcggccccccactaggcccttttgcagatggtgccctggaccggcatttcctgctgcgtggtggtggcccagtggccacactctctcgagcctacctcagcagtgggggtggctttcccgaaggccccgagccccgggacagccccagctatggcagcctgtcccgagggctgggcatgcggcccccacgtgctggcccccttggcccaggccctggtgatggctgcttcacactgcctggccaccgggaagccttcccggtgggtcctgagcctgggccaccaggtggccgctccctgcccgagcgcttccaggcagagccgtatggcttggaggatgacacgcgcagcctggccgctgatgacgagggtggccctgagctggagcctgactatggcacggccacaaggaggaggcctgagtgtgggcggggccttcataccagggcctacgaggacacagcagatgatggcggcgagctggcggacgagcggcctgcgttcccaatggtgacggcgcccctggcccagcctgaacggggcagcatgggcagcctggaccggctggtgcggcgctcgccctcagtggatagcgcccgcaaggagccgcgctggcgggaccctgagctgcctgaggtgctggccatgctgcggcaccccgtggaccccgtgaaggccaatgcggccgcctacctgcagcatctgtgctttgagaacgagggtgtcaagcggcgtgtacggcagttgcgggggctgccgctgcttgtggcactgctggaccacccgcgggctgaggtgcggcgccgggcctgtggggcactgcgcaacctctcctatggccgcgacactgacaacaaggccgccatccgggactgcggtggtgtgcctgccctggtgcgcctgctgagggctgcccgggacaacgaggtccgtgagcttgtcactggcaccctgtggaacctgtcatcctatgagcccctgaagatggtcatcattgaccatggcctgcagacgctgacccacgaggtgatcgtgccccactcaggatgggagcgtgagcccaacgaggactccaagccacgggacgccgagtggacaactgtcttcaagaacacgtcgggctgcctgaggaatgtgagctccgatggtgctgaggcccggcggcgactccgggagtgtgaagggctggtggacgcgctcctgcatgccctgcagtcggctgtgggccggaaggacactgacaacaagtcggtggagaactgcgtgtgcatcatgcggaacctgtcctaccacgtgcacaaggaggtgcccggggccgacaggtaccaggaggccgagcccgggcccctgggcagtgctgtaggctcccagcgccggaggcgggatgatgccagctgctttggaggcaagaaggccaaagaggagtggttccaccaaggaaagaaggatggtgagatggaccggaactttgacacgctagacctgcccaagcgaactgaggccgccaaaggctttgagctgctgtaccagcccgaggtggtacgtctctacctctccctcctcacggagagccggaacttcaacaccctggaggctgccgccggcgctctgcagaacctcagtgccggcaactggatgtgggccacgtacatccgcgccacagtgcgcaaagagcgcgggctgccggtgcttgtggaactgctgcagtctgagaccgacaaggtggtgcgcgccgtcgccatcgctctgcgcaacctctcgctggaccggcgcaacaaagacctcatcgggagctacgccatggctgagcttgtgcggaatgtgcgcaatgcacaggctccgccgcgaccgggggcctgcctggaggaagacaccgtggtggcggtgctcaacaccatccacgaaatcgtgtccgacagcctggataacgcgcgctcgctcctgcaggcacgcggggtgccagcgttggtggctctcgtggcctccagccaatcggtacgcgaagcgaaggcggcgtcacacgtgctgcagacagtgtggagctacaaggagctgcgtggtaccttgcagaaagatggttggaccaaggcgcgcttccagtcagctgctgctactgccaaggggcctaagggagcactgagtcctgggggcttcgatgacagcacgctgccactggtggacaagagccttgagggcgagaaaactggcagccgggatgtgatccccatggatgcgctgggcccagacggatactccacggtggaccggagggagcggaggccacggggcgccagctctgcaggagaggcctctgagaaggaacccttgaaactcgaccccagcaggaaggcccctccccccgggcccagcaggcccgcggtcaggctggtggacgccgtaggggacgctaagcctcagcccgttgattcctgggtctagcttgcatgcctgggcccaggcccagcctcttgttcttagggcttggatcgtggaagaagggccaccctgagcagatcgtgccgtggagcttggagccccctggcggcaggggttggcagcgcctcgccccagccaagcctgactttggggacaccctcctgcccccccaccccactccccccatcctacctaactccctaggcctgagttagctgtttactgacatggtgctgtgtgtgagcgagtgacagaaggcccgaggaggccgactgggctgctggggcagggcccagggaggtggcagggaagggtgcctggctgggctttggggctggtgggataggagggtgcccctgggaacacagtgccccagtggtgcgggccaggtctggcgccaggggcaggcagctaggcagggagggggctgggaaagaacttggacttctaaaggcggagggtctccctgggcaccctgcaggcaggcagaccacggtgtggggggtgccccacaaggcccagccctgggcaaggaagctttggaagcagcaaggtgggggtcaggctacaggtgccccacctccccagagccctgcagtcacgtgaggcccctgtgcagtagagagcctttctccagcccatgctggctggggccggggctgccgcatctgcctggagcctgggcagcacctccgggactgaccttcggcagtggctgggggactgctttcagtgcctgctgttcgtgactcagaaacagaagaaaaacactgagaaaaagcattaaaaataagccaaaataagactattggtaaacacctaaatttttgtaagaaaatttaaaaattaaagcagcaaagg

SEQ ID NO: 910 - protein, 962 aa, Homo sapiens
MEDCNVHSAASILASVKEQEARFERLTRALEQERRHVALQLERAQQPGMVSGGMGSGQPLPMAWQQLVLQEQSPGSQASLATMPEAPDVLEETVTVEEDPGTPTSHVSIVTSEDGTTRRTETKVTKTVKTVTTRTVRQVPVGPDGLPLLDGGPPLGPFADGALDRHFLLRGGGPVATLSRAYLSSGGGFPEGPEPRDSPSYGSLSRGLGMRPPRAGPLGPGPGDGCFTLPGHREAFPVGPEPGPPGGRSLPERFQAEPYGLEDDTRSLAADDEGGPELEPDYGTATRRRPECGRGLHTRAYEDTADDGGELADERPAFPMVTAPLAQPERGSMGSLDRLVRRSPSVDSARKEPRWRDPELPEVLAMLRHPVDPVKANAAAYLQHLCFENEGVKRRVRQLRGLPLLVALLDHPRAEVRRRACGALRNLSYGRDTDNKAAIRDCGGVPALVRLLRAARDNEVRELVTGTLWNLSSYEPLKMVIIDHGLQTLTHEVIVPHSGWEREPNEDSKPRDAEWTTVFKNTSGCLRNVSSDGAEARRRLRECEGLVDALLHALQSAVGRKDTDNKSVENCVCIMRNLSYHVHKEVPGADRYQEAEPGPLGSAVGSQRRRRDDASCFGGKKAKEEWFHQGKKDGEMDRNFDTLDLPKRTEAAKGFELLYQPEVVRLYLSLLTESRNFNTLEAAAGALQNLSAGNWMWATYIRATVRKERGLPVLVELLQSETDKVVRAVAIALRNLSLDRRNKDLIGSYAMAELVRNVRNAQAPPRPGACLEEDTVVAVLNTIHEIVSDSLDNARSLLQARGVPALVALVASSQSVREAKAASHVLQTVWSYKELRGTLQKDGWTKARFQSAAATAKGPKGALSPGGFDDSTLPLVDKSLEGEKTGSRDVIPMDALGPDGYSTVDRRERRPRGASSAGEASEKEPLKLDPSRKAPPPGPSRPAVRLVDAVGDAKPQPVDSWV

SEQ ID NO: 911 - DNA, 2700 bp, Homo sapiens
atgccggccgaactcagacaggagcagagcccaggcagccaggcctcactggccacgatgccggaggcacctgatgtgctggaggagaccgtgacggtggaggaggaccccggcacacccacttcccatgtgtctattgtcacatccgaagatggcacaacccggcgcaccgagaccaaggtcaccaagactgtcaagacggtgaccactcggacagtacgccaggtgcccgtgggcccagatggactccccctgctggatggcggccccccactaggcccttttgcagatggtgccctggaccggcatttcctgctgcgtggtggtggcccagtggccacactctctcgagcctacctcagcagtgggggtggctttcccgaaggccccgagccccgggacagccccagctatggcagcctgtcccgagggctgggcatgcggcccccacgtgctggcccccttggcccaggccctggtgatggctgcttcacactgcctggccaccgggaagccttcccggtgggtcctgagcctgggccaccaggtggccgctccctgcccgagcgcttccaggcagagccgtatggcttggaggatgacacgcgcagcctggccgctgatgacgagggtggccctgagctggagcctgactatggcacggccacaaggaggaggcctgagtgtgggcggggccttcataccagggcctacgaggacacagcagatgatggcggcgagctggcggacgagcggcctgcgttcccaatggtgacggcgcccctggcccagcctgaacggggcagcatgggcagcctggaccggctggtgcggcgctcgccctcagtggatagcgcccgcaaggagccgcgctggcgggaccctgagctgcctgaggtgctggccatgctgcggcaccccgtggaccccgtgaaggccaatgcggccgcctacctgcagcatctgtgctttgagaacgagggtgtcaagcggcgtgtacggcagttgcgggggctgccgctgcttgtggcactgctggaccacccgcgggctgaggtgcggcgccgggcctgtggggcactgcgcaacctctcctatggccgcgacactgacaacaaggccgccatccgggactgcggtggtgtgcctgccctggtgcgcctgctgagggctgcccgggacaacgaggtccgtgagcttgtcactggcaccctgtggaacctgtcatcctatgagcccctgaagatggtcatcattgaccatggcctgcagacgctgacccacgaggtgatcgtgccccactcaggatgggagcgtgagcccaacgaggactccaagccacgggacgccgagtggacaactgtcttcaagaacacgtcgggctgcctgaggaatgtgagctccgatggtgctgaggcccggcggcgactccgggagtgtgaagggctggtggacgcgctcctgcatgccctgcagtcggctgtgggccggaaggacactgacaacaagtcggtggagaactgcgtgtgcatcatgcggaacctgtcctaccacgtgcacaaggaggtgcccggggccgacaggtaccaggaggccgagcccgggcccctgggcagtgctgtaggctcccagcgccggaggcgggatgatgccagctgctttggaggcaagaaggccaaagaggagtggttccaccaaggaaagaaggatggtgagatggaccggaactttgacacgctagacctgcccaagcgaactgaggccgccaaaggctttgagctgctgtaccagcccgaggtggtacgtctctacctctccctcctcacggagagccggaacttcaacaccctggaggctgccgccggcgctctgcagaacctcagtgccggcaactggatgtgggccacgtacatccgcgccacagtgcgcaaagagcgcgggctgccggtgcttgtggaactgctgcagtctgagaccgacaaggtggtgcgcgccgtcgccatcgctctgcgcaacctctcgctggaccggcgcaacaaagacctcatcgggagctacgccatggctgagcttgtgcggaatgtgcgcaatgcacaggctccgccgcgaccgggggcctgcctggaggaagacaccgtggtggcggtgctcaacaccatccacgaaatcgtgtccgacagcctggataacgcgcgctcgctcctgcaggcacgcggggtgccagcgttggtggctctcgtggcctccagccaatcggtacgcgaagcgaaggcggcgtcacacgtgctgcagacagtgtggagctacaaggagctgcgtggtaccttgcagaaagatggttggaccaaggcgcgcttccagtcagctgctgctactgccaaggggcctaagggagcactgagtcctgggggcttcgatgacagcacgctgccactggtggacaagagccttgagggcgagaaaactggcagccgggatgtgatccccatggatgcgctgggcccagacggatactccacggtggaccggagggagcggaggccacggggcgccagctctgcaggagaggcctctgagaaggaacccttgaaactcgaccccagcaggaaggcccctccccccgggcccagcaggcccgcggtcaggctggtggacgccgtaggggacgctaagcctcagcccgttgattcctgggtctag

SEQ ID NO: 912 - protein, 899 aa, Homo sapiens
MPAELRQEQSPGSQASLATMPEAPDVLEETVTVEEDPGTPTSHVSIVTSEDGTTRRTETKVTKTVKTVTTRTVRQVPVGPDGLPLLDGGPPLGPFADGALDRHFLLRGGGPVATLSRAYLSSGGGFPEGPEPRDSPSYGSLSRGLGMRPPRAGPLGPGPGDGCFTLPGHREAFPVGPEPGPPGGRSLPERFQAEPYGLEDDTRSLAADDEGGPELEPDYGTATRRRPECGRGLHTRAYEDTADDGGELADERPAFPMVTAPLAQPERGSMGSLDRLVRRSPSVDSARKEPRWRDPELPEVLAMLRHPVDPVKANAAAYLQHLCFENEGVKRRVRQLRGLPLLVALLDHPRAEVRRRACGALRNLSYGRDTDNKAAIRDCGGVPALVRLLRAARDNEVRELVTGTLWNLSSYEPLKMVIIDHGLQTLTHEVIVPHSGWEREPNEDSKPRDAEWTTVFKNTSGCLRNVSSDGAEARRRLRECEGLVDALLHALQSAVGRKDTDNKSVENCVCIMRNLSYHVHKEVPGADRYQEAEPGPLGSAVGSQRRRRDDASCFGGKKAKEEWFHQGKKDGEMDRNFDTLDLPKRTEAAKGFELLYQPEVVRLYLSLLTESRNFNTLEAAAGALQNLSAGNWMWATYIRATVRKERGLPVLVELLQSETDKVVRAVAIALRNLSLDRRNKDLIGSYAMAELVRNVRNAQAPPRPGACLEEDTVVAVLNTIHEIVSDSLDNARSLLQARGVPALVALVASSQSVREAKAASHVLQTVWSYKELRGTLQKDGWTKARFQSAAATAKGPKGALSPGGFDDSTLPLVDKSLEGEKTGSRDVIPMDALGPDGYSTVDRRERRPRGASSAGEASEKEPLKLDPSRKAPPPGPSRPAVRLVDAVGDAKPQPVDSWV

SEQ ID NO: 913 - DNA, 1447 bp, Homo sapiens
ggccggctagagccgggggctgggcggggaccgggcttgtcggtgaagcggcagtggcggcggcggcggcggctcggcaggcgggttcaggcttcgggggccagccgccgccatgatcctgctggaggtgaacaaccgcatcatcgaggagacgctcgcgctcaagttcgagaacgcggccgccggaaacaaaccggaagcagtagaagtaacatttgcagatttcgatggggtcctctatcatatttcaaatcctaatggagacaaaacaaaagtgatggtcagtatttctttgaaattctacaaggaacttcaggcacatggtgctgatgagttattaaagagggtgtacgggagtttcttggtaaatccagaatcaggatacaatgtctctttgctatatgaccttgaaaatcttccggcatccaaggattccattgtgcatcaagctggcatgttgaagcgaaattgttttgcctctgtctttgaaaaatacttccaattccaagaagagggcaaggaaggagagaacagggcagttatccattatagggatgatgagaccatgtatgttgagtctaaaaaggacagagtcacagtagtcttcagcacagtgtttaaggatgacgacgatgtggtcattggaaaggtgttcatgcaggagttcaaagaaggacgcagagccagccacacagccccacaggtcctctttagccacagggaacctcctctggagctgaaagacacagacgccgctgtgggtgacaacattggctacattacctttgtgctgttccctcgtcacaccaatgccagtgctcgagacaacaccatcaacctgatccacacgttccgggactacctgcactaccacatcaagtgctctaaggcctatattcacacacgtatgcgggcgaaaacgtctgacttcctcaaggtgctgaaccgcgcacgcccagatgccgagaaaaaagaaatgaaaacaatcacggggaagacgttttcatcccgctaatcttgggaataagaggaggaagcggctggcaactgaaggctggaacacttgctactggataatcgtagcttttaatgttgcgcctcttcaggttcttaagggattctccgttttggttccattttgtacacgtttggaaaataatctgcagaaacgagctgtgcttgcaaagacttcatagttcccaagaattaaaaaaaaaaaaaaaagaattccacttgatcaacttaattccttttctttatcttccctccctcacttcccttttctcccaccctcttttccaagctgtttcgctttgcaatatattactggtaatgagttgcaggataatgcagtcataacttgttttctcctaagtatttgagttcaaaactcctgtatctaaagaaatacggttggggtcattaataaagaaaatctttctatctt

SEQ ID NO: 914 - protein, 300 aa, Homo sapiens
MILLEVNNRIIEETLALKFENAAAGNKPEAVEVTFADFDGVLYHISNPNGDKTKVMVSISLKFYKELQAHGADELLKRVYGSFLVNPESGYNVSLLYDLENLPASKDSIVHQAGMLKRNCFASVFEKYFQFQEEGKEGENRAVIHYRDDETMYVESKKDRVTVVFSTVFKDDDDVVIGKVFMQEFKEGRRASHTAPQVLFSHREPPLELKDTDAAVGDNIGYITFVLFPRHTNASARDNTINLIHTFRDYLHYHIKCSKAYIHTRMRAKTSDFLKVLNRARPDAEKKEMKTITGKTFSSR

SEQ ID NO: 915 - DNA, 1186 bp, Homo sapiens
gcagggccgctccctccgtccttgcctcccttacccaccctcaccggcccttgtttctccttcccctgggggcagccgccgccatgatcctgctggaggtgaacaaccgcatcatcgaggagacgctcgcgctcaagttcgagaacgcggccgccggaaacaaaccggaagcagtagaagtaacatttgcagatttcgatggggtcctctatcatatttcaaatcctaatggagacaaaacaaaagtgatggtcagtatttctttgaaattctacaaggaacttcaggcacatggtgctgatgagttattaaagagggtgtacgggagtttcttggtaaatccagaatcaggatacaatgtctctttgctatatgaccttgaaaatcttccggcatccaaggattccattgtgcatcaagctggcatgttgaagcgaaattgttttgcctctgtctttgaaaaatacttccaattccaagaagagggcaaggaaggagagaacagggcagttatccattatagggatgatgagaccatgtatgttgagtctaaaaaggacagagtcacagtagtcttcagcacagtgtttaaggatgacgacgatgtggtcattggaaaggtgttcatgcaggagttcaaagaaggacgcagagccagccacacagccccacaggtcctctttagccacagggaacctcctctggagctgaaagacacagacgccgctgtgggtgacaacattggctacattacctttggttgctgtgctgttccctcgtcacaccaatgccagtgctcgagacaacaccatcaacctgatccacacgttccgggactacctgcactaccacatcaagtgctctaaggcctatattcacacacgtatgcgggcgaaaacgtctgacttcctcaaggtgctgaaccgcgcacgcccagatgccgagaaaaaagaaatgaaaacaatcacggggaagacgttttcatcccgctaatcttgggaataagaggaggaagcggctggcaactgaaggctggaacacttgctactggataatcgtagcttttaatgttgcgcctcttcaggttcttaagggattctccgttttggttccattttgtacacgtttggaaaataatctgcagaaacgagctgtgcttgcaaagacttcatagttcccaagaatt

SEQ ID NO: 916 - protein, 205 aa, Homo sapiens
MVSISLKFYKELQAHGADELLKRVYGSFLVNPESGYNVSLLYDLENLPASKDSIVHQAGMLKRNCFASVFEKYFQFQEEGKEGENRAVIHYRDDETMYVESKKDRVTVVFSTVFKDDDDVVIGKVFMQEFKEGRRASHTAPQVLFSHREPPLELKDTDAAVGDNIGYITFGCCAVPSSHQCQCSRQHHQPDPHVPGLPALPHQVL

SEQ ID NO: 917 - DNA, 507 bp, Homo sapiens
gacttggaatggaaaattatctatgtgggctctgcagaaagtgaagaatacgatcaagttttagactctgttttagtgggtcctgttcccgcaggaaggcatatgtttgtatttcaggctgatgcacctaatccaggactcattccagatgcagatgcagtaggcgtaactgttgtgctaattacttgtacctatcgaggacaagaatttattagagttggctattatgtaaataatgaatatactgagacagaattaagggaaaatccaccagtaaaaccagacttttctaagcttcaaaggaatattttggcatctaatcccagggtcacaagattccacattaattgggaagataacacagaaaaactggaagatgcagagagcagtaatccaaatctacagtcacttctttcaacagatgcattaccttcagcatcaaagggatggtccacatcagaaaactcactaaatgtcatgttagaatcccacatggactgcatgtga

SEQ ID NO: 918 - protein, 168 aa, Homo sapiens
DLEWKIIYVGSAESEEYDQVLDSVLVGPVPAGRHMFVFQADAPNPGLIPDADAVGVTVVLITCTYRGQEFIRVGYYVNNEYTETELRENPPVKPDFSKLQRNILASNPRVTRFHINWEDNTEKLEDAESSNPNLQSLLSTDALPSASKGWSTSENSLNVMLESHMDCM

SEQ ID NO: 919 - DNA, 2645 bp, Homo sapiens
tctttttcttttttttttaagaaaaactagtgacattgcagagaaggacgcttcctctctatcttttggcgcattagtgaagggggtattctattttgttaaagcgcccaagggggcgcagggaccttggagagaagagtggggaggaaagaggaagggtgggtggggggcagagggcgagtcggcggcggcgagggcaagctctttcttgcggcacgatgccgtctctgctggtgctcactttctccccgtgcgtactactcggctgggcgttgctggccggcggcaccggtggcggtggcgttggcggcggcggcggtggcgcgggcataggcggcggacgccaggagagagaggcgctgccgccacagaagatcgaggtgctggtgttactgccccaggatgactcgtacttgttttcactcacccgggtgcggccggccatcgagtatgctctgcgcagcgtggagggcaacgggactgggaggcggcttctgccgccgggcactcgcttccaggtggcttacgaggattcagactgtgggaaccgtgcgctcttcagcttggtggaccgcgtggcggcggcgcggggcgccaagccagaccttatcctggggccagtgtgcgagtatgcagcagcgccagtggcccggcttgcatcgcactgggacctgcccatgctgtcggctggggcgctggccgctggcttccagcacaaggactctgagtactcgcacctcacgcgcgtggcgcccgcctacgccaagatgggcgagatgatgctcgccctgttccgccaccaccactggagccgcgctgcactggtctacagcgacgacaagctggagcggaactgctacttcaccctcgagggggtccacgaggtcttccaggaggagggtttgcacacgtccatctacagtttcgacgagaccaaagacttggatctggaagacatcgtgcgcaatatccaggccagtgagagagtggtgatcatgtgtgcgagcagtgacaccatccggagcatcatgctggtggcgcacaggcatggcatgaccagtggagactacgccttcttcaacattgagctcttcaacagctcttcctatggagatggctcatggaagagaggagacaaacacgactttgaagctaagcaagcatactcgtccctccagacagtcactctactgaggacagtgaaacctgagtttgagaagttttccatggaggtgaaaagttcagttgagaaacaagggctcaatatggaggattacgttaacatgtttgttgaaggattccacgatgccatcctcctctacgtcttggctctacatgaagtactcagagctggttacagcaaaaaggatggagggaaaattatacagcagacttggaacagaacatttgaaggtatcgccgggcaggtgtccatagatgccaacggagaccgatatggggatttctctgtgattgccatgactgatgtggaggcgggcacccaggaggttattggtgattattttggaaaagaaggtcgttttgaaatgcggccgaatgtcaaatatccttggggccctttaaaactgagaatagatgaaaaccgaattgtagagcatacaaacagctctccctgcaaatcatcaggtggcctagaagaatcggcagtgacaggaattgtcgtgggggctttactaggagctggcttgctaatggccttctactttttcaggaagaaatacagaataaccattgagaggcgaacccagcaagaagaaagtaaccttggaaaacatcgggaattacgggaagattccatcagatcccatttttcagtagcttaaaggaagccccccactttttttttttctgcctgagattctttaaggagatagacgggttgaaagacatcaatgaaacagaaggggcgttcttgaagaattcataattttaagcagttagtaatttcattttaaaatttctgtagaagctcaggaattatgattaatcaccatctgcctccaggcctttcatctcatgacaaacaaatataataatgatatcgtgtcactctgttaaatgttcatactgtttcaagcccatatgattagatttatgtttttaaaatctgttgtctccatatcttgatggcttttgggagcatttcacacaaggatataaaatgcggttttcttaaatgaaatgttttgtagctagaataaaatcatttttacaagtacagcattcttggaaagaatttaacacccaaaaaggggaaaatgtaatgaaaaatctcaaggttggaaatacagccttactctctctagagctggaggacaggtttgtggttgaggacttctctgtccgatgtctacattcaggttctgacttcatatcttgaaaaaggatttcctccctgtctttttcagtgtctcataaacgctactctggattgttgtaaatattagtgagatgggaggatttacagaagaaaagcaagtcaaaaatatttcctttttgatgtaaaaaaaaaaagccctatttcgcactaacattttattttacaagtattttaatcttatattttggtattagaaaaatttgtctattttttcattttgaagattaaatgttgcttacatttt

SEQ ID NO: 920 - protein, 541 aa, Homo sapiens
MPSLLVLTFSPCVLLGWALLAGGTGGGGVGGGGGGAGIGGGRQEREALPPQKIEVLVLLPQDDSYLFSLTRVRPAIEYALRSVEGNGTGRRLLPPGTRFQVAYEDSDCGNRALFSLVDRVAAARGAKPDLILGPVCEYAAAPVARLASHWDLPMLSAGALAAGFQHKDSEYSHLTRVAPAYAKMGEMMLALFRHHHWSRAALVYSDDKLERNCYFTLEGVHEVFQEEGLHTSIYSFDETKDLDLEDIVRNIQASERVVIMCASSDTIRSIMLVAHRHGMTSGDYAFFNIELFNSSSYGDGSWKRGDKHDFEAKQAYSSLQTVTLLRTVKPEFEKFSMEVKSSVEKQGLNMEDYVNMFVEGFHDAILLYVLALHEVLRAGYSKKDGGKIIQQTWNRTFEGIAGQVSIDANGDRYGDFSVIAMTDVEAGTQEVIGDYFGKEGRFEMRPNVKYPWGPLKLRIDENRIVEHTNSSPCKSSGGLEESAVTGIVVGALLGAGLLMAFYFFRKKYRITIERRTQQEESNLGKHRELREDSIRSHFSVA

SEQ ID NO: 921 - DNA, 3577 bp, Homo sapiens
gaacgtcgagatggagcccaactcactccagtgggtcggctcaccgtgtggcttgcacggaccttacattttctacaaggcttttcaattccaccttgaaggcaaaccaagaattttgtcccttggcgactttttctttgtaagatgtacgccaaaggatccgatttgcatagcggagctccagctgttgtgggaagagaggaccagccggcaacttttatccagctctaaactttatttcctcccagaagacactccccagggcagaaatagcgaccatggcgaggatgaagtcattgctgtttccgaaaaggtgattgtgaagcttgaagacctggtcaagtgggtacattctgatttctccaagtggagatgtggcttccacgctggaccagtgaaaactgaggccttgggaaggaatggacagaaggaagctctgctgaagtacaggcagtcaaccctaaacagtggactcaacttcaaagacgttctcaaggagaaggcagacctgggggaggacgaggaagaaacgaacgtgatagttctcagctacccccagtactgccggtaccgctcgatgctgaaacgcatccaggataagccatcttccattctaacggaccagtttgcattggccctggggggcattgcagtggtcagcaggaaccctcagatcctgtactgtcgggacacctttgaccacccgactctcatagaaaacgagagtatatgcgatgagtttgcgccaaatcttaaaggcagaccacgcaaaaagaaaccatgcccacaaagaagagattcattcagtggtgttaaggattccaacaacaattccgatggcaaagccgttgccaaggtgaaatgtgaggccaggtcagccttgaccaagccgaagaataaccataactgtaaaaaagtctcaaatgaagaaaaaccaaaggttgccattggtgaagagtgcagggcagatgaacaagccttcttggtggcactttataaatacatgaaagaaaggaaaacgccgatagaacgaataccctatttaggttttaaacagattaacctttggactatgtttcaagctgctcaaaaactgggaggatatgaaacaataacagcccgccgtcagtggaaacatatttatgatgaattaggcggtaatcctgggagcaccagcgctgccacttgtacccgcagacattatgaaagattaatcctaccatatgaaagatttattaaaggagaagaagataagcccctgcctccaatcaaacctcggaaacaggagaacagttcacaggaaaatgagaacaaaacaaaagtatctggaaccaaacgcatcaaacatgaaatacctaaaagcaagaaagaaaaagaaaatgccccaaagccccaggatgcagcagaggtttcatcagagcaagaaaaagaacaagagactttaataagccagaaaagcatccctgagcctctcccagcagcagacatgaagaaaaaaatagaagggtatcaggaattttcagcgaagcccctggcatccagagtagacccagagaaggacaacgaaacagaccaaggttccaacagtgagaaggtggcagaggaggcgggagagaaggggcccacacctccactcccaagtgctcctctggccccagaaaaagattcagccttggtccctggggccagcaaacagccactcacctctcctagtgccctggtggactcaaaacaagaatccaaactgtgctgttttacagagagccctgaaagtgaaccccaagaagcatccttccccagcttccccaccacacagccaccgctggcaaaccagaatgagacggaggatgacaaactgcccgccatggcagattacattgccaactgcaccgtgaaggtggaccagctgggcagtgacgacatccacaatgcgctcaagcagaccccaaaggtccttgtggtccagtcgtttgacatgttcaaagacaaagacctgactgggcccatgaacgagaaccatggacttaattacacgcccctgctctactctaggggcaacccaggcatcatgtccccactggccaagaaaaagcttttgtcccaagtgagtggggccagcctctccagcagctacccttatggctccccaccccctttgatcagcaaaaagaaactgattgctagggatgacttgtgttccagtttgtcccagacccaccatggccaaagcactgaccatatggcggtcagccggccatcagtgattcagcacgtccagagtttcagaagcaagccctcggaagagagaaagaccatcaatgacatctttaagcatgagaaactgagtcgatcagatccccaccgctgcagcttctccaagcatcaccttaacccccttgctgactcctacgtcctgaagcaagaaattcaggagggcaaggataaactcttagagaaaagggccctcccccattcccacatgcctagcttcctggctgacttctactcgtcccctcatctccatagcctctacagacacaccgagcaccatcttcataatgaacagacatccaaatacccttccagggacatgtacagggaatcggaaaacagttcttttccttcccacagacaccaagaaaagctccatgtaaattatctcacgtccctgcacctgcaagacaaaaagtcggcggcagcagaagcccctacggatgatcagcctacagatctgagccttcccaagaacccgcacaaacctaccggcaaggtcctgggcctggctcattccaccacagggccccaggagagcaaaggcatctcccagttccaggtcttaggcagccagagtcgagactgtcaccccaaagcctgtcgggtatcacccatgaccatgtcaggccctaaaaaataccctgaatcgctttcaagatcaggaaaacctcaccatgtgagactggagaatttcaggaagatggaaggcatggtccacccaatcctgcaccggaaaatgagcccgcagaacattggggcggcgcggccgatcaagcgcagcctggaggatttggaccttgtgattgcagggaaaaaggcccgggcagtgtctcccttagacccatccaaggaggtctctgggaaggagaaggcctctgagcaggagagtgaaggcagcaaagcagcgcacggtgggcattccgggggcggatcagaaggccacaagcttcccctctcctcccctatcttcccaggtctgtattccgggagcctgtgtaactcgggcctcaactccaggctcccggctgggtattctcattctctgcagtacttgaaaaaccagactgtgctttctccactcatgcagcccctggctttccactcgcttgtgatgcaaagaggaatttttacatcaccgacaaattctcagcagctgtacagacacttggctgcggctacacctgtaggaagttcatatggggaccttttgcataacagcatttaccctttagctgctataaatcctcaagctgcctttccatcttcccagctgtcatccgtgcaccccagtacaaaactgtag

SEQ ID NO: 922 - protein, 1188 aa, Homo sapiens
MEPNSLQWVGSPCGLHGPYIFYKAFQFHLEGKPRILSLGDFFFVRCTPKDPICIAELQLLWEERTSRQLLSSSKLYFLPEDTPQGRNSDHGEDEVIAVSEKVIVKLEDLVKWVHSDFSKWRCGFHAGPVKTEALGRNGQKEALLKYRQSTLNSGLNFKDVLKEKADLGEDEEETNVIVLSYPQYCRYRSMLKRIQDKPSSILTDQFALALGGIAVVSRNPQILYCRDTFDHPTLIENESICDEFAPNLKGRPRKKKPCPQRRDSFSGVKDSNNNSDGKAVAKVKCEARSALTKPKNNHNCKKVSNEEKPKVAIGEECRADEQAFLVALYKYMKERKTPIERIPYLGFKQINLWTMFQAAQKLGGYETITARRQWKHIYDELGGNPGSTSAATCTRRHYERLILPYERFIKGEEDKPLPPIKPRKQENSSQENENKTKVSGTKRIKHEIPKSKKEKENAPKPQDAAEVSSEQEKEQETLISQKSIPEPLPAADMKKKIEGYQEFSAKPLASRVDPEKDNETDQGSNSEKVAEEAGEKGPTPPLPSAPLAPEKDSALVPGASKQPLTSPSALVDSKQESKLCCFTESPESEPQEASFPSFPTTQPPLANQNETEDDKLPAMADYIANCTVKVDQLGSDDIHNALKQTPKVLVVQSFDMFKDKDLTGPMNENHGLNYTPLLYSRGNPGIMSPLAKKKLLSQVSGASLSSSYPYGSPPPLISKKKLIARDDLCSSLSQTHHGQSTDHMAVSRPSVIQHVQSFRSKPSEERKTINDIFKHEKLSRSDPHRCSFSKHHLNPLADSYVLKQEIQEGKDKLLEKRALPHSHMPSFLADFYSSPHLHSLYRHTEHHLHNEQTSKYPSRDMYRESENSSFPSHRHQEKLHVNYLTSLHLQDKKSAAAEAPTDDQPTDLSLPKNPHKPTGKVLGLAHSTTGPQESKGISQFQVLGSQSRDCHPKACRVSPMTMSGPKKYPESLSRSGKPHHVRLENFRKMEGMVHPILHRKMSPQNIGAARPIKRSLEDLDLVIAGKKARAVSPLDPSKEVSGKEKASEQESEGSKAAHGGHSGGGSEGHKLPLSSPIFPGLYSGSLCNSGLNSRLPAGYSHSLQYLKNQTVLSPLMQPLAFHSLVMQRGIFTSPTNSQQLYRHLAAATPVGSSYGDLLHNSIYPLAAINPQAAFPSSQLSSVHPSTKL

SEQ ID NO: 923 - DNA, 3075 bp, Homo sapiens
aaagtcctcaggctcatcccacacactcggtgctagtcactgctgtgtgtttacatgagtaatggagctgccgggggaggggagttgtaagcagagcgctgagcctcgcagctcgcattcggagggaagctgacatccacaccaagtcgagacttccagggatgtggccggggagcagtcacatgctgtagctttcatgagcacaggcatcagtcaggcagatgtttgtcgactggaatggcgccaaatcttaaaggcagaccacgcaaaaagaaaccatgcccacaaagaagagattcattcagtggtgttaaggattccaacaacaattccgatggcaaagccgttgccaaggtgaaatgtgaggccaggtcagccttgaccaagccgaagaataaccataactgtaaaaaagtctcaaatgaagaaaaaccaaaggttgccattggtgaagagtgcagggcagatgaacaagccttcttggtggcactttataaatacatgaaagaaaggaaaacgccgatagaacgaataccctatttaggttttaaacagattaacctttggactatgtttcaagctgctcaaaaactgggaggatatgaaacaataacagcccgccgtcagtggaaacatatttatgatgaattaggcggtaatcctgggagcaccagcgctgccacttgtacccgcagacattatgaaagattaatcctaccatatgaaagatttattaaaggagaagaagataagcccctgcctccaatcaaacctcggaaacaggagaacagttcacaggaaaatgagaacaaaacaaaagtatctggaaccaaacgcatcaaacatgaaatacctaaaagcaagaaagaaaaagaaaatgccccaaagccccaggatgcagcagaggtttcatcagagcaagaaaaagaacaagagactttaataagccagaaaagcatccctgagcctctcccagcagcagacatgaagaaaaaaatagaagggtatcaggaattttcagcgaagcccctggcatccagagtagacccagagaaggacaacgaaacagaccaaggttccaacagtgagaaggtggcagaggaggcgggagagaaggggcccacacctccactcccaagtgctcctctggccccagaaaaagattcagccttggtccctggggccagcaaacagccactcacctctcctagtgccctggtggactcaaaacaagaatccaaactgtgctgttttacagagagccctgaaagtgaaccccaagaagcatccttccccagcttccccaccacacagccaccgctggcaaaccagaatgagacggaggatgacaaactgcccgccatggcagattacattgccaactgcaccgtgaaggtggaccagctgggcagtgacgacatccacaatgcgctcaagcagaccccaaaggtccttgtggtccagtcgtttgacatgttcaaagacaaagacctgactgggcccatgaacgagaaccatggacttaattacacgcccctgctctactctaggggcaacccaggcatcatgtccccactggccaagaaaaagcttttgtcccaagtgagtggggccagcctctccagcagctacccttatggctccccaccccctttgatcagcaaaaagaaactgattgctagggatgacttgtgttccagtttgtcccagacccaccatggccaaagcactgaccatatggcggtcagccggccatcagtgattcagcacgtccagagtttcagaagcaagccctcggaagagagaaagaccatcaatgacatctttaagcatgagaaactgagtcgatcagatccccaccgctgcagcttctccaagcatcaccttaacccccttgctgactcctacgtcctgaagcaagaaattcaggagggcaaggataaactcttagagaaaagggccctcccccattcccacatgcctagcttcctggctgacttctactcgtcccctcatctccatagcctctacagacacaccgagcaccatcttcataatgaacagacatccaaatacccttccagggacatgtacagggaatcggaaaacagttcttttccttcccacagacaccaagaaaagctccatgtaaattatctcacgtccctgcacctgcaagacaaaaagtcggcggcagcagaagcccctacggatgatcagcctacagatctgagccttcccaagaacccgcacaaacctaccggcaaggtcctgggcctggctcattccaccacagggccccaggagagcaaaggcatctcccagttccaggtcttaggcagccagagtcgagactgtcaccccaaagcctgtcgggtatcacccatgaccatgtcaggccctaaaaaataccctgaatcgctttcaagatcaggaaaacctcaccatgtgagactggagaatttcaggaagatggaaggcatggtccacccaatcctgcaccggaaaatgagcccgcagaacattggggcggcgcggccgatcaagcgcagcctggaggatttggaccttgtgattgcagggaaaaaggcccgggcagtgtctcccttagacccatccaaggaggtctctgggaaggagaaggcctctgagcaggagagtgaaggcagcaaagcagcgcacggtgggcattccgggggcggatcagaaggccacaagcttcccctctcctcccctatcttcccaggtctgtattccgggagcctgtgtaactcgggcctcaactccaggctcccggctgggtattctcattctctgcagtacttgaaaaaccagactgtgctttctccactcatgcagcccctggctttccactcgcttgtgatgcaaagaggaatttttacatcaccgacaaattctcagcagctgtacagacacttggctgcggctacacctgtaggaagttcatatggggaccttttgcataacagcatttaccctttagctgctataaatcctcaagctgcctttccatcttcccagctgtcatccgtgcaccccagtacaaaactgtag

SEQ ID NO: 924 - protein, 945 aa, Homo sapiens
MAPNLKGRPRKKKPCPQRRDSFSGVKDSNNNSDGKAVAKVKCEARSALTKPKNNHNCKKVSNEEKPKVAIGEECRADEQAFLVALYKYMKERKTPIERIPYLGFKQINLWTMFQAAQKLGGYETITARRQWKHIYDELGGNPGSTSAATCTRRHYERLILPYERFIKGEEDKPLPPIKPRKQENSSQENENKTKVSGTKRIKHEIPKSKKEKENAPKPQDAAEVSSEQEKEQETLISQKSIPEPLPAADMKKKIEGYQEFSAKPLASRVDPEKDNETDQGSNSEKVAEEAGEKGPTPPLPSAPLAPEKDSALVPGASKQPLTSPSALVDSKQESKLCCFTESPESEPQEASFPSFPTTQPPLANQNETEDDKLPAMADYIANCTVKVDQLGSDDIHNALKQTPKVLVVQSFDMFKDKDLTGPMNENHGLNYTPLLYSRGNPGIMSPLAKKKLLSQVSGASLSSSYPYGSPPPLISKKKLIARDDLCSSLSQTHHGQSTDHMAVSRPSVIQHVQSFRSKPSEERKTINDIFKHEKLSRSDPHRCSFSKHHLNPLADSYVLKQEIQEGKDKLLEKRALPHSHMPSFLADFYSSPHLHSLYRHTEHHLHNEQTSKYPSRDMYRESENSSFPSHRHQEKLHVNYLTSLHLQDKKSAAAEAPTDDQPTDLSLPKNPHKPTGKVLGLAHSTTGPQESKGISQFQVLGSQSRDCHPKACRVSPMTMSGPKKYPESLSRSGKPHHVRLENFRKMEGMVHPILHRKMSPQNIGAARPIKRSLEDLDLVIAGKKARAVSPLDPSKEVSGKEKASEQESEGSKAAHGGHSGGGSEGHKLPLSSPIFPGLYSGSLCNSGLNSRLPAGYSHSLQYLKNQTVLSPLMQPLAFHSLVMQRGIFTSPTNSQQLYRHLAAATPVGSSYGDLLHNSIYPLAAINPQAAFPSSQLSSVHPSTKL

SEQ ID NO: 925 - DNA, 3898 bp, Homo sapiens
ccgcacggccaggcgaagcggagccggccgtgcggtgtgtgtgtatgtgttcgcggggcgccgtctcagccccgggaagatggtggctgcagcggcggcaactgaggcaaggctgaggaggaggacggcggcgacggcagcgctcgcgggcaggagcggcgggccgcactgggactgggacgtgaccagggctgggaggccggggctgggggccgggctgcgcctcccgcggctgctgtctccaccgctgcggccacggctgctgctgctgctgttgttgctctcgccgccgctgctgctgctgctgctgccctgtgaggccgaggccgcggcggcggcggcggcggtgtcgggctcagccgcagccgaggccaaggaatgtgaccggccctgtgtcaacggcggtcgctgcaaccctggcaccggccagtgcgtctgccccgccggctgggtgggcgagcaatgccagcactgcgggggccgcttcagactaactggatcttctgggtttgtgacagatggacctggaaattataaatacaaaacgaagtgcacgtggctcattgaaggacagccaaatagaataatgagacttcgtttcaatcattttgctacagagtgtagttgggaccatttatatgtttatgatggggactcaatttatgcaccgctagttgctgcatttagtggcctcattgttcctgagagagatggcaatgagactgtccctgaggttgttgccacatcaggttatgccttgctgcatttttttagtgatgctgcttataatttgactggatttaatattacttacagttttgatatgtgtccaaataactgctcaggccgaggagagtgtaagatcagtaatagcagcgatactgttgaatgtgaatgttctgaaaactggaaaggtgaagcatgtgacattcctcactgtacagacaactgtggttttcctcatcgaggcatctgcaattcaagtgatgtcagaggatgctcctgcttctcagactggcagggtcctggatgttcagttcctgtaccagctaaccagtcattttggactcgagaggaatattctaacttaaagctccccagagcatctcataaagctgtggtcaatggaaacattatgtgggttgttggaggatatatgttcaaccactcagattataacatggttctagcgtatgaccttgcttctagggagtggcttccactaaaccgttctgtgaacaatgtggttgttagatatggtcattctttggcattatacaaggataaaatttacatgtatggaggaaaaattgattcaactgggaatgtgaccaatgagttgagagtttttcacattcataatgagtcatgggtgttgttgacccctaaggcaaaggagcagtatgcagtggttgggcactctgcacacattgttacactgaagaatggccgagtggtcatgctggtcatctttggtcactgccctctctatggatatataagcaatgtgcaggaatatgatttggataagaacacatggagtatattacacacccagggtgcccttgtgcaagggggttacggccatagcagtgtttacgaccataggaccagggccctatacgttcatggtggctacaaggctttcagtgccaataagtaccggcttgcagatgatctctaccgatatgatgtggatacccagatgtggaccattcttaaggacagccgatttttccgttacttgcacacagctgtgatagtgagtggaaccatgctggtgtttggaggaaacacacacaatgacacatctatgagccatggcgccaaatgcttctcttcagatttcatggcctatgacattgcctgtgaccgctggtcagtgcttcccagacctgatctccaccatgatgtcaacagatttggccattcagcagtcttacacaacagcaccatgtatgtgttcggtggtttcaatagtctcctcctcagcgacatcctggtattcacctcggaacagtgtgatgcgcatcggagtgaagccgcttgtttagcagcaggacctggtattcggtgtgtgtggaacacagggtcgtctcagtgtatctcgtgggcgctggcaactgatgaacaagaagaaaagttaaaatcagaatgtttttccaaaagaactcttgaccatgacagatgtgaccagcacacagattgttacagctgcacagccaacaccaatgactgccactggtgcaatgaccattgtgtccccaggaaccacagctgctcagaaggccagatctccatttttaggtatgagaattgccccaaggataaccccatgtactactgtaacaagaagaccagctgcaggagctgtgccctggaccagaactgccagtgggagccccggaatcaggagtgcattgccctgcccgaaaatatctgtggcattggctggcatttggttggaaactcatgtttgaaaattactactgccaaggagaattatgacaatgctaaattgttctgtaggaaccacaatgcccttttggcttctcttacaacccagaagaaggtagaatttgtccttaagcagctgcgaataatgcagtcatctcagagcatgtccaagctcaccttaaccccatgggtcggccttcggaagatcaatgtgtcctactggtgctgggaagatatgtccccatttacaaatagtttactacagtggatgccgtctgagcccagtgatgctggattctgtggaattttatcagaacccagtactcggggactgaaggctgcaacctgcatcaacccactcaatggtagtgtctgtgaaaggcctgcaaaccacagtgctaagcagtgccggacaccatgtgccttgaggacagcatgtggagattgcaccagcggcagctctgagtgcatgtggtgcagcaacatgaagcagtgtgtggactccaatgcctacgtggcctccttcccttttggccagtgtatggaatggtatacgatgagcacctgcccccctgaaaattgttcaggctactgtacctgtagtcattgcttggagcaaccaggctgtggctggtgtactgatcccagcaatactggcaaagggaaatgcatagagggttcctataaaggaccagtgaagatgccttcgcaagcccctacaggaaatttctatccacagcccctgctcaattccagcatgtgtctagaggacagcagatacaactggtctttcattcactgtccagcttgccaatgcaacggccacagtaaatgcatcaatcagagcatctgtgagaagtgtgagaacctgaccacaggcaagcactgcgagacctgcatatctggcttctacggtgatcccaccaatggagggaaatgtcagccatgcaagtgcaatgggcacgcgtctctgtgcaacaccaacacgggcaagtgcttctgcaccaccaagggcgtcaagggggacgagtgccagctatgtgaggtagaaaatcgataccaaggaaaccctctcagaggaacatgttattatactcttcttattgactatcagttcacctttagtctatcccaggaagatgatcgctattacacagctatcaattttgtggctactcctgacgaacaaaacagggatttggacatgttcatcaatgcctccaagaatttcaacctcaacatcacctgggctgccagtttctcagctggaacccaggctggagaagagatgcctgttgtttcaaaaaccaacattaaggagtacaaagatagtttctctaatgagaagtttgattttcgcaaccacccaaatatcactttctttgtttatgtcagtaatttcacctggcccatcaaaattcaggtgcaaactgaacaatga

SEQ ID NO: 926 - protein, 1272 aa, Homo sapiens
MVAAAAATEARLRRRTAATAALAGRSGGPHWDWDVTRAGRPGLGAGLRLPRLLSPPLRPRLLLLLLLLSPPLLLLLLPCEAEAAAAAAAVSGSAAAEAKECDRPCVNGGRCNPGTGQCVCPAGWVGEQCQHCGGRFRLTGSSGFVTDGPGNYKYKTKCTWLIEGQPNRIMRLRFNHFATECSWDHLYVYDGDSIYAPLVAAFSGLIVPERDGNETVPEVVATSGYALLHFFSDAAYNLTGFNITYSFDMCPNNCSGRGECKISNSSDTVECECSENWKGEACDIPHCTDNCGFPHRGICNSSDVRGCSCFSDWQGPGCSVPVPANQSFWTREEYSNLKLPRASHKAVVNGNIMWVVGGYMFNHSDYNMVLAYDLASREWLPLNRSVNNVVVRYGHSLALYKDKIYMYGGKIDSTGNVTNELRVFHIHNESWVLLTPKAKEQYAVVGHSAHIVTLKNGRVVMLVIFGHCPLYGYISNVQEYDLDKNTWSILHTQGALVQGGYGHSSVYDHRTRALYVHGGYKAFSANKYRLADDLYRYDVDTQMWTILKDSRFFRYLHTAVIVSGTMLVFGGNTHNDTSMSHGAKCFSSDFMAYDIACDRWSVLPRPDLHHDVNRFGHSAVLHNSTMYVFGGFNSLLLSDILVFTSEQCDAHRSEAACLAAGPGIRCVWNTGSSQCISWALATDEQEEKLKSECFSKRTLDHDRCDQHTDCYSCTANTNDCHWCNDHCVPRNHSCSEGQISIFRYENCPKDNPMYYCNKKTSCRSCALDQNCQWEPRNQECIALPENICGIGWHLVGNSCLKITTAKENYDNAKLFCRNHNALLASLTTQKKVEFVLKQLRIMQSSQSMSKLTLTPWVGLRKINVSYWCWEDMSPFTNSLLQWMPSEPSDAGFCGILSEPSTRGLKAATCINPLNGSVCERPANHSAKQCRTPCALRTACGDCTSGSSECMWCSNMKQCVDSNAYVASFPFGQCMEWYTMSTCPPENCSGYCTCSHCLEQPGCGWCTDPSNTGKGKCIEGSYKGPVKMPSQAPTGNFYPQPLLNSSMCLEDSRYNWSFIHCPACQCNGHSKCINQSICEKCENLTTGKHCETCISGFYGDPTNGGKCQPCKCNGHASLCNTNTGKCFCTTKGVKGDECQLCEVENRYQGNPLRGTCYYTLLIDYQFTFSLSQEDDRYYTAINFVATPDEQNRDLDMFINASKNFNLNITWAASFSAGTQAGEEMPVVSKTNIKEYKDSFSNEKFDFRNHPNITFFVYVSNFTWPIKIQVQTEQ

SEQ ID NO: 927 - DNA, 8635 bp, Homo sapiens
ccgcacggccaggcgaagcggagccggccgtgcggtgtgtgtgtatgtgttcgcggggcgccgtctcagccccgggaagatggtggctgcagcggcggcaactgaggcaaggctgaggaggaggacggcggcgacggcagcgctcgcgggcaggagcggcgggccgcactgggactgggacgtgaccagggctgggaggccggggctgggggccgggctgcgcctcccgcggctgctgtctccaccgctgcggccacggctgctgctgctgctgttgttgctctcgccgccgctgctgctgctgctgctgccctgtgaggccgaggccgcggcggcggcggcggcggtgtcgggctcagccgcagccgaggccaaggaatgtgaccggccctgtgtcaacggcggtcgctgcaaccctggcaccggccagtgcgtctgccccgccggctgggtgggcgagcaatgccagcactgcgggggccgcttcagactaactggatcttctgggtttgtgacagatggacctggaaattataaatacaaaacgaagtgcacgtggctcattgaaggacagccaaatagaataatgagacttcgtttcaatcattttgctacagagtgtagttgggaccatttatatgtttatgatggggactcaatttatgcaccgctagttgctgcatttagtggcctcattgttcctgagagagatggcaatgagactgtccctgaggttgttgccacatcaggttatgccttgctgcatttttttagtgatgctgcttataatttgactggatttaatattacttacagttttgatatgtgtccaaataactgctcaggccgaggagagtgtaagatcagtaatagcagcgatactgttgaatgtgaatgttctgaaaactggaaaggtgaagcatgtgacattcctcactgtacagacaactgtggttttcctcatcgaggcatctgcaattcaagtgatgtcagaggatgctcctgcttctcagactggcagggtcctggatgttcagttcctgtaccagctaaccagtcattttggactcgagaggaatattctaacttaaagctccccagagcatctcataaagctgtggtcaatggaaacattatgtgggttgttggaggatatatgttcaaccactcagattataacatggttctagcgtatgaccttgcttctagggagtggcttccactaaaccgttctgtgaacaatgtggttgttagatatggtcattctttggcattatacaaggataaaatttacatgtatggaggaaaaattgattcaactgggaatgtgaccaatgagttgagagtttttcacattcataatgagtcatgggtgttgttgacccctaaggcaaaggagcagtatgcagtggttgggcactctgcacacattgttacactgaagaatggccgagtggtcatgctggtcatctttggtcactgccctctctatggatatataagcaatgtgcaggaatatgatttggataagaacacatggagtatattacacacccagggtgcccttgtgcaagggggttacggccatagcagtgtttacgaccataggaccagggccctatacgttcatggtggctacaaggctttcagtgccaataagtaccggcttgcagatgatctctaccgatatgatgtggatacccagatgtggaccattcttaaggacagccgatttttccgttacttgcacacagctgtgatagtgagtggaaccatgctggtgtttggaggaaacacacacaatgacacatctatgagccatggcgccaaatgcttctcttcagatttcatggcctatgacattgcctgtgaccgctggtcagtgcttcccagacctgatctccaccatgatgtcaacagatttggccattcagcagtcttacacaacagcaccatgtatgtgttcggtggtttcaatagtctcctcctcagcgacatcctggtattcacctcggaacagtgtgatgcgcatcggagtgaagccgcttgtttagcagcaggacctggtattcggtgtgtgtggaacacagggtcgtctcagtgtatctcgtgggcgctggcaactgatgaacaagaagaaaagttaaaatcagaatgtttttccaaaagaactcttgaccatgacagatgtgaccagcacacagattgttacagctgcacagccaacaccaatgactgccactggtgcaatgaccattgtgtccccaggaaccacagctgctcagaaggccagatctccatttttaggtatgagaattgccccaaggataaccccatgtactactgtaacaagaagaccagctgcaggagctgtgccctggaccagaactgccagtgggagccccggaatcaggagtgcattgccctgcccgaaaatatctgtggcattggctggcatttggttggaaactcatgtttgaaaattactactgccaaggagaattatgacaatgctaaattgttctgtaggaaccacaatgcccttttggcttctcttacaacccagaagaaggtagaatttgtccttaagcagctgcgaataatgcagtcatctcagagcatgtccaagctcaccttaaccccatgggtcggccttcggaagatcaatgtgtcctactggtgctgggaagatatgtccccatttacaaatagtttactacagtggatgccgtctgagcccagtgatgctggattctgtggaattttatcagaacccagtactcggggactgaaggctgcaacctgcatcaacccactcaatggtagtgtctgtgaaaggcctgcaaaccacagtgctaagcagtgccggacaccatgtgccttgaggacagcatgtggagattgcaccagcggcagctctgagtgcatgtggtgcagcaacatgaagcagtgtgtggactccaatgcctacgtggcctccttcccttttggccagtgtatggaatggtatacgatgagcacctgcccccctgaaaattgttcaggctactgtacctgtagtcattgcttggagcaaccaggctgtggctggtgtactgatcccagcaatactggcaaagggaaatgcatagagggttcctataaaggaccagtgaagatgccttcgcaagcccctacaggaaatttctatccacagcccctgctcaattccagcatgtgtctagaggacagcagatacaactggtctttcattcactgtccagcttgccaatgcaacggccacagtaaatgcatcaatcagagcatctgtgagaagtgtgagaacctgaccacaggcaagcactgcgagacctgcatatctggcttctacggtgatcccaccaatggagggaaatgtcagccatgcaagtgcaatgggcacgcgtctctgtgcaacaccaacacgggcaagtgcttctgcaccaccaagggcgtcaagggggacgagtgccagctatgtgaggtagaaaatcgataccaaggaaaccctctcagaggaacatgttattatactcttcttattgactatcagttcacctttagtctatcccaggaagatgatcgctattacacagctatcaattttgtggctactcctgacgaacaaaacagggatttggacatgttcatcaatgcctccaagaatttcaacctcaacatcacctgggctgccagtttctcagctggaacccaggctggagaagagatgcctgttgtttcaaaaaccaacattaaggagtacaaagatagtttctctaatgagaagtttgattttcgcaaccacccaaatatcactttctttgtttatgtcagtaatttcacctggcccatcaaaattcagattgccttctctcagcacagcaattttatggacctggtacagttcttcgtgactttcttcagttgtttcctctctttgctcctggtggctgctgtggtttggaagatcaaacaaagttgttgggcctccagacgtagagagcaacttcttcgagagatgcaacagatggccagccgtccctttgcctctgtaaatgtcgccttggaaacagatgaggagcctcctgatcttattggggggagtataaagactgttcccaaacccattgcactggagccgtgttttggcaacaaagccgctgtcctctctgtgtttgtgaggctccctcgaggcctgggtggcatccctcctcctgggcagtcaggtcttgctgtggccagcgccctggtggacatttctcagcagatgccgatagtgtacaaggagaagtcaggagccgtgagaaaccggaagcagcagccccctgcacagcctgggacctgcatctgatgctggggccagggactctcccacgcacgagctagtgagtggcacaccagagccatctgcagggaagggcgtggcggggaaatggctgtgcggtgcgggacggaagactggaaaccctcaaagcatctgactcacctgcatgatcacaagctttctttgacggtttctcccatccgtgttccagcatctaaccttttacttttgcataggaaatacttgatttaattacaggtccagggatgagctgatggttgctggaggaggccagtgtagagccagtgagagaactaggaatgacactcaggttcactgtggaaaactgttcttgggactgtctcaactgtgcaaaaaacaaaagatggagtgtttacaagtagacattcgtcatcagttgttcttgaacatggtcttttaaaaactagtcagatgaattgttttcatctgaagcctgctatcttttttaaaagatgtgctatttattcttgcacgatttaggcaattatctctcttccagggagtacctttttttctagttgagaattaataatggtccatctcttttgatcatatcaagctaggatagaaggggggctattttaaatgtcaaggtcagcagtgttactttgaatgtaaactggtataataggtagttttctatagtaacttgattaatttagtcttaatccatttgaaactctctcttcctttctctctgcctgtccctctccttctccatctcaccctccctctctcacacatacacacacaaacacatacacacaacactaagtgcctagactttaaatagatctagcaattggaaagttagtaagcctaagtttttacataattgcattcctacattcttgtaaaatttaaatagctaccattggcaatctgctttttttctaaaatctgatttgcagccaggaaagaattttctcacccaaggaacatttgatctagcagcagggatgagaggaaagcagaaatgaatgaactgtgaaagctcctgtttttattatcaaaaaggacactgtcaagaaggcgccccctgcccccacccccgtgtcaccctaggcctgataagcgatcagaggaaaggactcattcatgtcacgcttccttgagcagaaaagagcactgagagcacttgggacccctggatcagagagcatctgtgtgtcctgcagcctcctctgaacttgtggttcattctcaggctggggtggactcagatgccaggaaagggacagcctcccattgtcaggcagaagctgcccaaagcctggagaaggacttgtttgccctctttcccccaggaggggctcgacccacccaccctccctctcagaccaaggtggtggctgtgaggagggcagcaaatgctgacaaggatgaaaagcacatggaaaaaaatggatgaggagggaaaactctgccaaatggaaaatgaccaaatttaagagggtgggacagtcccctgctcctctcccagagggcactgcttggaaattgtgttttccccatttatggtgctctgtattctggcattatgcagcagcctcccagaagctctcttctgcttcaaaacctgggatctctggcattaccctattgggatggaccgctggacagcaatgctcgagtttgtgaatttggagagatactcaaaagagctaaaactgcagcattttacctttaaatgcagtgcctagagagagagtattgtctcttccccaacactaaccccactcccatgaagaattgcctggaaagatgttttcaaggaatttgaaccataaaacactatctgatgcacagaacacctctactttgagactcacctctcataaagcttctttttcacattactgttaaagaccagacgttctagaaaagacccctcctctcatgagctcccccatccctgctacagaacacagcacccatggcgcctgcagtggactggccccttaattcccacaggcccccccagcaaggccaaagggaggcccctgggtattgtcctcctacaaggaagatcctctttgtttgttcaaaggaccagttttcctaggccaaagaagtctcttccccatgttagtcctatgccttgaaatatcatgcaccatgacccacagccatctggttatgtcttatttttttcctaaaagataatgtttatttttaaaaaggaaggaaggagcaagtgaagtttcattctgctccagcggtggggaagccgctgaatccacctgcttctcctttgcaaccgacagcaaacagctttctccggcctcagggcagaaaaagggaatggcagggagtaagaggcgctgggctcggagcctgtttccaagaaggaattggttgtcatctggcagtgttgcgcgtcacaagagagcctgtatataaattaaaatagtcaagacaacactgaccttgcacttgtacataactatacagtagtgtccagaatgttcagacattcggagtgtacataaaacagaaaaaatcttcatgtatttttattaaatataacaatgtctgagtttcacctaagatgtttttgtgccatatgctggatatccaggttctcgccaggccccgatacatgaataacaaacccaagaaacgcatccccattgtgtgatgtgttcagatgcatctggcaccaattaggtatttcttaaaacaggactcatctgtcagagtgcacatgaaaaatcaggcagggaatcgaaacgacagtgctggaggagactcaggaagcagaggcgtccctgccgctgcccttggccctgcaagcacatcatgaccctttctggcagcctcttggtgctctgggtagtgagggatgaccagtcttgtcctgagaaatgtttctcttagtctttaagttcaaagactaacctgtagcaatcagactttccaaaagggggttctccattttttgtagttttgtctaaatttttaatgaccatttcctggaatcagtttattatactgaaaactgggggtgggagtagggagctagtttgttgataaatagttcccatttccccatggagaatttgacataccctggactcctgtgtgcctcctgccatccctgcacacagcctggggagaagcctgtgcctccccgtgtggagagaaggcaaccccagatcccctgagctaacccggaggaaaggcagtcctggacagaagactgtcagcagaaggaaagtactggactacccgtgggtaagtcctgccattcaagactggagacacctgggaaataaaaagagcagggcactgctggtgggaagaggcattttaccttccagtgcaaatcctgctcctttgatttaatggggtgtactggggccaggggctgattcacttccttgggagatggtggtgttttcatgaacatctttgatccttccatttcatttattcatccatccattcaacaagtatttgctaaacactaacttaagctaatgctagggtagtgactgagatgtaaaaatagattttagaattaaaacaaaatccaagtcctcacacccctgtcatcccaggagatctttccttgtggtggtttctgtgagaattggccatcctgaggacacagccaggacggcagaggcctcctggcctcagggcatgccctgcctaccttctgaaatgtttaccccattgaccaaacttggctccagccattgcggtggtttctagatagccaggcccaccaagagatattgccccttgatgagagtcaaacaccctgcctacaaggagatgttttgaaatggagaggaaaattggcacctcatcttttaaaggcagtaatggaattgattttcagtaactgaatttgtgcacaaaacattctaaacactagtgaagcctgtttcgttgaactaattctggctctggaaatgtttttgttttatagttatttacgatttcgtttgtttggattcaagcttagtttgttaatatgtataatttagcatctattacactcatgtaaatatggagtaagtattgtaaactatttcatcgcggggattgtgggtgttatacatacatttaggactgcaattttttggtattttttgtattgtaaaataacagctaatttaagcaggaacaagagaactaagggaggtctgtgcattttaaacacaaatgtgaagaacttgtatataaacaaaagtaaatactataatacaaacttccttctgaaataaaagtagatctggt

SEQ ID NO: 928 - protein, 1429 aa, Homo sapiens
MVAAAAATEARLRRRTAATAALAGRSGGPHWDWDVTRAGRPGLGAGLRLPRLLSPPLRPRLLLLLLLLSPPLLLLLLPCEAEAAAAAAAVSGSAAAEAKECDRPCVNGGRCNPGTGQCVCPAGWVGEQCQHCGGRFRLTGSSGFVTDGPGNYKYKTKCTWLIEGQPNRIMRLRFNHFATECSWDHLYVYDGDSIYAPLVAAFSGLIVPERDGNETVPEVVATSGYALLHFFSDAAYNLTGFNITYSFDMCPNNCSGRGECKISNSSDTVECECSENWKGEACDIPHCTDNCGFPHRGICNSSDVRGCSCFSDWQGPGCSVPVPANQSFWTREEYSNLKLPRASHKAVVNGNIMWVVGGYMFNHSDYNMVLAYDLASREWLPLNRSVNNVVVRYGHSLALYKDKIYMYGGKIDSTGNVTNELRVFHIHNESWVLLTPKAKEQYAVVGHSAHIVTLKNGRVVMLVIFGHCPLYGYISNVQEYDLDKNTWSILHTQGALVQGGYGHSSVYDHRTRALYVHGGYKAFSANKYRLADDLYRYDVDTQMWTILKDSRFFRYLHTAVIVSGTMLVFGGNTHNDTSMSHGAKCFSSDFMAYDIACDRWSVLPRPDLHHDVNRFGHSAVLHNSTMYVFGGFNSLLLSDILVFTSEQCDAHRSEAACLAAGPGIRCVWNTGSSQCISWALATDEQEEKLKSECFSKRTLDHDRCDQHTDCYSCTANTNDCHWCNDHCVPRNHSCSEGQISIFRYENCPKDNPMYYCNKKTSCRSCALDQNCQWEPRNQECIALPENICGIGWHLVGNSCLKITTAKENYDNAKLFCRNHNALLASLTTQKKVEFVLKQLRIMQSSQSMSKLTLTPWVGLRKINVSYWCWEDMSPFTNSLLQWMPSEPSDAGFCGILSEPSTRGLKAATCINPLNGSVCERPANHSAKQCRTPCALRTACGDCTSGSSECMWCSNMKQCVDSNAYVASFPFGQCMEWYTMSTCPPENCSGYCTCSHCLEQPGCGWCTDPSNTGKGKCIEGSYKGPVKMPSQAPTGNFYPQPLLNSSMCLEDSRYNWSFIHCPACQCNGHSKCINQSICEKCENLTTGKHCETCISGFYGDPTNGGKCQPCKCNGHASLCNTNTGKCFCTTKGVKGDECQLCEVENRYQGNPLRGTCYYTLLIDYQFTFSLSQEDDRYYTAINFVATPDEQNRDLDMFINASKNFNLNITWAASFSAGTQAGEEMPVVSKTNIKEYKDSFSNEKFDFRNHPNITFFVYVSNFTWPIKIQIAFSQHSNFMDLVQFFVTFFSCFLSLLLVAAVVWKIKQSCWASRRREQLLREMQQMASRPFASVNVALETDEEPPDLIGGSIKTVPKPIALEPCFGNKAAVLSVFVRLPRGLGGIPPPGQSGLAVASALVDISQQMPIVYKEKSGAVRNRKQQPPAQPGTCI

SEQ ID NO: 929 - DNA, 3609 bp, Homo sapiens
atggtggctgcagcggcggcaactgaggcaaggctgaggaggaggacggcggcgacggcagcgctcgcgggcaggagcggcgggccgcactgggactgggacgaatgtgaccggccctgtgtcaacggcggtcgctgcaaccctggcaccggccagtgcgtctgccccgccggctgggtgggcgagcaatgccagcactgcgggggccgcttcagactaactggatcttctgggtttgtgacagatggacctggaaattataaatacaaaacgaagtgcacgtggctcattgaaggacagccaaatagaataatgagacttcgtttcaatcattttgctacagagtgtagttgggaccatttatatgtttatgatggggactcaatttatgcaccgctagttgctgcatttagtggcctcattgttcctgagagagatggcaatgagactgtccctgaggttgttgccacatcaggttatgccttgctgcatttttttagtgatgctgcttataatttgactggatttaatattacttacagttttgatatgtgtccaaataactgctcaggccgaggagagtgtaagatcagtaatagcagcgatactgttgaatgtgaatgttctgaaaactggaaaggtgaagcatgtgacattcctcactgtacagacaactgtggttttcctcatcgaggcatctgcaattcaagtgatgtcagaggatgctcctgcttctcagactggcagggtcctggatgttcagttcctgtaccagctaaccagtcattttggactcgagaggaatattctaacttaaagctccccagagcatctcataaagctgtggtcaatggaaacattatgtgggttgttggaggatatatgttcaaccactcagattataacatggttctagcgtatgaccttgcttctagggagtggcttccactaaaccgttctgtgaacaatgtggttgttagatatggtcattctttggcattatacaaggataaaatttacatgtatggaggaaaaattgattcaactgggaatgtgaccaatgagttgagagtttttcacattcataatgagtcatgggtgttgttgacccctaaggcaaaggagcagtatgcagtggttgggcactctgcacacattgttacactgaagaatggccgagtggtcatgctggtcatctttggtcactgccctctctatggatatataagcaatgtgcaggaatatgatttggataagaacacatggagtatattacacacccagggtgcccttgtgcaagggggttacggccatagcagtgtttacgaccataggaccagggccctatacgttcatggtggctacaaggctttcagtgccaataagtaccggcttgcagatgatctctaccgatatgatgtggatacccagatgtggaccattcttaaggacagccgatttttccgttacttgcacacagctgtgatagtgagtggaaccatgctggtgtttggaggaaacacacacaatgacacatctatgagccatggcgccaaatgcttctcttcagatttcatggcctatgacattgcctgtgaccgctggtcagtgcttcccagacctgatctccaccatgatgtcaacagatttggccattcagcagtcttacacaacagcaccatgtatgtgttcggtggtttcaatagtctcctcctcagcgacatcctggtattcacctcggaacagtgtgatgcgcatcggagtgaagccgcttgtttagcagcaggacctggtattcggtgtgtgtggaacacagggtcgtctcagtgtatctcgtgggcgctggcaactgatgaacaagaagaaaagttaaaatcagaatgtttttccaaaagaactcttgaccatgacagatgtgaccagcacacagattgttacagctgcacagccaacaccaatgactgccactggtgcaatgaccattgtgtccccaggaaccacagctgctcagaaggccagatctccatttttaggtatgagaattgccccaaggataaccccatgtactactgtaacaagaagaccagctgcaggagctgtgccctggaccagaactgccagtgggagccccggaatcaggagtgcattgccctgcccgaaaatatctgtggcattggctggcatttggttggaaactcatgtttgaaaattactactgccaaggagaattatgacaatgctaaattgttctgtaggaaccacaatgcccttttggcttctcttacaacccagaagaaggtagaatttgtccttaagcagctgcgaataatgcagtcatctcagagcatgtccaagctcaccttaaccccatgggtcggccttcggaagatcaatgtgtcctactggtgctgggaagatatgtccccatttacaaatagtttactacagtggatgccgtctgagcccagtgatgctggattctgtggaattttatcagaacccagtactcggggactgaaggctgcaacctgcatcaacccactcaatggtagtgtctgtgaaaggcctgcaaaccacagtgctaagcagtgccggacaccatgtgccttgaggacagcatgtggagattgcaccagcggcagctctgagtgcatgtggtgcagcaacatgaagcagtgtgtggactccaatgcctacgtggcctccttcccttttggccagtgtatggaatggtatacgatgagcacctgcccccctgaaaattgttcaggctactgtacctgtagtcattgcttggagcaaccaggctgtggctggtgtactgatcccagcaatactggcaaagggaaatgcatagagggttcctataaaggaccagtgaagatgccttcgcaagcccctacaggaaatttctatccacagcccctgctcaattccagcatgtgtctagaggacagcagatacaactggtctttcattcactgtccagcttgccaatgcaacggccacagtaaatgcatcaatcagagcatctgtgagaagtgtgagaacctgaccacaggcaagcactgcgagacctgcatatctggcttctacggtgatcccaccaatggagggaaatgtcagccatgcaagtgcaatgggcacgcgtctctgtgcaacaccaacacgggcaagtgcttctgcaccaccaagggcgtcaagggggacgagtgccagctatgtgaggtagaaaatcgataccaaggaaaccctctcagaggaacatgttattatactcttcttattgactatcagttcacctttagtctatcccaggaagatgatcgctattacacagctatcaattttgtggctactcctgacgaacaaaacagggatttggacatgttcatcaatgcctccaagaatttcaacctcaacatcacctgggctgccagtttctcagctggaacccaggctggagaagagatgcctgttgtttcaaaaaccaacattaaggagtacaaagatagtttctctaatgagaagtttgattttcgcaaccacccaaatatcactttctttgtttatgtcagtaatttcacctggcccatcaaaattcaggta

SEQ ID NO: 930 - protein, 1203 aa, Homo sapiens
MVAAAAATEARLRRRTAATAALAGRSGGPHWDWDECDRPCVNGGRCNPGTGQCVCPAGWVGEQCQHCGGRFRLTGSSGFVTDGPGNYKYKTKCTWLIEGQPNRIMRLRFNHFATECSWDHLYVYDGDSIYAPLVAAFSGLIVPERDGNETVPEVVATSGYALLHFFSDAAYNLTGFNITYSFDMCPNNCSGRGECKISNSSDTVECECSENWKGEACDIPHCTDNCGFPHRGICNSSDVRGCSCFSDWQGPGCSVPVPANQSFWTREEYSNLKLPRASHKAVVNGNIMWVVGGYMFNHSDYNMVLAYDLASREWLPLNRSVNNVVVRYGHSLALYKDKIYMYGGKIDSTGNVTNELRVFHIHNESWVLLTPKAKEQYAVVGHSAHIVTLKNGRVVMLVIFGHCPLYGYISNVQEYDLDKNTWSILHTQGALVQGGYGHSSVYDHRTRALYVHGGYKAFSANKYRLADDLYRYDVDTQMWTILKDSRFFRYLHTAVIVSGTMLVFGGNTHNDTSMSHGAKCFSSDFMAYDIACDRWSVLPRPDLHHDVNRFGHSAVLHNSTMYVFGGFNSLLLSDILVFTSEQCDAHRSEAACLAAGPGIRCVWNTGSSQCISWALATDEQEEKLKSECFSKRTLDHDRCDQHTDCYSCTANTNDCHWCNDHCVPRNHSCSEGQISIFRYENCPKDNPMYYCNKKTSCRSCALDQNCQWEPRNQECIALPENICGIGWHLVGNSCLKITTAKENYDNAKLFCRNHNALLASLTTQKKVEFVLKQLRIMQSSQSMSKLTLTPWVGLRKINVSYWCWEDMSPFTNSLLQWMPSEPSDAGFCGILSEPSTRGLKAATCINPLNGSVCERPANHSAKQCRTPCALRTACGDCTSGSSECMWCSNMKQCVDSNAYVASFPFGQCMEWYTMSTCPPENCSGYCTCSHCLEQPGCGWCTDPSNTGKGKCIEGSYKGPVKMPSQAPTGNFYPQPLLNSSMCLEDSRYNWSFIHCPACQCNGHSKCINQSICEKCENLTTGKHCETCISGFYGDPTNGGKCQPCKCNGHASLCNTNTGKCFCTTKGVKGDECQLCEVENRYQGNPLRGTCYYTLLIDYQFTFSLSQEDDRYYTAINFVATPDEQNRDLDMFINASKNFNLNITWAASFSAGTQAGEEMPVVSKTNIKEYKDSFSNEKFDFRNHPNITFFVYVSNFTWPIKIQV

SEQ ID NO: 931 - DNA, 3603 bp, Homo sapiens
atggtggctgcagcggcggcaactgaggcaaggctgaggaggaggacggcggcgacggcagcgctcgcgggcaggagcggcgggccgcactgggactgggacgaatgtgaccggccctgtgtcaacggcggtcgctgcaaccctggcaccggccagtgcgtctgccccgccggctgggtgggcgagcaatgccagcactgcgggggccgcttcagactaactggatcttctgggtttgtgacagatggacctggaaattataaatacaaaacgaagtgcacgtggctcattgaaggacagccaaatagaataatgagacttcgtttcaatcattttgctacagagtgtagttgggaccatttatatgtttatgatggggactcaatttatgcaccgctagttgctgcatttagtggcctcattgttcctgagagagatggcaatgagactgtccctgaggttgttgccacatcaggttatgccttgctgcatttttttagtgatgctgcttataatttgactggatttaatattacttacagttttgatatgtgtccaaataactgctcaggccgaggagagtgtaagatcagtaatagcagcgatactgttgaatgtgaatgttctgaaaactggaaaggtgaagcatgtgacattcctcactgtacagacaactgtggttttcctcatcgaggcatctgcaattcaagtgatgtcagaggatgctcctgcttctcagactggcagggtcctggatgttcagttcctgtaccagctaaccagtcattttggactcgagaggaatattctaacttaaagctccccagagcatctcataaagctgtggtcaatggaaacattatgtgggttgttggaggatatatgttcaaccactcagattataacatggttctagcgtatgaccttgcttctagggagtggcttccactaaaccgttctgtgaacaatgtggttgttagatatggtcattctttggcattatacaaggataaaatttacatgtatggaggaaaaattgattcaactgggaatgtgaccaatgagttgagagtttttcacattcataatgagtcatgggtgttgttgacccctaaggcaaaggagcagtatgcagtggttgggcactctgcacacattgttacactgaagaatggccgagtggtcatgctggtcatctttggtcactgccctctctatggatatataagcaatgtgcaggaatatgatttggataagaacacatggagtatattacacacccagggtgcccttgtgcaagggggttacggccatagcagtgtttacgaccataggaccagggccctatacgttcatggtggctacaaggctttcagtgccaataagtaccggcttgcagatgatctctaccgatatgatgtggatacccagatgtggaccattcttaaggacagccgatttttccgttacttgcacacagctgtgatagtgagtggaaccatgctggtgtttggaggaaacacacacaatgacacatctatgagccatggcgccaaatgcttctcttcagatttcatggcctatgacattgcctgtgaccgctggtcagtgcttcccagacctgataccatgatgtcaacagatttggccattgcagtcttacacaacagcaccatgtatgtgttcggtggtttcaatagtctcctcctcagcgacatcctggtattcacctcggaacagtgtgatgcgcatcggagtgaagccgcttgtttagcagcaggacctggtattcggtgtgtgtggaacacagggtcgtctcagtgtatctcgtgggcgctggcaactgatgaacaagaagaaaagttaaaatcagaatgtttttccaaaagaactcttgaccatgacagatgtgaccagcacacagattgttacagctgcacagccaacaccaatgactgccactggtgcaatgaccattgtgtccccaggaaccacagctgctcagaaggccagatctccatttttaggtatgagaattgccccaaggataaccccatgtactactgtaacaagaagaccagctgcaggagctgtgccctggaccagaactgccagtgggagccccggaatcaggagtgcattgccctgcccgaaaatatctgtggcattggctggcatttggttggaaactcatgtttgaaaattactactgccaaggagaattatgacaatgctaaattgttctgtaggaaccacaatgcccttttggcttctcttacaacccagaagaaggtagaatttgtccttaagcagctgcgaataatgcagtcatctcagagcatgtccaagctcaccttaaccccatgggtcggccttcggaagatcaatgtgtcctactggtgctgggaagatatgtccccatttacaaatagtttactacagtggatgccgtctgagcccagtgatgctggattctgtggaattttatcagaacccagtactcggggactgaaggctgcaacctgcatcaacccactcaatggtagtgtctgtgaaaggcctgcaaaccacagtgctaagcagtgccggacaccatgtgccttgaggacagcatgtggagattgcaccagcggcagctctgagtgcatgtggtgcagcaacatgaagcagtgtgtggactccaatgcctacgtggcctccttcccttttggccagtgtatggaatggtatacgatgagcacctgcccccctgaaaattgttcaggctactgtacctgtagtcattgcttggagcaaccaggctgtggctggtgtactgatcccagcaatactggcaaagggaaatgcatagagggttcctataaaggaccagtgaagatgccttcgcaagcccctacaggaaatttctatccacagcccctgctcaattccagcatgtgtctagaggacagcagatacaactggtctttcattcactgtccagcttgccaatgcaacggccacagtaaatgcatcaatcagagcatctgtgagaagtgtgagaacctgaccacaggcaagcactgcgagacctgcatatctggcttctacggtgatcccaccaatggagggaaatgtcagccatgcaagtgcaatgggcacgcgtctctgtgcaacaccaacacgggcaagtgcttctgcaccaccaagggcgtcaagggggacgagtgccagctatgtgaggtagaaaatcgataccaaggaaaccctctcagaggaacatgttattatactcttcttattgactatcagttcacctttagtctatcccaggaagatgatcgctattacacagctatcaattttgtggctactcctgacgaacaaaacagggatttggacatgttcatcaatgcctccaagaatttcaacctcaacatcacctgggctgccagtttctcagctggaacccaggctggagaagagatgcctgttgtttcaaaaaccaacattaaggagtacaaagatagtttctctaatgagaagtttgattttcgcaaccacccaaatatcactttctttgtttatgtcagtaatttcacctggcccatcaaaattcaggta

SEQ ID NO: 932 - protein, 1201 aa, Homo sapiens
MVAAAAATEARLRRRTAATAALAGRSGGPHWDWDECDRPCVNGGRCNPGTGQCVCPAGWVGEQCQHCGGRFRLTGSSGFVTDGPGNYKYKTKCTWLIEGQPNRIMRLRFNHFATECSWDHLYVYDGDSIYAPLVAAFSGLIVPERDGNETVPEVVATSGYALLHFFSDAAYNLTGFNITYSFDMCPNNCSGRGECKISNSSDTVECECSENWKGEACDIPHCTDNCGFPHRGICNSSDVRGCSCFSDWQGPGCSVPVPANQSFWTREEYSNLKLPRASHKAVVNGNIMWVVGGYMFNHSDYNMVLAYDLASREWLPLNRSVNNVVVRYGHSLALYKDKIYMYGGKIDSTGNVTNELRVFHIHNESWVLLTPKAKEQYAVVGHSAHIVTLKNGRVVMLVIFGHCPLYGYISNVQEYDLDKNTWSILHTQGALVQGGYGHSSVYDHRTRALYVHGGYKAFSANKYRLADDLYRYDVDTQMWTILKDSRFFRYLHTAVIVSGTMLVFGGNTHNDTSMSHGAKCFSSDFMAYDIACDRWSVLPRPDTMMSTDLAIAVLHNSTMYVFGGFNSLLLSDILVFTSEQCDAHRSEAACLAAGPGIRCVWNTGSSQCISWALATDEQEEKLKSECFSKRTLDHDRCDQHTDCYSCTANTNDCHWCNDHCVPRNHSCSEGQISIFRYENCPKDNPMYYCNKKTSCRSCALDQNCQWEPRNQECIALPENICGIGWHLVGNSCLKITTAKENYDNAKLFCRNHNALLASLTTQKKVEFVLKQLRIMQSSQSMSKLTLTPWVGLRKINVSYWCWEDMSPFTNSLLQWMPSEPSDAGFCGILSEPSTRGLKAATCINPLNGSVCERPANHSAKQCRTPCALRTACGDCTSGSSECMWCSNMKQCVDSNAYVASFPFGQCMEWYTMSTCPPENCSGYCTCSHCLEQPGCGWCTDPSNTGKGKCIEGSYKGPVKMPSQAPTGNFYPQPLLNSSMCLEDSRYNWSFIHCPACQCNGHSKCINQSICEKCENLTTGKHCETCISGFYGDPTNGGKCQPCKCNGHASLCNTNTGKCFCTTKGVKGDECQLCEVENRYQGNPLRGTCYYTLLIDYQFTFSLSQEDDRYYTAINFVATPDEQNRDLDMFINASKNFNLNITWAASFSAGTQAGEEMPVVSKTNIKEYKDSFSNEKFDFRNHPNITFFVYVSNFTWPIKIQV

SEQ ID NO: 933 - DNA, 1712 bp, Homo sapiens
gggcgggaagagggaagcgccgaggctgcctgactggaatgagggtagctgcggcgactgcggcggctggagcggggccggccatggcggtgtggacgcgggccaccaaagcggggctggtggagctgctcctgagggagcgctgggtccgagtggtggccgagctgagcggggagagcctgagcctgacgggcgacgccgccgcggccgagctggagcccgctctgggacccgcggccgccgccttcaacggcctcccaaacggcggcggcgcgggcgactcgctgcccgggagcccaagccgcggcctggggcccccgagcccgccggcgccgcctcggggccccgcgggtgaggcgggcgcgtcgccgcccgtgcgccgggtgcgggtggtgaagcaagaggcgggcggcctgggcatcagcatcaagggcggccgcgagaaccggatgccgatcctcatctccaagatcttccccgggctggctgccgaccagagccgggcgctgcggctgggcgacgccatcctgtcggtgaacggcaccgacctgcgccaggccacccacgaccaggccgtgcaggcgctgaagcgcgcgggcaaggaggtgctgctggaggtcaagttcatccgagaagtaacaccatatatcaagaagccatcattagtatcagatctgccgtgggaaggtgcagccccccagtcaccaagctttagtggcagtgaggactctggttcgccaaaacaccagaacagcaccaaggacaggaagatcatccctctcaaaatgtgctttgctgctagaaacctaagcatgccggatctggaaaacagattgatagagctacattctcctgatagcaggaacacgttgatcctacgctgcaaagatacagccacagcacactcctggttcgtagctatccacaccaacataatggctctcctcccacaggtgttggctgaactcaacgccatgcttggggcaaccagtacagcaggaggcagtaaagaggtgaagcatattgcctggctggcagaacaggcaaaactagatggtggaagacagcaatggagacctgtcctcatggctgtgactgagaaggatttgctgctctatgactgtatgccgtggacaagagatgcctgggcgtcaccatgccacagctacccacttgttgccaccaggttggttcattctggctccggatgtcgatccccctcccttggatctgaccttacatttgctaccaggacaggctctcgacagggcattgagatgcatctcttcagggtggagacacatcgggatctgtcatcctggaccaggatacttgttcagggttgccatgctgctgctgagctgatcaaggaagtctctctaggctgcatgttaaatggccaagaggtgaggcttactattcactatgaaaatgggttcaccatctcaagggaaaatggaggctccagcagcatattgtaccgctacccctttgaaaggctgaagatgtctgctgatgatggcatccgaaatctatacttggattttggtggtcccgagggagaactgaccatggacctgcactcttgtccgaagccgattgtatttgtgttgcacacgtttttatcggccaaagtcactcgtatgggactgcttgtatgagcaacaaaaaatcagaaaagagccttgactgtcacaagaaatatttccacc

SEQ ID NO: 934 - protein, 540 aa, Homo sapiens
MRVAAATAAAGAGPAMAVWTRATKAGLVELLLRERWVRVVAELSGESLSLTGDAAAAELEPALGPAAAAFNGLPNGGGAGDSLPGSPSRGLGPPSPPAPPRGPAGEAGASPPVRRVRVVKQEAGGLGISIKGGRENRMPILISKIFPGLAADQSRALRLGDAILSVNGTDLRQATHDQAVQALKRAGKEVLLEVKFIREVTPYIKKPSLVSDLPWEGAAPQSPSFSGSEDSGSPKHQNSTKDRKIIPLKMCFAARNLSMPDLENRLIELHSPDSRNTLILRCKDTATAHSWFVAIHTNIMALLPQVLAELNAMLGATSTAGGSKEVKHIAWLAEQAKLDGGRQQWRPVLMAVTEKDLLLYDCMPWTRDAWASPCHSYPLVATRLVHSGSGCRSPSLGSDLTFATRTGSRQGIEMHLFRVETHRDLSSWTRILVQGCHAAAELIKEVSLGCMLNGQEVRLTIHYENGFTISRENGGSSSILYRYPFERLKMSADDGIRNLYLDFGGPEGELTMDLHSCPKPIVFVLHTFLSAKVTRMGLLV

SEQ ID NO: 935 - DNA, 1489 bp, Homo sapiens
gccgaggctgcctgactggaatgagggtagctgcggcgactgcggcggctggagcggggccggccatggcggtgtggacgcgggccaccaaagcggggctggtggagctgctcctgagggagcgctgggtccgagtggtggccgagctgagcggggagagcctgagcctgacgggcgacgccgccgcggccgagctggagcccgctctgggacccgcggccgccgccttcaacggcctcccaaacggcggcggcgcgggcgactcgctgcccgggagcccaagccgcggcctggggcccccgagcccgccggcgccgcctcggggccccgcgggtgaggcgggcgcgtcgccgcccgtgcgccgggtgcgggtggtgaagcaagaggcgggcggcctgggcatcagcatcaagggcggccgcgagaaccggatgccgatcctcatctccaagatcttccccgggctggctgccgaccagagccgggcgctgcggctgggcgacgccatcctgtcggtgaacggcaccgacctgcgccaggccacccacgaccaggccgtgcaggcgctgaagcgcgcgggcaaggaggtgctgctggaggtcaagttcatccgagaagtaacaccatatatcaagaagccatcattagtatcagatctgccgtgggaaggtgcagccccccagtcaccaagctttagtggcagtgaggactctggttcgccaaaacaccagaacagcaccaaggacaggaagatcatccctctcaaaatgtgctttgctgctagaaacctaagcatgccggatctggaaaacaggcaaaactagatggtggaagacagcaatggagacctgtcctcatggctgtgactgagaaggatttgctgctctatgactgtatgccgtggacaagagatgcctgggcgtcaccatgccacagctacccacttgttgccaccaggttggttcattctggctccggatgtcgatccccctcccttggatctgaccttacatttgctaccaggacaggctctcgacagggcattgagatgcatctcttcagggtggagacacatcgggatctgtcatcctggaccaggatacttgttcagggttgccatgctgctgctgagctgatcaaggaagtctctctaggctgcatgttaaatggccaagaggtgaggcttactattcactatgaaaatgggttcaccatctcaagggaaaatggaggctccagcagcatattgtaccgctacccctttgaaaggctgaagatgtctgctgatgatggcatccgaaatctatacttggattttggtggtcccgagggagaactgaccatggacctgcactcttgtccgaagccgattgtatttgtgttgcacacgtttttatcggccaaagtcactcgtatgggactgcttgtatgagcaacaaaaaatcagaaaagagccttgactgtcacaagaaatatttccacctcaaaa

SEQ ID NO: 936 - protein, 267 aa, Homo sapiens
MRVAAATAAAGAGPAMAVWTRATKAGLVELLLRERWVRVVAELSGESLSLTGDAAAAELEPALGPAAAAFNGLPNGGGAGDSLPGSPSRGLGPPSPPAPPRGPAGEAGASPPVRRVRVVKQEAGGLGISIKGGRENRMPILISKIFPGLAADQSRALRLGDAILSVNGTDLRQATHDQAVQALKRAGKEVLLEVKFIREVTPYIKKPSLVSDLPWEGAAPQSPSFSGSEDSGSPKHQNSTKDRKIIPLKMCFAARNLSMPDLENRQN

SEQ ID NO: 937 - DNA, 4690 bp, Homo sapiens
gctggccgtctgcgcaccctctctcccctcggctctttcctaggaaagctgagcctcatagcttccgggagaaggttttccggaagaaacctccagtctgtgcagtatgtaaggtgaccatcgatgggacaggcgtttcgtgcagagtctgcaaggtggcgacgcacagaaaatgtgaagcaaaggtgacttcagcctgtcaggccttgcctcccgtggagttgcggcgaaacacggccccagtcaggcgcatagagcacctgggatccaccaaatctctgaaccactcaaagcagcgcagcactctgcccaggagcttcagcctggacccgctcatggagcggcgctgggacttagacctcacctacgtgacggagcgcatcttggccgccgccttccccgcgcggcccgatgaacagcggcaccggggccacctgcgcgagctggcccatgtgctgcaatccaagcaccgggacaagtacctgctcttcaacctttcagagaaaaggcatgacctgacccgcttaaaccccaaggttcaagacttcggctggcctgagctgcatgctccacccctggacaagctgtgctccatctgcaaagccatggagacatggctcagtgctgacccacagcacgtggtcgtactatactgcaagggaaacaagggcaagcttggggtcatcgtttctgcctacatgcactacagcaagatctctgcaggggcggaccaggcactggccactcttaccatgcggaaattctgcgaggacaaggtggccacagaactgcagccctcccagcgtcgatatatcagctacttcagtgggctgctatctggctccatcagaatgaacagcagccctctcttcctgcactatgtgctcatccccatgctgccagcctttgaacctggcacaggcttccagcccttccttaaaatctaccagtccatgcagcttgtctacacatctggagtctatcacattgcaggccctggtccccagcagctttgcatcagcctggagccagccctcctcctcaaaggcgatgtcatggtaacatgttatcacaagggtggccggggcacagaccggaccctcgtgttccgagtccagttccacacctgcaccatccacggaccacagctcactttccccaaggaccagcttgacgaggcctggactgatgagaggttccccttccaagcctccgtggagtttgtcttctcctccagccccgagaagatcaaaggcagcactccacggaacgacccctcggtctctgtcgactacaacaccactgagccagccgtgcgctgggactcctatgagaacttcaaccagcaccacgaggacagtgtggatggctccttgacccacacccggggtcccctggatggcagtccttatgcccaggtgcagcggcctccccggcagacccccccggcaccctctccagagcctccaccaccccccatgctctctgtcagcagcgactcaggccattcctccacgctgaccacagagccggctgctgagtcccctggccggccgccccctacagctgctgaacggcaggagctggatcgcctcctaggaggctgcggagtggccagtgggggccggggagctgggcgcgagacggccatcctagatgacgaagagcagcccactgtgggcggaggcccccacctcggagtgtatccaggccataggcctggcctcagccgccactgctcctgccgccagggctaccgggagccctgcggggttcccaatgggggctactaccggccagagggaaccctggagaggaggcgactggcctacgggggctatgagggatccccccagggctacgccgaggcctcgatggagaagaggcgcctctgccgatcgctgtcagaggggctatacccctacccacctgagatggggaaaccagccactggggactttggctaccgcgccccaggctaccgggaggtggtcatcctggaggaccctgggctgcctgccctatacccatgcccagcctgcgaggagaagctggcgctgcctacagcagccttgtatggactgcggctggagagggaggctggagaagggtgggcaagtgaggctggcaagcctctcctgcacccagtgcggcctgggcacccgctgcctctgctcttgcctgcctgtgggcatcaccatgccccgatgcctgactacagctgcctgaagccacccaaggcaggcgaggaagggcacgagggctgctcctacaccatgtgccccgaaggcaggtatgggcatccagggtaccctgccctggtgacatacagctatggaggagcagttcccagttactgcccagcatatggccgtgtgcctcatagctgtggctctccaggagagggcagagggtatcccagccctggtgcccactccccacgggctggctccatttccccgggcagcccgccctatccacaatctaggaagctgagctacgagatccctacggaggagggaggggacaggtacccattgcctgggcacctggcctcagcaggacctttggcatctgcagagtcgctggagccggtgtcctggagggagggccccagtgggcacagcacactgcctcggtctccccgagatgccccatgcagtgcttcgtcagagttgtctggtccctccacgcccctgcacaccagcagtccagtccagggcaaggaaagcacccggcgacaggacaccaggtcccccacctcagcgcccactcagagactgagtcctggcgaggccttgccccctgtttcccaggcaggcaccggaaaggcccctgagctgccgtcgggaagtgggcctgagcctctggcccctagcccagtctctccgaccttccctcccagctcgcccagtgactggcctcaggaaaggagtccagggggccactcagatggcgccagtcctcggagccctgtgcccaccacacttcctggcctccgccacgccccctggcaaggccctcgaggcccccccgacagcccagatgggtctcccctcactcctgtgccttcccagatgccctggcttgtggccagcccagagccgcctcagagctcacctacacctgctttccccctggctgcctcctatgacaccaatggccttagccagcccccacttcctgagaaacgccacctgcccgggccggggcaacagccaggaccctggggcccagagcaggcatcatcgccagccagaggcatcagtcaccatgtcaccttcgcacctctgctctcagataatgtcccccaaaccccagagcctcctacacaagagagccaaagcaatgtcaagtttgtccaggatacatccaagttctggtacaagccacacctgtcccgtgaccaagccattgccctgctgaaggacaaggaccctggggccttcctgatcagggacagtcattcattccaaggagcttatgggctggccctcaaggtggccacaccgccacccagtgcccagccctggaaaggggaccccgtggaacagctggtccgccatttcctcatcgagactgggcccaaaggggtgaagatcaagggctgccccagtgagccctactttggcagcctgtccgccttggtctcccagcactccatctcccccatctccctgccctgctgcctgcgcattcccagcaaagatcctctggaagagaccccagaggctccagtgcccaccaacatgagcacagcggcagacctcctgcgtcagggtgctgcctgcagcgtgctctacttgacctcagtggagacagagtcactgacgggcccccaagctgtggcccgggccagctctgcagctctgagctgtagcccccgcccgacaccagctgttgtccacttcaaggtgtcagcccagggcattacactgacggacaaccaaaggaagctcttctttcgccgccattatccagtgaacagcatcaccttctccagcactgaccctcaagaccggagatggaccaacccagacgggaccacctccaagatctttggtttcgtggccaagaagccgggaagcccctgggagaatgtgtgtcacctctttgcagagcttgacccagatcagcctgctggcgccattgtcaccttcatcaccaaagttctactgggccagagaaaatgaaggaaggccacaagctcagagcccacatcaacactgcccccctcccagcaccccacagccctcacatcccctggcctggacccaggagacccaggagaaagcaccctcccttaggaatgaggagtgggcatcaggcctgggacactgctctccttccccgcccccagcctgctaagttaagtggacaggcccacaagatgaccttgcatgtgagcagatggcagagatgggtgtgtgaggggtgaggaggcatcagcagttgagccccgaaggagatcaggcagccccacctgcaggagaacgtcagccctccaggggatcagcccctgccagttccacccagctgcaggtgccagcacggcagggatgggagaggggtggggagcgagtcactgcctcctctgagcagagattcagagtaggatcacatgaataggggaaaaaagagagtctatttttgtctaataataaagaatttctataaactttagccgaaa

SEQ ID NO: 938 - protein, 1285 aa, Homo sapiens
MERRWDLDLTYVTERILAAAFPARPDEQRHRGHLRELAHVLQSKHRDKYLLFNLSEKRHDLTRLNPKVQDFGWPELHAPPLDKLCSICKAMETWLSADPQHVVVLYCKGNKGKLGVIVSAYMHYSKISAGADQALATLTMRKFCEDKVATELQPSQRRYISYFSGLLSGSIRMNSSPLFLHYVLIPMLPAFEPGTGFQPFLKIYQSMQLVYTSGVYHIAGPGPQQLCISLEPALLLKGDVMVTCYHKGGRGTDRTLVFRVQFHTCTIHGPQLTFPKDQLDEAWTDERFPFQASVEFVFSSSPEKIKGSTPRNDPSVSVDYNTTEPAVRWDSYENFNQHHEDSVDGSLTHTRGPLDGSPYAQVQRPPRQTPPAPSPEPPPPPMLSVSSDSGHSSTLTTEPAAESPGRPPPTAAERQELDRLLGGCGVASGGRGAGRETAILDDEEQPTVGGGPHLGVYPGHRPGLSRHCSCRQGYREPCGVPNGGYYRPEGTLERRRLAYGGYEGSPQGYAEASMEKRRLCRSLSEGLYPYPPEMGKPATGDFGYRAPGYREVVILEDPGLPALYPCPACEEKLALPTAALYGLRLEREAGEGWASEAGKPLLHPVRPGHPLPLLLPACGHHHAPMPDYSCLKPPKAGEEGHEGCSYTMCPEGRYGHPGYPALVTYSYGGAVPSYCPAYGRVPHSCGSPGEGRGYPSPGAHSPRAGSISPGSPPYPQSRKLSYEIPTEEGGDRYPLPGHLASAGPLASAESLEPVSWREGPSGHSTLPRSPRDAPCSASSELSGPSTPLHTSSPVQGKESTRRQDTRSPTSAPTQRLSPGEALPPVSQAGTGKAPELPSGSGPEPLAPSPVSPTFPPSSPSDWPQERSPGGHSDGASPRSPVPTTLPGLRHAPWQGPRGPPDSPDGSPLTPVPSQMPWLVASPEPPQSSPTPAFPLAASYDTNGLSQPPLPEKRHLPGPGQQPGPWGPEQASSPARGISHHVTFAPLLSDNVPQTPEPPTQESQSNVKFVQDTSKFWYKPHLSRDQAIALLKDKDPGAFLIRDSHSFQGAYGLALKVATPPPSAQPWKGDPVEQLVRHFLIETGPKGVKIKGCPSEPYFGSLSALVSQHSISPISLPCCLRIPSKDPLEETPEAPVPTNMSTAADLLRQGAACSVLYLTSVETESLTGPQAVARASSAALSCSPRPTPAVVHFKVSAQGITLTDNQRKLFFRRHYPVNSITFSSTDPQDRRWTNPDGTTSKIFGFVAKKPGSPWENVCHLFAELDPDQPAGAIVTFITKVLLGQRK

SEQ ID NO: 939 - DNA, 4952 bp, Homo sapiens
gcacattctttcaagtgacagctatagcctgtcccaggggctgctgtccacagcttggggctgaagactcccaggccattaaccccttagcttttaggaagattactccccctttttcaaggccccatccacctccctcccttgactcccaggacgggaagttggccatgttcccaggagggaggccggaggcccatggatgggggtggagtatgtgttgggaggggggacctcctgtccagtcctcaggccctgggacagctgctgaggaaggagagcagacccaggagagccatgaagcctaggaaagctgagcctcatagcttccgggagaaggttttccggaagaaacctccagtctgtgcagtatgtaaggtgaccatcgatgggacaggcgtttcgtgcagagtctgcaaggtggcgacgcacagaaaatgtgaagcaaaggtgacttcagcctgtcaggccttgcctcccgtggagttgcggcgaaacacggccccagtcaggcgcatagagcacctgggatccaccaaatctctgaaccactcaaagcagcgcagcactctgcccaggagcttcagcctggacccgctcatggagcggcgctgggacttagacctcacctacgtgacggagcgcatcttggccgccgccttccccgcgcggcccgatgaacagcggcaccggggccacctgcgcgagctggcccatgtgctgcaatccaagcaccgggacaagtacctgctcttcaacctttcagagaaaaggcatgacctgacccgcttaaaccccaaggttcaagacttcggctggcctgagctgcatgctccacccctggacaagctgtgctccatctgcaaagccatggagacatggctcagtgctgacccacagcacgtggtcgtactatactgcaagggaaacaagggcaagcttggggtcatcgtttctgcctacatgcactacagcaagatctctgcaggggcggaccaggcactggccactcttaccatgcggaaattctgcgaggacaaggtggccacagaactgcagccctcccagcgtcgatatatcagctacttcagtgggctgctatctggctccatcagaatgaacagcagccctctcttcctgcactatgtgctcatccccatgctgccagcctttgaacctggcacaggcttccagcccttccttaaaatctaccagtccatgcagcttgtctacacatctggagtctatcacattgcaggccctggtccccagcagctttgcatcagcctggagccagccctcctcctcaaaggcgatgtcatggtaacatgttatcacaagggtggccggggcacagaccggaccctcgtgttccgagtccagttccacacctgcaccatccacggaccacagctcactttccccaaggaccagcttgacgaggcctggactgatgagaggttccccttccaagcctccgtggagtttgtcttctcctccagccccgagaagatcaaaggcagcactccacggaacgacccctcggtctctgtcgactacaacaccactgagccagccgtgcgctgggactcctatgagaacttcaaccagcaccacgaggacagtgtggatggctccttgacccacacccggggtcccctggatggcagtccttatgcccaggtgcagcggcctccccggcagacccccccggcaccctctccagagcctccaccaccccccatgctctctgtcagcagcgactcaggccattcctccacgctgaccacagagccggctgctgagtcccctggccggccgccccctacagctgctgaacggcaggagctggatcgcctcctaggaggctgcggagtggccagtgggggccggggagctgggcgcgagacggccatcctagatgacgaagagcagcccactgtgggcggaggcccccacctcggagtgtatccaggccataggcctggcctcagccgccactgctcctgccgccagggctaccgggagccctgcggggttcccaatgggggctactaccggccagagggaaccctggagaggaggcgactggcctacgggggctatgagggatccccccagggctacgccgaggcctcgatggagaagaggcgcctctgccgatcgctgtcagaggggctatacccctacccacctgagatggggaaaccagccactggggactttggctaccgcgccccaggctaccgggaggtggtcatcctggaggaccctgggctgcctgccctatacccatgcccagcctgcgaggagaagctggcgctgcctacagcagccttgtatggactgcggctggagagggaggctggagaagggtgggcaagtgaggctggcaagcctctcctgcacccagtgcggcctgggcacccgctgcctctgctcttgcctgcctgtgggcatcaccatgccccgatgcctgactacagctgcctgaagccacccaaggcaggcgaggaagggcacgagggctgctcctacaccatgtgccccgaaggcaggtatgggcatccagggtaccctgccctggtgacatacagctatggaggagcagttcccagttactgcccagcatatggccgtgtgcctcatagctgtggctctccaggagagggcagagggtatcccagccctggtgcccactccccacgggctggctccatttccccgggcagcccgccctatccacaatctaggaagctgagctacgagatccctacggaggagggaggggacaggtacccattgcctgggcacctggcctcagcaggacctttggcatctgcagagtcgctggagccggtgtcctggagggagggccccagtgggcacagcacactgcctcggtctccccgagatgccccatgcagtgcttcgtcagagttgtctggtccctccacgcccctgcacaccagcagtccagtccagggcaaggaaagcacccggcgacaggacaccaggtcccccacctcagcgcccactcagagactgagtcctggcgaggccttgccccctgtttcccaggcaggcaccggaaaggcccctgagctgccgtcgggaagtgggcctgagcctctggcccctagcccagtctctccgaccttccctcccagctcgcccagtgactggcctcaggaaaggagtccagggggccactcagatggcgccagtcctcggagccctgtgcccaccacacttcctggcctccgccacgccccctggcaaggccctcgaggcccccccgacagcccagatgggtctcccctcactcctgtgccttcccagatgccctggcttgtggccagcccagagccgcctcagagctcacctacacctgctttccccctggctgcctcctatgacaccaatggccttagccagcccccacttcctgagaaacgccacctgcccgggccggggcaacagccaggaccctggggcccagagcaggcatcatcgccagccagaggcatcagtcaccatgtcaccttcgcacctctgctctcagataatgtcccccaaaccccagagcctcctacacaagagagccaaagcaatgtcaagtttgtccaggatacatccaagttctggtacaagccacacctgtcccgtgaccaagccattgccctgctgaaggacaaggaccctggggccttcctgatcagggacagtcattcattccaaggagcttatgggctggccctcaaggtggccacaccgccacccagtgcccagccctggaaaggggaccccgtggaacagctggtccgccatttcctcatcgagactgggcccaaaggggtgaagatcaagggctgccccagtgagccctactttggcagcctgtccgccttggtctcccagcactccatctcccccatctccctgccctgctgcctgcgcattcccagcaaagatcctctggaagagaccccagaggctccagtgcccaccaacatgagcacagcggcagacctcctgcgtcagggtgctgcctgcagcgtgctctacttgacctcagtggagacagagtcactgacgggcccccaagctgtggcccgggccagctctgcagctctgagctgtagcccccgcccgacaccagctgttgtccacttcaaggtgtcagcccagggcattacactgacggacaaccaaaggaagctcttctttcgccgccattatccagtgaacagcatcaccttctccagcactgaccctcaagaccggagatggaccaacccagacgggaccacctccaagatctttggtttcgtggccaagaagccgggaagcccctgggagaatgtgtgtcacctctttgcagagcttgacccagatcagcctgctggcgccattgtcaccttcatcaccaaagttctactgggccagagaaaatgaaggaaggccacaagctcagagcccacatcaacactgcccccctcccagcaccccacagccctcacatcccctggcctggacccaggagacccaggagaaagcaccctcccttaggaatgaggagtgggcatcaggcctgggacactgctctccttccccgcccccagcctgctaagttaagtggacaggcccacaagatgaccttgcatgtgagcagatggcagagatgggtgtgtgaggggtgaggaggcatcagcagttgagccccgaaggagatcaggcagccccacctgcaggagaacgtcagccctccaggggatcagcccctgccagttccacccagctgcaggtgccagcacggcagggatgggagaggggtggggagcgagtcactgcctcctctgagcagagattcagagtaggatcacatgaataggggaaaaaagagagtctatttttgtctaataataaagaatttctataaactttagccgaaa

SEQ ID NO: 940 - protein, 1419 aa, Homo sapiens
MDGGGVCVGRGDLLSSPQALGQLLRKESRPRRAMKPRKAEPHSFREKVFRKKPPVCAVCKVTIDGTGVSCRVCKVATHRKCEAKVTSACQALPPVELRRNTAPVRRIEHLGSTKSLNHSKQRSTLPRSFSLDPLMERRWDLDLTYVTERILAAAFPARPDEQRHRGHLRELAHVLQSKHRDKYLLFNLSEKRHDLTRLNPKVQDFGWPELHAPPLDKLCSICKAMETWLSADPQHVVVLYCKGNKGKLGVIVSAYMHYSKISAGADQALATLTMRKFCEDKVATELQPSQRRYISYFSGLLSGSIRMNSSPLFLHYVLIPMLPAFEPGTGFQPFLKIYQSMQLVYTSGVYHIAGPGPQQLCISLEPALLLKGDVMVTCYHKGGRGTDRTLVFRVQFHTCTIHGPQLTFPKDQLDEAWTDERFPFQASVEFVFSSSPEKIKGSTPRNDPSVSVDYNTTEPAVRWDSYENFNQHHEDSVDGSLTHTRGPLDGSPYAQVQRPPRQTPPAPSPEPPPPPMLSVSSDSGHSSTLTTEPAAESPGRPPPTAAERQELDRLLGGCGVASGGRGAGRETAILDDEEQPTVGGGPHLGVYPGHRPGLSRHCSCRQGYREPCGVPNGGYYRPEGTLERRRLAYGGYEGSPQGYAEASMEKRRLCRSLSEGLYPYPPEMGKPATGDFGYRAPGYREVVILEDPGLPALYPCPACEEKLALPTAALYGLRLEREAGEGWASEAGKPLLHPVRPGHPLPLLLPACGHHHAPMPDYSCLKPPKAGEEGHEGCSYTMCPEGRYGHPGYPALVTYSYGGAVPSYCPAYGRVPHSCGSPGEGRGYPSPGAHSPRAGSISPGSPPYPQSRKLSYEIPTEEGGDRYPLPGHLASAGPLASAESLEPVSWREGPSGHSTLPRSPRDAPCSASSELSGPSTPLHTSSPVQGKESTRRQDTRSPTSAPTQRLSPGEALPPVSQAGTGKAPELPSGSGPEPLAPSPVSPTFPPSSPSDWPQERSPGGHSDGASPRSPVPTTLPGLRHAPWQGPRGPPDSPDGSPLTPVPSQMPWLVASPEPPQSSPTPAFPLAASYDTNGLSQPPLPEKRHLPGPGQQPGPWGPEQASSPARGISHHVTFAPLLSDNVPQTPEPPTQESQSNVKFVQDTSKFWYKPHLSRDQAIALLKDKDPGAFLIRDSHSFQGAYGLALKVATPPPSAQPWKGDPVEQLVRHFLIETGPKGVKIKGCPSEPYFGSLSALVSQHSISPISLPCCLRIPSKDPLEETPEAPVPTNMSTAADLLRQGAACSVLYLTSVETESLTGPQAVARASSAALSCSPRPTPAVVHFKVSAQGITLTDNQRKLFFRRHYPVNSITFSSTDPQDRRWTNPDGTTSKIFGFVAKKPGSPWENVCHLFAELDPDQPAGAIVTFITKVLLGQRK

SEQ ID NO: 941 - DNA, 5009 bp, Homo sapiens
gggggagcaaaagatcacaggctgacactcccagcagggtagatcctgggaatctgatctcctggcctcccccacatcctcccccctccacttcctggagcagcgacctgcccccttcccgcctgcacttccctccacttccagggccgggcttctcctcacaccagccagacagcctaccctccgcccaggggaagcggctgcctccgccaggccgcttccaggaagccccgggccaggccccagcattgttcaggccctggggccagcaccccagccagccgaacaccatgaagtccagcggccctgtggagaggctgctcagagccctggggaggagggacagcagccgggccgcaagcaggcctaggaaagctgagcctcatagcttccgggagaaggttttccggaagaaacctccagtctgtgcagtatgtaaggtgaccatcgatgggacaggcgtttcgtgcagagtctgcaaggtggcgacgcacagaaaatgtgaagcaaaggtgacttcagcctgtcaggccttgcctcccgtggagttgcggcgaaacacggccccagtcaggcgcatagagcacctgggatccaccaaatctctgaaccactcaaagcagcgcagcactctgcccaggagcttcagcctggacccgctcatggagcggcgctgggacttagacctcacctacgtgacggagcgcatcttggccgccgccttccccgcgcggcccgatgaacagcggcaccggggccacctgcgcgagctggcccatgtgctgcaatccaagcaccgggacaagtacctgctcttcaacctttcagagaaaaggcatgacctgacccgcttaaaccccaaggttcaagacttcggctggcctgagctgcatgctccacccctggacaagctgtgctccatctgcaaagccatggagacatggctcagtgctgacccacagcacgtggtcgtactatactgcaagggaaacaagggcaagcttggggtcatcgtttctgcctacatgcactacagcaagatctctgcaggggcggaccaggcactggccactcttaccatgcggaaattctgcgaggacaaggtggccacagaactgcagccctcccagcgtcgatatatcagctacttcagtgggctgctatctggctccatcagaatgaacagcagccctctcttcctgcactatgtgctcatccccatgctgccagcctttgaacctggcacaggcttccagcccttccttaaaatctaccagtccatgcagcttgtctacacatctggagtctatcacattgcaggccctggtccccagcagctttgcatcagcctggagccagccctcctcctcaaaggcgatgtcatggtaacatgttatcacaagggtggccggggcacagaccggaccctcgtgttccgagtccagttccacacctgcaccatccacggaccacagctcactttccccaaggaccagcttgacgaggcctggactgatgagaggttccccttccaagcctccgtggagtttgtcttctcctccagccccgagaagatcaaaggcagcactccacggaacgacccctcggtctctgtcgactacaacaccactgagccagccgtgcgctgggactcctatgagaacttcaaccagcaccacgaggacagtgtggatggctccttgacccacacccggggtcccctggatggcagtccttatgcccaggtgcagcggcctccccggcagacccccccggcaccctctccagagcctccaccaccccccatgctctctgtcagcagcgactcaggccattcctccacgctgaccacagagccggctgctgagtcccctggccggccgccccctacagctgctgaacggcaggagctggatcgcctcctaggaggctgcggagtggccagtgggggccggggagctgggcgcgagacggccatcctagatgacgaagagcagcccactgtgggcggaggcccccacctcggagtgtatccaggccataggcctggcctcagccgccactgctcctgccgccagggctaccgggagccctgcggggttcccaatgggggctactaccggccagagggaaccctggagaggaggcgactggcctacgggggctatgagggatccccccagggctacgccgaggcctcgatggagaagaggcgcctctgccgatcgctgtcagaggggctatacccctacccacctgagatggggaaaccagccactggggactttggctaccgcgccccaggctaccgggaggtggtcatcctggaggaccctgggctgcctgccctatacccatgcccagcctgcgaggagaagctggcgctgcctacagcagccttgtatggactgcggctggagagggaggctggagaagggtgggcaagtgaggctggcaagcctctcctgcacccagtgcggcctgggcacccgctgcctctgctcttgcctgcctgtgggcatcaccatgccccgatgcctgactacagctgcctgaagccacccaaggcaggcgaggaagggcacgagggctgctcctacaccatgtgccccgaaggcaggtatgggcatccagggtaccctgccctggtgacatacagctatggaggagcagttcccagttactgcccagcatatggccgtgtgcctcatagctgtggctctccaggagagggcagagggtatcccagccctggtgcccactccccacgggctggctccatttccccgggcagcccgccctatccacaatctaggaagctgagctacgagatccctacggaggagggaggggacaggtacccattgcctgggcacctggcctcagcaggacctttggcatctgcagagtcgctggagccggtgtcctggagggagggccccagtgggcacagcacactgcctcggtctccccgagatgccccatgcagtgcttcgtcagagttgtctggtccctccacgcccctgcacaccagcagtccagtccagggcaaggaaagcacccggcgacaggacaccaggtcccccacctcagcgcccactcagagactgagtcctggcgaggccttgccccctgtttcccaggcaggcaccggaaaggcccctgagctgccgtcgggaagtgggcctgagcctctggcccctagcccagtctctccgaccttccctcccagctcgcccagtgactggcctcaggaaaggagtccagggggccactcagatggcgccagtcctcggagccctgtgcccaccacacttcctggcctccgccacgccccctggcaaggccctcgaggcccccccgacagcccagatgggtctcccctcactcctgtgccttcccagatgccctggcttgtggccagcccagagccgcctcagagctcacctacacctgctttccccctggctgcctcctatgacaccaatggccttagccagcccccacttcctgagaaacgccacctgcccgggccggggcaacagccaggaccctggggcccagagcaggcatcatcgccagccagaggcatcagtcaccatgtcaccttcgcacctctgctctcagataatgtcccccaaaccccagagcctcctacacaagagagccaaagcaatgtcaagtttgtccaggatacatccaagttctggtacaagccacacctgtcccgtgaccaagccattgccctgctgaaggacaaggaccctggggccttcctgatcagggacagtcattcattccaaggagcttatgggctggccctcaaggtggccacaccgccacccagtgcccagccctggaaaggggaccccgtggaacagctggtccgccatttcctcatcgagactgggcccaaaggggtgaagatcaagggctgccccagtgagccctactttggcagcctgtccgccttggtctcccagcactccatctcccccatctccctgccctgctgcctgcgcattcccagcaaagatcctctggaagagaccccagaggctccagtgcccaccaacatgagcacagcggcagacctcctgcgtcagggtgctgcctgcagcgtgctctacttgacctcagtggagacagagtcactgacgggcccccaagctgtggcccgggccagctctgcagctctgagctgtagcccccgcccgacaccagctgttgtccacttcaaggtgtcagcccagggcattacactgacggacaaccaaaggaagctcttctttcgccgccattatccagtgaacagcatcaccttctccagcactgaccctcaagaccggagatggaccaacccagacgggaccacctccaagatctttggtttcgtggccaagaagccgggaagcccctgggagaatgtgtgtcacctctttgcagagcttgacccagatcagcctgctggcgccattgtcaccttcatcaccaaagttctactgggccagagaaaatgaaggaaggccacaagctcagagcccacatcaacactgcccccctcccagcaccccacagccctcacatcccctggcctggacccaggagacccaggagaaagcaccctcccttaggaatgaggagtgggcatcaggcctgggacactgctctccttccccgcccccagcctgctaagttaagtggacaggcccacaagatgaccttgcatgtgagcagatggcagagatgggtgtgtgaggggtgaggaggcatcagcagttgagccccgaaggagatcaggcagccccacctgcaggagaacgtcagccctccaggggatcagcccctgccagttccacccagctgcaggtgccagcacggcagggatgggagaggggtggggagcgagtcactgcctcctctgagcagagattcagagtaggatcacatgaataggggaaaaaagagagtctatttttgtctaataataaagaatttctataaacttt

SEQ ID NO: 942 - protein, 1409 aa, Homo sapiens
MKSSGPVERLLRALGRRDSSRAASRPRKAEPHSFREKVFRKKPPVCAVCKVTIDGTGVSCRVCKVATHRKCEAKVTSACQALPPVELRRNTAPVRRIEHLGSTKSLNHSKQRSTLPRSFSLDPLMERRWDLDLTYVTERILAAAFPARPDEQRHRGHLRELAHVLQSKHRDKYLLFNLSEKRHDLTRLNPKVQDFGWPELHAPPLDKLCSICKAMETWLSADPQHVVVLYCKGNKGKLGVIVSAYMHYSKISAGADQALATLTMRKFCEDKVATELQPSQRRYISYFSGLLSGSIRMNSSPLFLHYVLIPMLPAFEPGTGFQPFLKIYQSMQLVYTSGVYHIAGPGPQQLCISLEPALLLKGDVMVTCYHKGGRGTDRTLVFRVQFHTCTIHGPQLTFPKDQLDEAWTDERFPFQASVEFVFSSSPEKIKGSTPRNDPSVSVDYNTTEPAVRWDSYENFNQHHEDSVDGSLTHTRGPLDGSPYAQVQRPPRQTPPAPSPEPPPPPMLSVSSDSGHSSTLTTEPAAESPGRPPPTAAERQELDRLLGGCGVASGGRGAGRETAILDDEEQPTVGGGPHLGVYPGHRPGLSRHCSCRQGYREPCGVPNGGYYRPEGTLERRRLAYGGYEGSPQGYAEASMEKRRLCRSLSEGLYPYPPEMGKPATGDFGYRAPGYREVVILEDPGLPALYPCPACEEKLALPTAALYGLRLEREAGEGWASEAGKPLLHPVRPGHPLPLLLPACGHHHAPMPDYSCLKPPKAGEEGHEGCSYTMCPEGRYGHPGYPALVTYSYGGAVPSYCPAYGRVPHSCGSPGEGRGYPSPGAHSPRAGSISPGSPPYPQSRKLSYEIPTEEGGDRYPLPGHLASAGPLASAESLEPVSWREGPSGHSTLPRSPRDAPCSASSELSGPSTPLHTSSPVQGKESTRRQDTRSPTSAPTQRLSPGEALPPVSQAGTGKAPELPSGSGPEPLAPSPVSPTFPPSSPSDWPQERSPGGHSDGASPRSPVPTTLPGLRHAPWQGPRGPPDSPDGSPLTPVPSQMPWLVASPEPPQSSPTPAFPLAASYDTNGLSQPPLPEKRHLPGPGQQPGPWGPEQASSPARGISHHVTFAPLLSDNVPQTPEPPTQESQSNVKFVQDTSKFWYKPHLSRDQAIALLKDKDPGAFLIRDSHSFQGAYGLALKVATPPPSAQPWKGDPVEQLVRHFLIETGPKGVKIKGCPSEPYFGSLSALVSQHSISPISLPCCLRIPSKDPLEETPEAPVPTNMSTAADLLRQGAACSVLYLTSVETESLTGPQAVARASSAALSCSPRPTPAVVHFKVSAQGITLTDNQRKLFFRRHYPVNSITFSSTDPQDRRWTNPDGTTSKIFGFVAKKPGSPWENVCHLFAELDPDQPAGAIVTFITKVLLGQRK

SEQ ID NO: 943 - DNA, 1146 bp, Homo sapiens
gctgcgggaccgccgggcgcagagcacaagccgggcacccacggactgagcggcgcgcgggccgagatgcgcgcccgcctgctgcccccgctcccgggcctggagcggcgcgaccccatggcaggtagcggcggcctgggcggcggggccgggggcggccagggcgcaggggccgggcaaggggccgctctgcgggcgtcccgcgcgccgatgctgctcgtggccctggtgctcggcgcctactgcctctgcgccctccccggccgctgcccgccggccgcccgcgcccccgcgccggcccccgcgccctccgagccgtccagctccgtccaccgcccgggagcacccggcctgcctttggccagcggtcccggccgccggcgcttcccgcaagcgctcatcgttggcgtgaagaagggcggcacgcgcgccctgctggagtttctgcggctgcaccccgacgtccgcgcgctgggctctgagccccacttcttcgacaggtgctacgagcgcggcctcgcctggtaccggagtctgatgccccgaaccctggatgggcagatcaccatggagaagacccccagctacttcgtgacgcgagaggccccccgccgcatccacgccatgtccccggacacgaagctgatcgtggtggtgcggaaccccgtgacccgggccatctccgactacgcccagacgctctccaagaccccgggcctgcccagcttccgcgccctggccttccgccacggcctgggccccgtggacacagcctggagcgccgtccgcatcggcctgtacgcccagcacctggaccactggctgcgctacttccccctgtcccacttcctgttcgtcagcggggagcgtctggtcagcgacccggccggagaggtcggccgcgtgcaggacttcctgggcctgaaacgggtcgtcacggacaagcacttctacttcaacgccaccaagggcttcccctgcctcaagaaggcccagggcggcagccgtccccgctgcctgggcaagtccaagggccggccacacccacgcgtgccccaggccctggtccggcgcctgcaggagttctaccggcccttcaaccgcaggttctaccagatgacgggccaggacttcggctggggctga

SEQ ID NO: 944 - protein, 381 aa, Homo sapiens
AAGPPGAEHKPGTHGLSGARAEMRARLLPPLPGLERRDPMAGSGGLGGGAGGGQGAGAGQGAALRASRAPMLLVALVLGAYCLCALPGRCPPAARAPAPAPAPSEPSSSVHRPGAPGLPLASGPGRRRFPQALIVGVKKGGTRALLEFLRLHPDVRALGSEPHFFDRCYERGLAWYRSLMPRTLDGQITMEKTPSYFVTREAPRRIHAMSPDTKLIVVVRNPVTRAISDYAQTLSKTPGLPSFRALAFRHGLGPVDTAWSAVRIGLYAQHLDHWLRYFPLSHFLFVSGERLVSDPAGEVGRVQDFLGLKRVVTDKHFYFNATKGFPCLKKAQGGSRPRCLGKSKGRPHPRVPQALVRRLQEFYRPFNRRFYQMTGQDFGWG

SEQ ID NO: 945 - DNA, 2970 bp, Homo sapiens
gaacaacctctctctctccagcagagagtgtcacctcctgctttaggaccatcaagctctgctaactgaatctcatcctaattgcaggatcacattgcaaagctttcactctttcccaccttgcttgtgggtaaatctcttctgcggaatctcagaaagtaaagttccatcctgagaatatttcacaaagaatttccttaagagctggactgggtcttgacccctgaatttaagaaattcttaaagacaatgtcaaatatgatccaagagaaaatgtgatttgagactggagacaattgtgcatatcgtctaataataaaaacccatactagcctatagaaaacaatatttgaaagattgctaccactaaaaagaaaactactacaacttgacaagactgctgcaaacttcaatttgtcaaccacaacttgacaaggttgctataaaacaagattgctacaacttctagtttatgttatacagcatatttcattttggcttaatgatggagaaaaagtgtaccctgaattttctggttctcttgcctttttttatgattcttgttacagcagaattagaagagagtcctgaggactcaattcagttgggagttactagaaataaaatcatgacagctcaatatgaatgttaccaaaagattatgcaagaccccattcaacaagcagaaggcgtttactgcaacagaacctgggatggatggctctgctggaacgatgttgcagcaggaactgaatcaatgcagctctgccctgattactttcaggactttgatccatcagaaaaagttacaaagatctgtgaccaagatggaaactggtttagacatccagcaagcaacagaacatggacaaattatacccagtgtaatgttaacacccacgagaaagtgaagactgcactaaatttgttttacctgaccataattggacacggattgtctattgcatcactgcttatctcgcttggcatattcttttatttcaagagcctaagttgccaaaggattaccttacacaaaaatctgttcttctcatttgtttgtaactctgttgtaacaatcattcacctcactgcagtggccaacaaccaggccttagtagccacaaatcctgttagttgcaaagtgtcccagttcattcatctttacctgatgggctgtaattacttttggatgctctgtgaaggcatttacctacacacactcattgtggtggccgtgtttgcagagaagcaacatttaatgtggtattattttcttggctggggatttccactgattcctgcttgtatacatgccattgctagaagcttatattacaatgacaattgctggatcagttctgatacccatctcctctacattatccatggcccaatttgtgctgctttactggtgaatctttttttcttgttaaatattgtacgcgttctcatcaccaagttaaaagttacacaccaagcggaatccaatctgtacatgaaagctgtgagagctactcttatcttggtgccattgcttggcattgaatttgtgctgattccatggcgacctgaaggaaagattgcagaggaggtatatgactacatcatgcacatccttatgcacttccagggtcttttggtctctaccattttctgcttctttaatggagaggttcaagcaattctgagaagaaactggaatcaatacaaaatccaatttggaaacagcttttccaactcagaagctcttcgtagtgcgtcttacacagtgtcaacaatcagtgatggtccaggttatagtcatgactgtcctagtgaacacttaaatggaaaaagcatccatgatattgaaaatgttctcttaaaaccagaaaatttatataattgaaaatagaaggatggttgtctcactgttttgtgcttctcctaactcaaggacttggacccatgactctgtagccagaagacttcaatattaaatgactttttgaatgtcataaagaagagccttcacatgaaattagtagtgtgttgataagagtgtaacatccagctctatgtgggaaaaaagaaatcctggtttgtaatgtttgtcagtaaatactcccactatgcctgatgtgacgctactaacctgacatcaccaagtgtggaattggagaaaagcacaatcaacttttctgagctggtgtaagccagttccagcacaccattgcatgaattcacaaacaaatggctgtaaaactaaacatacatgttgggcatgattctacccttattgccccaagagacctagctaaggtctataaacatgaagggaaaattagcttttagttttaaaactctttatcccatcttgattggggcagttgactttttttttgcccagagtgccgtagtcctttttgtaactaccctctcaaatggacaataccagaagtgaattatccctgctggctttcttttctctatgaaaagcaactgagtacaattgttatgatctactcatttgctgacacatcagttatatcttgtggcatatccattgtggaaactggatgaacaggatgtataatatgcaatcctacttctatatcattaggaaaacatcttagttgatgctacaaaacaccttgtcaacctcttcctgtcttaccaaacagtgggagggaattcctagctgtaaatataaattttgtcccttccatttctactgtataaacaaattagcaatcattttatataaagaaaatcaatgaaggatttcttattttcttggaattttgtaaaaagaaattgtgaaaaatgagcttgtaaatactccattattttattttatagtctcaaatcaaatacatacaacctatgtaatttttaaagcaaatatataatgcaacaatgtgtgtatgttaatatctgatactgtatctgggctgattttttaaataaaatagagtctggaatgct

SEQ ID NO: 946 - protein, 461 aa, Homo sapiens
MEKKCTLNFLVLLPFFMILVTAELEESPEDSIQLGVTRNKIMTAQYECYQKIMQDPIQQAEGVYCNRTWDGWLCWNDVAAGTESMQLCPDYFQDFDPSEKVTKICDQDGNWFRHPASNRTWTNYTQCNVNTHEKVKTALNLFYLTIIGHGLSIASLLISLGIFFYFKSLSCQRITLHKNLFFSFVCNSVVTIIHLTAVANNQALVATNPVSCKVSQFIHLYLMGCNYFWMLCEGIYLHTLIVVAVFAEKQHLMWYYFLGWGFPLIPACIHAIARSLYYNDNCWISSDTHLLYIIHGPICAALLVNLFFLLNIVRVLITKLKVTHQAESNLYMKAVRATLILVPLLGIEFVLIPWRPEGKIAEEVYDYIMHILMHFQGLLVSTIFCFFNGEVQAILRRNWNQYKIQFGNSFSNSEALRSASYTVSTISDGPGYSHDCPSEHLNGKSIHDIENVLLKPENLYN

SEQ ID NO: 947 - DNA, 1775 bp, Homo sapiens
caggtcctgggagaggacagaaaacaactgggactcctcagcccccggcagctcccagtgcccagccacccacaacacaacccaaagccttctagacaagctcagtggaatctgaagggcccaccccatggaggaatgctgggtgacagagatagccaatggctccaaggatggcttggattccaaccctatgaaggattacatgatcctgagtggtccccagaagacagctgttgctgtgttgtgcactcttctgggcctgctaagtgccctggagaacgtggctgtgctctatctgatcctgtcctcccaccaactccgccggaagccctcatacctgttcattggcagcttggctggggctgacttcctggccagtgtggtctttgcatgcagctttgtgaatttccatgttttccatggtgtggattccaaggctgtcttcctgctgaagattggcagcgtgactatgaccttcacagcctctgtgggtagcctcctgctgaccgccattgaccgatacctctgcctgcgctatccaccttcctacaaagctctgctcacccgtggaagggcactggtgaccctgggcatcatgtgggtcctctcagcactagtctcctacctgcccctcatgggatggacttgctgtcccaggccctgctctgagcttttcccactgatccccaatgactacctgctgagctggctcctgttcatcgccttcctcttttccggaatcatctacacctatgggcatgttctctggaaggcccatcagcatgtggccagcttgtctggccaccaggacaggcaggtgccaggaatggcccgaatgaggctggatgtgaggttggccaagaccctagggctagtgttggctgtgctcctcatctgttggttcccagtgctggccctcatggcccacagcctggccactacgctcagtgaccaggtcaagaaggcctttgctttctgctccatgctgtgcctcatcaactccatggtcaaccctgtcatctatgctctacggagtggagagatccgctcctctgcccatcactgcctggctcactggaagaagtgtgtgaggggccttgggtcagaggcaaaagaagaagccccgagatcctcagtcaccgagacagaggctgatgggaaaatcactccgtggccagattccagagatctagacctctctgattgctgatgaggcctcttcccaatttaaacaactcaagtcagaaatcagttcactccctggaagagagagaggggtcttggcactctcttcttacttaaaccagtcccagacacctagacacggacccctttttgctgatgagtgttgggactgactcctggaagacagcctggccttgcccacctgcacacagtctgttggataggtagggccacgaggagtagccaggtaggcgagacacaaaaggcctgggacagggtcagtacaagtcaggtcaggcttcatgcctgcatcctccagagaccacaggagccaaagcgagcctccaggcccagcaatgagggacttgggagaaatctgagaagaatgggttgttctcttgggaagtcagggtatcagatgggatggacatccaggtcttctctctgcctaattgtcaaggcctccttggctctggagctatgaaaggccccactttcaagtcacccttgccactgaggaccgaggactatgctatgatgaggattaaggtgttgacttgcctctttcagagataaatgacaagccttca

SEQ ID NO: 948 - protein, 360 aa, Homo sapiens
MEECWVTEIANGSKDGLDSNPMKDYMILSGPQKTAVAVLCTLLGLLSALENVAVLYLILSSHQLRRKPSYLFIGSLAGADFLASVVFACSFVNFHVFHGVDSKAVFLLKIGSVTMTFTASVGSLLLTAIDRYLCLRYPPSYKALLTRGRALVTLGIMWVLSALVSYLPLMGWTCCPRPCSELFPLIPNDYLLSWLLFIAFLFSGIIYTYGHVLWKAHQHVASLSGHQDRQVPGMARMRLDVRLAKTLGLVLAVLLICWFPVLALMAHSLATTLSDQVKKAFAFCSMLCLINSMVNPVIYALRSGEIRSSAHHCLAHWKKCVRGLGSEAKEEAPRSSVTETEADGKITPWPDSRDLDLSDC

SEQ ID NO: 949 - DNA, 2718 bp, Homo sapiens
gctcggagctgtagccgccgctgccgccgctgctcttggctcggggacgcgggcgggcgctccgagaggctctggtgcctgcggctgctgctctcctccggcgcccggggctgcggcgctccgggtcccggcccctgtcccggcatctctcgggtccctgagccccggccccgggtcccgcgtccggccggagagaacgcactcagctgctcgagccgccccgggctcgcgcccccgggccatgaagaggggcccgtgaggcgcgcgcggagtcggaggaagaggagggaggagggaggccgaggaggagggcgcgggaggcggaggatgccgccgcggctgctgccgccgccgccacccgcgggtccccggcgaccctgactccagacccgaggatggagccggcgctgggcgctgcagctgctcccggcgcgtccccgaccaggtagctggtgtcacttcggtgtggttggaagaagactttctccccagctgcattcccggaggcgccctttcgacctggaggccgggtctgctggccacagggctgccgcactggctgggactgccagctgggcctggagacgctggtggctgtggactccccagcttggagcagtccctctttgacctcaccccttggagaagcagccccatgaaggtgcccagccatgcaatgttcctggaaggccgtcctcctccttgccctggcctccattgccatccagtacacggccatccgcaccttcaccgccaagtcctttcacacctgccccgggctggcagaggccgggctggccgagcgactgtgcgaggagagccccaccttcgcctacaacctctcccgcaagacccacatcctcatcctggccaccacgcgcagtggctcctccttcgtgggccagctcttcaaccagcacctggacgtcttctacctgtttgagcccctctaccacgtccagaacacgctcatcccccgcttcacccagggcaagagcccggccgaccggcgggtcatgctaggcgccagccgcgacctcctgcggagcctctacgactgcgacctctacttcctggagaactacatcaagccgccgccggtcaaccacaccaccgacaggatcttccgccgcggggccagccgggtcctctgctcccggcctgtgtgcgaccctccggggccagccgacctggtcctggaggagggggactgtgtgcgcaagtgcgggctactcaacctgaccgtggcggccgaggcgtgccgcgagcgcagccacgtggccatcaagacggtgcgcgtgcccgaggtgaacgacctgcgcgccctggtggaagacccgcgattaaacctcaaggtcatccagctggtccgagacccccgcggcattctggcttcgcgcagcgagaccttccgcgacacgtaccggctctggcggctctggtacggcaccgggaggaaaccctacaacctggacgtgacgcagctgaccacggtgtgcgaggacttctccaactccgtgtccaccggcctcatgcggcccccgtggctcaagggcaagtacatgttggtgcgctacgaggacctggctcggaaccctatgaagaagaccgaggagatctacgggttcctgggcatcccgctggacagccacgtggcccgctggatccagaacaacacgcggggcgaccccaccctgggcaagcacaaatacggcaccgtgcgaaactcggcggccacggccgagaagtggcgcttccgcctctcctacgacatcgtggcctttgcccagaacgcctgccagcaggtgctggcccagctgggctacaagatcgccgcctcggaggaggagctgaagaacccctcggtcagcctggtggaggagcgggacttccgccccttctcgtgacccgggcggtgcgggtgggggcgggaggcgcaaggtgtcggttttgataaaatggaccgtttttaactgttgccttattaacccctccctctcccacctcatcttcgtgtccttcctgcccccagctcaccccactcccttctgccccttttttgtctctgaaatttgcactacgtcttggacgggaatcactggggcagagggcgcctgaagtagggtcccgccccccccccccccattcagacacatggatgttgggtctctgtgcggacggtgacaatgtttacaagcaccacatttacacatccacacacgcacacgggcactcgcgaggcgacttctcaagcttttgaatgggtgagtggtcgggtatctagtttttgcactgtcttactattcaaggtaagaggatacaaacaagaggaccacttgtctctaatttatgaatggtgtccatcctttccccatccctgcctcctgcccctgacgcccatttccccccttagagcagcgaaactgccccctcctgcccgcccttgcctgtcggtgaggcaggtttttactgtgaggtgaacgtggacctgtttctgtttccagtctgtggtgatgctgtctgtctgtctgagtctcgtggccgcccctggaccagtgatgactgatgaatcttatgagcttctgattgatctcggggtccatctgtgatatttctttgtgccaaaaagaaaaaaaaagagtggatcagtttgctaaatgaacattgaaattgaaatgctttatctgtgttttctgtaaataaaagagtgcaataatc

SEQ ID NO: 950 - protein, 411 aa, Homo sapiens
MQCSWKAVLLLALASIAIQYTAIRTFTAKSFHTCPGLAEAGLAERLCEESPTFAYNLSRKTHILILATTRSGSSFVGQLFNQHLDVFYLFEPLYHVQNTLIPRFTQGKSPADRRVMLGASRDLLRSLYDCDLYFLENYIKPPPVNHTTDRIFRRGASRVLCSRPVCDPPGPADLVLEEGDCVRKCGLLNLTVAAEACRERSHVAIKTVRVPEVNDLRALVEDPRLNLKVIQLVRDPRGILASRSETFRDTYRLWRLWYGTGRKPYNLDVTQLTTVCEDFSNSVSTGLMRPPWLKGKYMLVRYEDLARNPMKKTEEIYGFLGIPLDSHVARWIQNNTRGDPTLGKHKYGTVRNSAATAEKWRFRLSYDIVAFAQNACQQVLAQLGYKIAASEEELKNPSVSLVEERDFRPFS

SEQ ID NO: 951 - DNA, 3936 bp, Homo sapiens
gtggcgtggcgacggagtcgcgcgagggacacgccgcgttgtgggttctcggcctgaggtgcgagagaagcggtgaccgcggccctggctgctcggacccgggaacatgatggtcgctggagcagaaggcgctgagaagggaccacggcggcgctgggtcgtgcgagccagtagcgggctgaaacgtagaggccagaaccaggtctcagggggcactaaaggcggtcggaggtaatccccacaccgcttcctcctggaagtcaggctggccgggagctcccgtatccaggacggttggtcgcctctggcctggcagggatcctagtgtctcgggacctcccggtgacgcgcctgcctcccctgctgcaccataggcccgggagtacggcgtccccacagcttggaccggcaggggctcgtgaaatgtttgtcaagtggataaatgaccatggccgtggtctccgcgggaggtgaggaaactgaaagccaccgaggaaaaggggggcgctccttaagaagtgccgcggtcacgtgtacgtttcaaaagaatggcgtgactgagtagggaggggaccgcggagaccctcagaccctggactgtaaggagatgaggggccgtgaaggggaacccaggaaactgagtcctgaaagcaaggaggaacttccagaatgaagggcgccgacactccttcctgcctttgctcaagcggttccttcaccccgatcaagttccttcccatttctccatctgggggatcctgaacgtgcacatcctcagagaagccctcctggggtctccaattctagtttattgccccctcctatcgatcccccagcgcgctcatcgggcctgtggacaaggacaggtttgaagagaggattccctggatcgcggaagggctgcaggaatggcacagccccttccgaggatgccaaaggagcccgggcaaaggaaagtggccgtgcccgggcctgcctaccactagatccccacccacctatgactgctcagtcccgctctcctaccacacccacctttcccggcccaagccagcgcaccccgctgactccctgcccagtccaaactccaaggctgggcaaggcactgatccactgctggacagacccggggcagcctctgggtgaacagcagcgtgtccgccggcagcgaaccgagaccagcgagccgaccatgcggctgcacagacttcgtgcgcggctgagcgcggtggcctgtgggcttctgctgcttcttgtccggggccagggccaggactcagccagtcccatccggaccacacacacggggcaggtgctggggagtcttgtccatgtgaagggcgccaatgccggggtccaaaccttcctgggaattccatttgccaagccacctctaggtccgctgcgatttgcaccccctgagccccctgaatcttggagtggtgtgagggatggaaccacccatccggccatgtgtctacaggacctcaccgcagtggagtcagagtttcttagccagttcaacatgaccttcccttccgactccatgtctgaggactgcctgtacctcagcatctacacgccggcccatagccatgaaggctctaacctgccggtgatggtgtggatccacggtggtgcgcttgtttttggcatggcttccttgtatgatggttccatgctggctgccttggagaacgtggtggtggtcatcatccagtaccgcctgggtgtcctgggcttcttcagcactggagacaagcacgcaaccggcaactggggctacctggaccaagtggctgcactacgctgggtccagcagaatatcgcccactttggaggcaaccctgaccgtgtcaccatttttggcgagtctgcgggtggcacgagtgtgtcttcgcttgttgtgtcccccatatcccaaggactcttccacggagccatcatggagagtggcgtggccctcctgcccggcctcattgccagctcagctgatgtcatctccacggtggtggccaacctgtctgcctgtgaccaagttgactctgaggccctggtgggctgcctgcggggcaagagtaaagaggagattcttgcaattaacaagcctttcaagatgatccccggagtggtggatggggtcttcctgcccaggcacccccaggagctgctggcctctgccgactttcagcctgtccctagcattgttggtgtcaacaacaatgaattcggctggctcatccccaaggtcatgaggatctatgatacccagaaggaaatggacagagaggcctcccaggctgctctgcagaaaatgttaacgctgctgatgttgcctcctacatttggtgacctgctgagggaggagtacattggggacaatggggatccccagaccctccaagcgcagttccaggagatgatggcggactccatgtttgtgatccctgcactccaagtagcacattttcagtgttcccgggcccctgtgtacttctacgagttccagcatcagcccagctggctcaagaacatcaggccaccgcacatgaaggcagaccatggtgatgagcttccttttgttttcagaagtttctttgggggcaactacattaaattcactgaggaagaggagcagctaagcaggaagatgatgaagtactgggccaactttgcgagaaatgggaaccccaatggcgagggtctgccacactggccgctgttcgaccaggaggagcaatacctgcagctgaacctacagcctgcggtgggccgggctctgaaggcccacaggctccagttctggaagaaggcgctgccccaaaagatccaggagctcgaggagcctgaagagagacacacagagctgtagctccctgtgccggggaggagggggtgggttcgctgacaggcgagggtcagcctgctgtgcccacacacacccactaaggagaaagaagttgattccttcattcacttcgccattcattcatacttccgtccatccattcagaaagcatttattaagaatttactcaggcatgatggcccatacttgtaatcccagctattgggaaggatgagatgggaggatggcttgaggccagaggtttgagaccgaccagccagggcaacacagtgagaccccttctcaaaaaaaaaaaaaaaaaagagagagtgtgtgattagaagctaaataggaaagttttgagcttcaagtcagtgaggagtaaaaaagatttttaaaaagcaaagaaaacaaaatataagggaaaaatatgagaaaaataaaaataaaaagagaataataggccaggcactgtggctcatgcccctaatcccagcacttttgggaggtcaaggtgagcagaacacctgaggacaggagtttgagaccagcctgcccaacgtggtgaaaccccatctctatgaaaaatacaaaaatcagacgggcacagtggtggtgcccacctgtgatcccagctactcaggaggctgaggcaggagaattacttgaacctgggaggcagaggttgcagtgagctgagattgtgccactgtactccagcctgggcaacaagagcgagactccgtttccaaaaaaataagagagaatagaagaagctactgcatgatgttagttaccaagcctgccatgggtcctctcttgctagacacactccatagatccccccactgagctgtggatgggcaaaccccggtggaatcccaccctccccaacaccccactgagccctgggccccctcctcccttcctcacctccaccttctccctgccttctctcttctctcgtctgagcccccaggccttttccactttgagggaggtgcttcgaagaatgttgcccacacctaagtgttagaagcctatgtccgttcatccctgagaggtctgaaagaataaaaataaattct

SEQ ID NO: 952 - protein, 623 aa, Homo sapiens
MTAQSRSPTTPTFPGPSQRTPLTPCPVQTPRLGKALIHCWTDPGQPLGEQQRVRRQRTETSEPTMRLHRLRARLSAVACGLLLLLVRGQGQDSASPIRTTHTGQVLGSLVHVKGANAGVQTFLGIPFAKPPLGPLRFAPPEPPESWSGVRDGTTHPAMCLQDLTAVESEFLSQFNMTFPSDSMSEDCLYLSIYTPAHSHEGSNLPVMVWIHGGALVFGMASLYDGSMLAALENVVVVIIQYRLGVLGFFSTGDKHATGNWGYLDQVAALRWVQQNIAHFGGNPDRVTIFGESAGGTSVSSLVVSPISQGLFHGAIMESGVALLPGLIASSADVISTVVANLSACDQVDSEALVGCLRGKSKEEILAINKPFKMIPGVVDGVFLPRHPQELLASADFQPVPSIVGVNNNEFGWLIPKVMRIYDTQKEMDREASQAALQKMLTLLMLPPTFGDLLREEYIGDNGDPQTLQAQFQEMMADSMFVIPALQVAHFQCSRAPVYFYEFQHQPSWLKNIRPPHMKADHGDELPFVFRSFFGGNYIKFTEEEEQLSRKMMKYWANFARNGNPNGEGLPHWPLFDQEEQYLQLNLQPAVGRALKAHRLQFWKKALPQKIQELEEPEERHTEL

SEQ ID NO: 953 - DNA, 2796 bp, Homo sapiens
atggcagaggtggaagcggtacagctgaaggaggaaggaaaccggcatttccagctccaggactacaaggccgccacaaatagctacagccaggccctgaagctgaccaaggacaaggccctgctggccacgctttatcggaaccgggcagcctgtggcctgaaaacggagagctacgtccaggcagcttcagatgcctccagagccatcgacatcaactcctcggacatcaaggctctgtatcggcgatgccaggcactggagcacctggggaagctggaccaggccttcaaagacgtgcagcgttgtgccaccctcgagccacggaaccagaacttccaggagatgctgaggagactcaacaccagcattcaggagaagctccgagtgcagttctccacagactcgagggtacagaagatgtttgagatcctcttggatgaaaacagtgaggctgataagcgggaaaaggctgccaacaatctcattgtcctaggccgtgaggaagcaggggctgagaagatcttccagaacaatggagtagccttgctactgcagcttctggacactaagaagcctgagctggtgctggctgcagtgcggaccctgtcgggcatgtgcagcggccaccaagccagagccacagtgattctgcatgcagtgcggatagaccgaatctgtagcctcatggccgtggagaatgaggagatgtctctggctgtctgcaacctgctccaagccatcattgactccttgtctggggaggacaagcgggagcatcgagggaaggaggaggccctggttctagacaccaagaaggacctgaagcagatcaccagccacctgctggacatgctagtcagcaagaaggtgtctggccagggcagggatcaggcgctgaacctgctcaataagaatgttcccaggaaggaccttgccattcatgacaactcacgtaccatctatgtggtggataatggtctgaggaagatcctgaaggttgtggggcaggttccagatctgccatcctgcctgcccctgactgacaacacccgcatgctggcctctatcctcatcaacaagctctatgatgacctgcgctgtgacccggagcgcgatcacttccgcaagatctgtgaggaatatatcacgggcaagtttgacccccaggacatggacaagaacttgaatgccatccagacagtgtcagggatcctgcagggcccctttgacctgggcaaccagctgctgggactgaaaggtgtgatggagatgatggtggcactatgtggctcagagcgcgagacggaccagctggtggccgtggaggccctcatccatgcctccacgaagctcagccgcgccaccttcatcatcaccaatggagtgtcactgctcaaacagatctacaagaccaccaaaaatgagaagatcaagatccgcacactggtgggactctgtaagctcggctctgcaggtggcacagactacggtctcaggcagtttgcggaagggtcgacagaaaaactggccaaacagtgtcgcaagtggctgtgcaatatgtccatagacactcggacccgacgctgggcagtggagggcctggcctacctcacgctggacgctgatgtgaaggacgactttgtccaggacgtccctgccctgcaggccatgtttgagctggccaaggcaggtaccagtgacaagaccatcctgtactcggtggccaccaccctggtgaactgcaccaacagctacgatgtcaaggaggtcatcccagagcttgtccagctcgccaagttctccaagcagcatgtgcccgaggaacaccccaaggacaagaaggactttatagacatgcgggtgaagcggcttctgaaggcgggtgtcatctctgccctggcttgcatggtgaaagcagatagtgccatcctcactgaccagaccaaggagctgctggccagggtattcctggcactgtgtgacaacccaaaggaccgaggcaccattgtggctcaaggtggtggcaaggccctgattcccctggctttggagggcacagatgtgggcaaggtgaaggcagcccacgctctagcaaagatcgctgctgtctccaatccggacattgcttttcctggggagcgggtgtatgaggtggtgcggccccttgtaagactcttggacacacagagggatgggcttcagaactatgaggctctcctaggcctcaccaacctgtctgggcggagtgacaaactccggcagaagatctttaaggagagggccttgccagacatcgagaactacatgtttgagaatcatgatcagctgcggcaggcggccaccgagtgcatgtgcaacatggtgctccacaaggaggtacaggaaaggttcttggctgacgggaatgaccggctgaagctggtggtgctgctctgcggggaggatgatgataaggtgcagaatgcggctgcaggggctctggccatgctgacagcagcacacaagaaactgtgcctcaagatgactcaagtgacaacccagtggttggagatcctccagcggctttgcctgcacgaccagctgtctgtccaacaccggggcctggtcattgcctacaacctactggcagccgatgctgagctggccaagaagctggtggagagtgagctgctggagatcctgactgtggtgggcaaacaggagccagatgagaagaaggcagaagtggttcagacagcccgagaatgtctcatcaagtgcatggattatggtttcattaaaccagtgtcttag

SEQ ID NO: 954 - protein, 931 aa, Homo sapiens
MAEVEAVQLKEEGNRHFQLQDYKAATNSYSQALKLTKDKALLATLYRNRAACGLKTESYVQAASDASRAIDINSSDIKALYRRCQALEHLGKLDQAFKDVQRCATLEPRNQNFQEMLRRLNTSIQEKLRVQFSTDSRVQKMFEILLDENSEADKREKAANNLIVLGREEAGAEKIFQNNGVALLLQLLDTKKPELVLAAVRTLSGMCSGHQARATVILHAVRIDRICSLMAVENEEMSLAVCNLLQAIIDSLSGEDKREHRGKEEALVLDTKKDLKQITSHLLDMLVSKKVSGQGRDQALNLLNKNVPRKDLAIHDNSRTIYVVDNGLRKILKVVGQVPDLPSCLPLTDNTRMLASILINKLYDDLRCDPERDHFRKICEEYITGKFDPQDMDKNLNAIQTVSGILQGPFDLGNQLLGLKGVMEMMVALCGSERETDQLVAVEALIHASTKLSRATFIITNGVSLLKQIYKTTKNEKIKIRTLVGLCKLGSAGGTDYGLRQFAEGSTEKLAKQCRKWLCNMSIDTRTRRWAVEGLAYLTLDADVKDDFVQDVPALQAMFELAKAGTSDKTILYSVATTLVNCTNSYDVKEVIPELVQLAKFSKQHVPEEHPKDKKDFIDMRVKRLLKAGVISALACMVKADSAILTDQTKELLARVFLALCDNPKDRGTIVAQGGGKALIPLALEGTDVGKVKAAHALAKIAAVSNPDIAFPGERVYEVVRPLVRLLDTQRDGLQNYEALLGLTNLSGRSDKLRQKIFKERALPDIENYMFENHDQLRQAATECMCNMVLHKEVQERFLADGNDRLKLVVLLCGEDDDKVQNAAAGALAMLTAAHKKLCLKMTQVTTQWLEILQRLCLHDQLSVQHRGLVIAYNLLAADAELAKKLVESELLEILTVVGKQEPDEKKAEVVQTARECLIKCMDYGFIKPVS

SEQ ID NO: 955 - DNA, 2834 bp, Homo sapiens
cccgcctcctggtaggagggggtttccgcttccggcagcagcggctgcagcctcgctctggtccctgcggctggcggccgagccgtgtgtctcctcctccatcgccgccatattgtctgtgtgagcagaggggagagcggccgccgccgctgccgcttccaccacagctctatcaaggcttgtcaagcagtgtgctcatcacatggtaaatcatgcagcgtggaacctcataaaatctccaagaaacatcattcacccatactgactagtttcacatctctttgtttgaagaaaacaggtctgaaacaaggtcttacccccagctgcttctgaacacagtgactgccagatctccaaacatcaagtccagctttgtccgccaacctgtctgacatgtcgggacccgtgccaagcagggccagagtttacacagatgttaatacacacagacctcgagaatactgggattacgagtcacatgtggtggaatggggaaatcaagatgactaccagctggttcgaaaattaggccgaggtaaatacagtgaagtatttgaagccatcaacatcacaaataatgaaaaagttgttgttaaaattctcaagccagtaaaaaagaagaaaattaagcgtgaaataaagattttggagaatttgagaggaggtcccaacatcatcacactggcagacattgtaaaagaccctgtgtcacgaacccccgccttggtttttgaacacgtaaacaacacagacttcaagcaattgtaccagacgttaacagactatgatattcgattttacatgtatgagattctgaaggccctggattattgtcacagcatgggaattatgcacagagatgtcaagccccataatgtcatgattgatcatgagcacagaaagctacgactaatagactggggtttggctgagttttatcatcctggccaagaatataatgtccgagttgcttcccgatacttcaaaggtcctgagctacttgtagactatcagatgtacgattatagtttggatatgtggagtttgggttgtatgctggcaagtatgatctttcggaaggagccatttttccatggacatgacaattatgatcagttggtgaggatagccaaggttctggggacagaagatttatatgactatattgacaaatacaacattgaattagatccacgtttcaatgatatcttgggcagacactctcgaaagcgatgggaacgctttgtccacagtgaaaatcagcaccttgtcagccctgaggccttggatttcctggacaaactgctgcgatatgaccaccagtcacggcttactgcaagagaggcaatggagcacccctatttctacactgttgtgaaggaccaggctcgaatgggttcatctagcatgccagggggcagtacgcccgtcagcagcgccaatatgatgtcagggatttcttcagtgccaaccccttcaccccttggacctctggcaggctcaccagtgattgctgctgccaacccccttgggatgcctgttccagctgccgctggcgctcagcagtaacggccctatctgtctcctgatgcctgagcagaggtgggggagtccaccctctccttgatgcagcttgcgcctggcggggaggggtgaaacacttcagaagcaccgtgtctgaaccgttgcttgtggatttatagtagttcagtcataaaaaaaaaattataataggctgattttcttttttctttttttttttaactcgaacttttcataactcaggggattccctgaaaaattacctgcaggtggaatatttcatggacaaatttttttttctcccctcccaaatttagttcctcatcacaaaagaacaaagataaaccagcctcaatcccggctgctgcatttaggtggagacttcttcccattcccaccattgttcctccaccgtcccacactttagggggttggtatctcgtgctcttctccagagattacaaaaatgtagcttctcaggggaggcaggaagaaaggaaggaaggaaagaaggaagggaggacccaatctataggagcagtggactgcttgctggtcgcttacatcactttactccataagcgcttcagtggggttatcctagtggctcttgtggaagtgtgtcttagttacatcaagatgttgaaaatctacccaaaatgcagacagatactaaaaacttctgttcagtaagaatcatgtcttactgatctaaccctaaatccaactcatttatacttttatttttagttcagtttaaaatgttgataccttccctcccaggctccttaccttggtcttttccctgttcatctcccaacatgctgtgctccatagctggtaggagagggaaggcaaaatctttcttagttttctttgtcttggccattttgaattcatttagttactgggcataacttactgctttttacaaaagaaacaaacattgtctgtacaggtttcatgctagagctaatgggagatgtggccacactgacttccattttaagctttctaccttcttttcctccgaccgtccccttccctcacatgccatccagtgagaagacctgctcctcagtcttgtaaatgtatcttgagaggtaggagcagagccactatctccattgaagctgaaatggtagacctgtaattgtgggaaaactataaactctcttgttacagccccgccaccccttgctgtgtgtatatatataatactttgtccttcatatgtgaaagatccagtgttggaattctttggtgtaaataaacgtttggttttatttatc

SEQ ID NO: 956 - protein, 391 aa, Homo sapiens
MSGPVPSRARVYTDVNTHRPREYWDYESHVVEWGNQDDYQLVRKLGRGKYSEVFEAINITNNEKVVVKILKPVKKKKIKREIKILENLRGGPNIITLADIVKDPVSRTPALVFEHVNNTDFKQLYQTLTDYDIRFYMYEILKALDYCHSMGIMHRDVKPHNVMIDHEHRKLRLIDWGLAEFYHPGQEYNVRVASRYFKGPELLVDYQMYDYSLDMWSLGCMLASMIFRKEPFFHGHDNYDQLVRIAKVLGTEDLYDYIDKYNIELDPRFNDILGRHSRKRWERFVHSENQHLVSPEALDFLDKLLRYDHQSRLTAREAMEHPYFYTVVKDQARMGSSSMPGGSTPVSSANMMSGISSVPTPSPLGPLAGSPVIAAANPLGMPVPAAAGAQQ

SEQ ID NO: 957 - DNA, 2717 bp, Homo sapiens
cccgcctcctggtaggagggggtttccgcttccggcagcagcggctgcagcctcgctctggtccctgcggctggcggccgagccgtgtgtctcctcctccatcgccgccatattgtctgtgtgagcagaggggagagcggccgccgccgctgccgcttccaccacagtttgaagaaaacaggtctgaaacaaggtcttacccccagctgcttctgaacacagtgactgccagatctccaaacatcaagtccagctttgtccgccaacctgtctgacatgtcgggacccgtgccaagcagggccagagtttacacagatgttaatacacacagacctcgagaatactgggattacgagtcacatgtggtggaatggggaaatcaagatgactaccagctggttcgaaaattaggccgaggtaaatacagtgaagtatttgaagccatcaacatcacaaataatgaaaaagttgttgttaaaattctcaagccagtaaaaaagaagaaaattaagcgtgaaataaagattttggagaatttgagaggaggtcccaacatcatcacactggcagacattgtaaaagaccctgtgtcacgaacccccgccttggtttttgaacacgtaaacaacacagacttcaagcaattgtaccagacgttaacagactatgatattcgattttacatgtatgagattctgaaggccctggattattgtcacagcatgggaattatgcacagagatgtcaagccccataatgtcatgattgatcatgagcacagaaagctacgactaatagactggggtttggctgagttttatcatcctggccaagaatataatgtccgagttgcttcccgatacttcaaaggtcctgagctacttgtagactatcagatgtacgattatagtttggatatgtggagtttgggttgtatgctggcaagtatgatctttcggaaggagccatttttccatggacatgacaattatgatcagttggtgaggatagccaaggttctggggacagaagatttatatgactatattgacaaatacaacattgaattagatccacgtttcaatgatatcttgggcagacactctcgaaagcgatgggaacgctttgtccacagtgaaaatcagcaccttgtcagccctgaggccttggatttcctggacaaactgctgcgatatgaccaccagtcacggcttactgcaagagaggcaatggagcacccctatttctacactgttgtgaaggaccaggctcgaatgggttcatctagcatgccagggggcagtacgcccgtcagcagcgccaatatgatgtcagggatttcttcagtgccaaccccttcaccccttggacctctggcaggctcaccagtgattgctgctgccaacccccttgggatgcctgttccagctgccgctggcgctcagcagtaacggccctatctgtctcctgatgcctgagcagaggtgggggagtccaccctctccttgatgcagcttgcgcctggcggggaggggtgaaacacttcagaagcaccgtgtctgaaccgttgcttgtggatttatagtagttcagtcataaaaaaaaaattataataggctgattttcttttttctttttttttttaactcgaacttttcataactcaggggattccctgaaaaattacctgcaggtggaatatttcatggacaaatttttttttctcccctcccaaatttagttcctcatcacaaaagaacaaagataaaccagcctcaatcccggctgctgcatttaggtggagacttcttcccattcccaccattgttcctccaccgtcccacactttagggggttggtatctcgtgctcttctccagagattacaaaaatgtagcttctcaggggaggcaggaagaaaggaaggaaggaaagaaggaagggaggacccaatctataggagcagtggactgcttgctggtcgcttacatcactttactccataagcgcttcagtggggttatcctagtggctcttgtggaagtgtgtcttagttacatcaagatgttgaaaatctacccaaaatgcagacagatactaaaaacttctgttcagtaagaatcatgtcttactgatctaaccctaaatccaactcatttatacttttatttttagttcagtttaaaatgttgataccttccctcccaggctccttaccttggtcttttccctgttcatctcccaacatgctgtgctccatagctggtaggagagggaaggcaaaatctttcttagttttctttgtcttggccattttgaattcatttagttactgggcataacttactgctttttacaaaagaaacaaacattgtctgtacaggtttcatgctagagctaatgggagatgtggccacactgacttccattttaagctttctaccttcttttcctccgaccgtccccttccctcacatgccatccagtgagaagacctgctcctcagtcttgtaaatgtatcttgagaggtaggagcagagccactatctccattgaagctgaaatggtagacctgtaattgtgggaaaactataaactctcttgttacagccccgccaccccttgctgtgtgtatatatataatactttgtccttcatatgtgaaagatccagtgttggaattctttggtgtaaataaacgtttggttttatttatc

SEQ ID NO: 958 - protein, 391 aa, Homo sapiens; identical to SEQ ID NO: 956

SEQ ID NO: 959 - DNA, 2717 bp, Homo sapiens; identical to SEQ ID NO: 957

SEQ ID NO: 960 - protein, 255 aa, Homo sapiens
MYEILKALDYCHSMGIMHRDVKPHNVMIDHEHRKLRLIDWGLAEFYHPGQEYNVRVASRYFKGPELLVDYQMYDYSLDMWSLGCMLASMIFRKEPFFHGHDNYDQLVRIAKVLGTEDLYDYIDKYNIELDPRFNDILGRHSRKRWERFVHSENQHLVSPEALDFLDKLLRYDHQSRLTAREAMEHPYFYTVVKDQARMGSSSMPGGSTPVSSANMMSGISSVPTPSPLGPLAGSPVIAAANPLGMPVPAAAGAQQ

SEQ ID NO: 961 - DNA, 2507 bp, Homo sapiens
cccgcctcctggtaggagggggtttccgcttccggcagcagcggctgcagcctcgctctggtccctgcggctggcggccgagccgtgtgtctcctcctccatcgccgccatattgtctgtgtgagcagaggggagagcggccgccgccgctgccgcttccaccacagaaatcaagatgactaccagctggttcgaaaattaggccgaggtaaatacagtgaagtatttgaagccatcaacatcacaaataatgaaaaagttgttgttaaaattctcaagccagtaaaaaagaagaaaattaagcgtgaaataaagattttggagaatttgagaggaggtcccaacatcatcacactggcagacattgtaaaagaccctgtgtcacgaacccccgccttggtttttgaacacgtaaacaacacagacttcaagcaattgtaccagacgttaacagactatgatattcgattttacatgtatgagattctgaaggccctggattattgtcacagcatgggaattatgcacagagatgtcaagccccataatgtcatgattgatcatgagcacagaaagctacgactaatagactggggtttggctgagttttatcatcctggccaagaatataatgtccgagttgcttcccgatacttcaaaggtcctgagctacttgtagactatcagatgtacgattatagtttggatatgtggagtttgggttgtatgctggcaagtatgatctttcggaaggagccatttttccatggacatgacaattatgatcagttggtgaggatagccaaggttctggggacagaagatttatatgactatattgacaaatacaacattgaattagatccacgtttcaatgatatcttgggcagacactctcgaaagcgatgggaacgctttgtccacagtgaaaatcagcaccttgtcagccctgaggccttggatttcctggacaaactgctgcgatatgaccaccagtcacggcttactgcaagagaggcaatggagcacccctatttctacactgttgtgaaggaccaggctcgaatgggttcatctagcatgccagggggcagtacgcccgtcagcagcgccaatatgatgtcagggatttcttcagtgccaaccccttcaccccttggacctctggcaggctcaccagtgattgctgctgccaacccccttgggatgcctgttccagctgccgctggcgctcagcagtaacggccctatctgtctcctgatgcctgagcagaggtgggggagtccaccctctccttgatgcagcttgcgcctggcggggaggggtgaaacacttcagaagcaccgtgtctgaaccgttgcttgtggatttatagtagttcagtcataaaaaaaaaattataataggctgattttcttttttctttttttttttaactcgaacttttcataactcaggggattccctgaaaaattacctgcaggtggaatatttcatggacaaatttttttttctcccctcccaaatttagttcctcatcacaaaagaacaaagataaaccagcctcaatcccggctgctgcatttaggtggagacttcttcccattcccaccattgttcctccaccgtcccacactttagggggttggtatctcgtgctcttctccagagattacaaaaatgtagcttctcaggggaggcaggaagaaaggaaggaaggaaagaaggaagggaggacccaatctataggagcagtggactgcttgctggtcgcttacatcactttactccataagcgcttcagtggggttatcctagtggctcttgtggaagtgtgtcttagttacatcaagatgttgaaaatctacccaaaatgcagacagatactaaaaacttctgttcagtaagaatcatgtcttactgatctaaccctaaatccaactcatttatacttttatttttagttcagtttaaaatgttgataccttccctcccaggctccttaccttggtcttttccctgttcatctcccaacatgctgtgctccatagctggtaggagagggaaggcaaaatctttcttagttttctttgtcttggccattttgaattcatttagttactgggcataacttactgctttttacaaaagaaacaaacattgtctgtacaggtttcatgctagagctaatgggagatgtggccacactgacttccattttaagctttctaccttcttttcctccgaccgtccccttccctcacatgccatccagtgagaagacctgctcctcagtcttgtaaatgtatcttgagaggtaggagcagagccactatctccattgaagctgaaatggtagacctgtaattgtgggaaaactataaactctcttgttacagccccgccaccccttgctgtgtgtatatatataatactttgtccttcatatgtgaaagatccagtgttggaattctttggtgtaaataaacgtttggttttatttatc

SEQ ID NO: 962 - protein, 255 aa, Homo sapiens; identical to SEQ ID NO: 960

SEQ ID NO: 963 - DNA, 3931 bp, Homo sapiens
ccccgtgcgcctcttgcccgcagaccctgaggacacggccatgccgggccgggcggaggcgggggaggccgaggaggaggccggggccggctcggggtctgaggcggaggaggacgcgctgtgggagcgaatcgagggcgtccggcatcggctggctcgcgccctgaacccggccaagctcacgccgtatctgcgccagtgccgggtcatcgacgagcaggacgaggaggaggtgctgagcacctaccgcttcccgtgccgcgtcaaccgcaccgggcgcctgatggacatcttgcgctgccgtggcaagaggggctatgaggccttcctggaagccctggagttctactaccccgaacacttcacgctgctcacgggccaggaacccgcccagcgctgctccatgatcctcgatgaggaggggcctgagggcctgacccaattcttgatgacagaggtgcgacggctgcgggaagctcgcaagagccagctgcagcgggagcagcaactgcaggcccggggccgggtgctcgaggaggagcgggcagggctggagcagcggctgcgggaccagcagcaggctcaggagcgctgtcaacggctgcgggaggactgggaggcgggcagcctggagctgctgcggctcaaggatgagaactacatgatcgccatgcgcctggcacagctcagtgaggagaagaactcggctgtacttcgcagccgtgacctgcagctggcggtggatcagctcaagctcaaagtgagtcggctggaggaagagtgtgcactgcttcgaagggccaggggcccgccccctggggcagaggagaaggagaaggagaaggagaaggagaaggagccagacaatgtggaccttgtctctgagctgcgtgctgagaaccagcggctgacggcgtcactgcgggagttgcaggagggcctgcagcaggaggcgagccggccgggggccccgggctccgagcgcatcctgctggacatcctagagcatgactggcgggaggcgcaggacagcaggcaggagctgtgccagaagctgcatgccgtgcagggggagctgcagtgggccgaggagctgcgcgaccagtacctgcaggagatggaagacctgcggctcaagcaccgcacgctgcagaaggactgtgacctgtacaagcaccgcatggccactgtcctggcccaactggaggagattgagaaggagcgagaccaggccatccagagccgtgaccggatccagttgcagtactcacagagcctcatcgagaaggaccagtaccgcaagcaggtgcggggcctggaggcggagcgggatgagctgctgacaacgctcaccagcctggagggcaccaaggctctgctggaggttcagctgcagcgggcccagggtggcacctgcctcaaggcctgtgcctcctcccattccctgtgctccaacctcagcagcacttggagcctgagcgagttcccctcccctctgggaggcccagaagcaactggggaggcagctgtcatggggggacctgagcctcacaactcggaggaagccacagacagtgaaaaggagatcaatcggctctccatcctgcccttcccccccagtgccggctccatcctccgccggcagcgtgaggaagaccccgcaccccctaagagatccttcagcagcatgtcagacatcacagggagtgtgacacttaagccctggtcccctggcctctcttcgtcctcatcctctgacagcgtgtggcctttgggaaagccggaaggcctcctggctcggggctgtggcctggacttcctcaacaggtctctggctattcgggtgtctggccggagccccccagggggcccagagccgcaggacaagggaccagatggactgtcgttttatggggacagatggtctggggctgtggtgcgcagggtgctgtctgggcctgggtccgccaggatggaaccaagagagcaaagggtggaagctgctggtctggagggggcgtgcctggaagccgaggcccagcagagaaccttgctctggaatcaggggtccacactcccctccctgatggactcgaaggcctgccagtccttccacgaggccctagaagcctgggcaaagggaccaggtgccgagcccttctacattcgtgccaacctcaccttgcctgagagggcagatccccatgccctttgcgtgaaagcccaagagatccttcgactggtggactcggcatacaagcggaggcaggaatggttctgcacccgggttgaccccctcactctgcgggacctggaccggggcaccgtgcccaattatcagagagcccagcagctcctagaagttcaggagaaatgcctgccctccagccggcaccgaggcccccgcagtaatctgaagaagagagccctggaccagctgcggctggtgaggcccaagcccgtgggggcgcctgcaggggactccccggatcagctgctgctggagccctgtgcagagccggagcggagcctcagaccctacagtttggtgcggccgctactggtgtctgccctgcggcccgtggtgctgttgcctgagtgcctggcgccccggctcatccgtaacctgctagacctgcccagctcccggctggacttccaagtgtgcccagcggaaagcctctctggggaggaactgtgcccatcctcagcgcctggagcccccaaggctcagcctgccacccctgggctaggcagcaggatccgggccatccaggagtctgttgggaagaagcactgcctgctggagctgggtgctcggggtgtgcgggagctggtgcagaacgagatctaccccatcgtcatccacgtggaggtgactgagaagaatgtccgggaagtcaggggtctgctgggccggccgggctggcgggactcagagctgctgcggcagtgccgtggctcagagcaggtgctctgggggctgccctgctcctgggtgcaggtgcccgcccatgagtggggacacgcagaggagctggccaaggtggtgcgcggccgcatcctgcaggagcaggcccgcctcgtgtgggtggagtgcggcagcagcagaggctgccccagcagcagtgaggcctgaggctcatctgatacctgcaccttctccccaagccagcgtggaccctggtgtctatggtgaagctgggccctcccaccctgagccttcctagacccttggactctcagatgcagggcccttggctctggcctctcacccccaaggctgtctctggccctgccgagcctatgggagtcccgggacagagtgcccactcccctctacttgctgctctgggcctccccacctttcctggggtctccacattcccactagtgggtcttatgtgtgtctgtgtcttctccttaaacactcgccctggagtctgttctcacacctgtgcgcaggtttgcacactcaagttctcatgggcaggctcaggtctgtcccgctgccctgggcacgaggtctcctgaggacctgggcctgttctgctcctaggagacctgagcccgttaccgcgtgactcccaccatccagctcgcgctcctcgtggattcagccatgcatggactggggtgttccctggcccatggtcacctgtgcccctcgtgtctcctcacatgggtgtctgtggttctctcctgtgtaaatgtcacgccccacccctgtttcatgtgggcactaacacgtgtgcgttcctggcgggcacactcaggaccgtgcctcacagggcccactccctgcctatgcctccctcttggggggccgaggagggcggctgctctgtcatgagaatgtacggcccgtggatgattaacgggcctttttcacttagaagctgcacattatggagcattaaacacttttgtc

SEQ ID NO: 964 - protein, 1032 aa, Homo sapiens
MPGRAEAGEAEEEAGAGSGSEAEEDALWERIEGVRHRLARALNPAKLTPYLRQCRVIDEQDEEEVLSTYRFPCRVNRTGRLMDILRCRGKRGYEAFLEALEFYYPEHFTLLTGQEPAQRCSMILDEEGPEGLTQFLMTEVRRLREARKSQLQREQQLQARGRVLEEERAGLEQRLRDQQQAQERCQRLREDWEAGSLELLRLKDENYMIAMRLAQLSEEKNSAVLRSRDLQLAVDQLKLKVSRLEEECALLRRARGPPPGAEEKEKEKEKEKEPDNVDLVSELRAENQRLTASLRELQEGLQQEASRPGAPGSERILLDILEHDWREAQDSRQELCQKLHAVQGELQWAEELRDQYLQEMEDLRLKHRTLQKDCDLYKHRMATVLAQLEEIEKERDQAIQSRDRIQLQYSQSLIEKDQYRKQVRGLEAERDELLTTLTSLEGTKALLEVQLQRAQGGTCLKACASSHSLCSNLSSTWSLSEFPSPLGGPEATGEAAVMGGPEPHNSEEATDSEKEINRLSILPFPPSAGSILRRQREEDPAPPKRSFSSMSDITGSVTLKPWSPGLSSSSSSDSVWPLGKPEGLLARGCGLDFLNRSLAIRVSGRSPPGGPEPQDKGPDGLSFYGDRWSGAVVRRVLSGPGSARMEPREQRVEAAGLEGACLEAEAQQRTLLWNQGSTLPSLMDSKACQSFHEALEAWAKGPGAEPFYIRANLTLPERADPHALCVKAQEILRLVDSAYKRRQEWFCTRVDPLTLRDLDRGTVPNYQRAQQLLEVQEKCLPSSRHRGPRSNLKKRALDQLRLVRPKPVGAPAGDSPDQLLLEPCAEPERSLRPYSLVRPLLVSALRPVVLLPECLAPRLIRNLLDLPSSRLDFQVCPAESLSGEELCPSSAPGAPKAQPATPGLGSRIRAIQESVGKKHCLLELGARGVRELVQNEIYPIVIHVEVTEKNVREVRGLLGRPGWRDSELLRQCRGSEQVLWGLPCSWVQVPAHEWGHAEELAKVVRGRILQEQARLVWVECGSSRGCPSSSEA

SEQ ID NO: 965 - DNA, 1896 bp, Homo sapiens
gtcctgccgagctgtgagggcaacggaggggaaataaaagggaacggctccgaatctgccccagcggccgctgcgagacctcggcgccgacatcgcgacagcgaagcgctttgcacgccaggaaggtcccctctatgtgctgctgagccggtcctggacgcgacgagcccgccctcggtcttcggagcagaaatcgcaaaaacggaaggactggaaatggcagaccatatgatggccatgaaccacgggcgcttccccgacggcaccaatgggctgcaccatcaccctgcccaccgcatgggcatggggcagttcccgagcccccatcaccaccagcagcagcagccccagcacgccttcaacgccctaatgggcgagcacatacactacggcgcgggcaacatgaatgccacgagcggcatcaggcatgcgatggggccggggactgtgaacggagggcaccccccgagcgcgctggcccccgcggccaggtttaacaactcccagttcatgggtcccccggtggccagccagggaggctccctgccggccagcatgcagctgcagaagctcaacaaccagtatttcaaccatcacccctacccccacaaccactacatgccggatttgcaccctgctgcaggccaccagatgaacgggacaaaccagcacttccgagattgcaaccccaagcacagcggcggcagcagcacccccggcggctcgggcggcagcagcacccccggcggctctggcagcagctcgggcggcggcgcgggcagcagcaacagcggcggcggcagcggcagcggcaacatgcccgcctccgtggcccacgtccccgctgcaatgctgccgcccaatgtcatagacactgatttcatcgacgaggaagttcttatgtccttggtgatagaaatgggtttggaccgcatcaaggagctgcccgaactctggctggggcaaaacgagtttgattttatgacggacttcgtgtgcaaacagcagcccagcagagtgagctgttgactcgatcgaaaccccggcgaaagaaatcaaacccccaacttcttcggcgtgaattaaaagaaacattcccttagacacagtatctcacttttcagatcttgaaaggtttgagaacttggaaacaaagtaaactataaacttgtacaaattggttttaaaaaaaattgctgccacttttttttcctgtttttgtttcgtttttgtagccttgacattcacccacctcccttatgtagttgaaatatctagctaacttggtctttttcgttgtttgtttttactcctttccctcactttctccagtgctcaactgttagatattaatcttggcaaactgcttaatcttgtggattttgtagatggtttcaaatgactgaactgcattcagatttacgagtgaaaggaaaaattgcattagttggttgcatgaacttcgaagggcagatattactgcacaaactgccatctcgcttcatttttttaactatgcatttgagtacagactaatttttaaaatatgctaaactggaagattaaacagatgtgggccaaactgttctggatcaggaaagtcatactgttcactttcaagttggctgtcccccccgccgccccccccacccccatatgtacagatgataatagggtgtggaatgtcgtcagtggcaaacatttcacagatttttattttgtttctgtcttcaacatttttgacactgtgctaatagttatattcagtacatgaaaagatactactgtgttgaaagctttttaggaaattttgacagtatttttgtacaaaacatttttttgaaaaaatacttgttaatttattctattttaatttgccaatgtcaataaaaagtt

SEQ ID NO: 966 - protein, 270 aa, Homo sapiens
MADHMMAMNHGRFPDGTNGLHHHPAHRMGMGQFPSPHHHQQQQPQHAFNALMGEHIHYGAGNMNATSGIRHAMGPGTVNGGHPPSALAPAARFNNSQFMGPPVASQGGSLPASMQLQKLNNQYFNHHPYPHNHYMPDLHPAAGHQMNGTNQHFRDCNPKHSGGSSTPGGSGGSSTPGGSGSSSGGGAGSSNSGGGSGSGNMPASVAHVPAAMLPPNVIDTDFIDEEVLMSLVIEMGLDRIKELPELWLGQNEFDFMTDFVCKQQPSRVSC

SEQ ID NO: 967 - DNA, 1837 bp, Homo sapiens
gagccgcgcacgggactgggaaggggacccacccgagggtccagccaccagccccctcactaatagcggccaccccggcagcggcggcagcagcagcagcgacgcagcggcgacagctcagagcagggaggccgcgccacctgcgggccggccggagcgggcagccccaggccccctccccgggcacccgcgttcatgcaacgcctggtggcctgggacccagcatgtctccccctgccgccgccgccgcctgcctttaaatccatggaagtggccaacttctactacgaggcggactgcttggctgctgcgtacggcggcaaggcggcccccgcggcgccccccgcggccagacccgggccgcgcccccccgccggcgagctgggcagcatcggcgaccacgagcgcgccatcgacttcagcccgtacctggagccgctgggcgcgccgcaggccccggcgcccgccacggccacggacaccttcgaggcggctccgcccgcgcccgcccccgcgcccgcctcctccgggcagcaccacgacttcctctccgacctcttctccgacgactacgggggcaagaactgcaagaagccggccgagtacggctacgtgagcctggggcgcctgggggccgccaagggcgcgctgcaccccggctgcttcgcgcccctgcacccaccgcccccgccgccgccgccgcccgccgagctcaaggcggagccgggcttcgagcccgcggactgcaagcggaaggaggaggccggggcgccgggcggcggcgcaggcatggcggcgggcttcccgtacgcgctgcgcgcttacctcggctaccaggcggtgccgagcggcagcagcgggagcctctccacgtcctcctcgtccagcccgcccggcacgccgagccccgctgacgccaaggcgcccccgaccgcctgctacgcgggggccgcgccggcgccctcgcaggtcaagagcaaggccaagaagaccgtggacaagcacagcgacgagtacaagatccggcgcgagcgcaacaacatcgccgtgcgcaagagccgcgacaaggccaagatgcgcaacctggagacgcagcacaaggtcctggagctcacggccgagaacgagcggctgcagaagaaggtggagcagctgtcgcgcgagctcagcaccctgcggaacttgttcaagcagctgcccgagcccctgctcgcctcctccggccactgctagcgcggcccccgcgcgcgtccccctgccggccggggctgagactccggggagcgcccgcgcccgcgccctcgcccccgcccccggcggcgccggcaaaactttggcactggggcacttggcagcgcggggagcccgtcggtaattttaatattttattatatatatatatctatatttttgtccaaaccaaccgcacatgcagatggggctcccgcccgtggtgttatttaaagaagaaacgtctatgtgtacagatgaatgataaactctctgcttctccctctgcccctctccaggcgccggcgggcgggccggtttcgaagttgatgcaatcggtttaaacatggctgaacgcgtgtgtacacgggactgacgcaacccacgtgtaactgtcagccgggccctgagtaatcgcttaaagatgttcctacgggcttgttgctgttgatgttttgttttgttttgttttttggtctttttttgtattataaaaaataatctatttctatgagaaaagaggcgtctgtatattttgggaatcttttccgtttcaagcattaagaacacttttaataaacttttttttgagaatggttacaaagcc

SEQ ID NO: 968 - protein, 345 aa, Homo sapiens
MQRLVAWDPACLPLPPPPPAFKSMEVANFYYEADCLAAAYGGKAAPAAPPAARPGPRPPAGELGSIGDHERAIDFSPYLEPLGAPQAPAPATATDTFEAAPPAPAPAPASSGQHHDFLSDLFSDDYGGKNCKKPAEYGYVSLGRLGAAKGALHPGCFAPLHPPPPPPPPPAELKAEPGFEPADCKRKEEAGAPGGGAGMAAGFPYALRAYLGYQAVPSGSSGSLSTSSSSSPPGTPSPADAKAPPTACYAGAAPAPSQVKSKAKKTVDKHSDEYKIRRERNNIAVRKSRDKAKMRNLETQHKVLELTAENERLQKKVEQLSRELSTLRNLFKQLPEPLLASSGHC

SEQ ID NO: 969 - DNA, 5882 bp, Homo sapiens
ctaaactcgaattaagagggaaaaaaaatcagggaggaggtggcaagccacaccccacggtgcccgcgaacttccccggcagcggactgtagcccaggcagacgccgtcgagatgcagggcccaccgctcctgaccgccgcccacctcctctgcgtgtgcaccgccgcgctggccgtggctcccgggcctcggtttctggtgacagccccagggatcatcaggcccggaggaaatgtgactattggggtggagcttctggaacactgcccttcacaggtgactgtgaaggcggagctgctcaagacagcatcaaacctcactgtctctgtcctggaagcagaaggagtctttgaaaaaggctcttttaagacacttactcttccatcactacctctgaacagtgcagatgagatttatgagctacgtgtaaccggacgtacccaggatgagattttattctctaatagtacccgcttatcatttgagaccaagagaatatctgtcttcattcaaacagacaaggccttatacaagccaaagcaagaagtgaagtttcgcattgttacactcttctcagattttaagccttacaaaacctctttaaacattctcattaaggaccccaaatcaaatttgatccaacagtggttgtcacaacaaagtgatcttggagtcatttccaaaacttttcagctatcttcccatccaatacttggtgactggtctattcaagttcaagtgaatgaccagacatactatcaatcatttcaggtttcagaatatgtattaccaaaatttgaagtgactttgcagacaccattatattgttctatgaattctaagcatttaaatggtaccatcacggcaaagtatacatatgggaagccagtgaaaggagacgtaacgcttacatttttacctttatccttttggggaaagaagaaaaatattacaaaaacatttaagataaatggatctgcaaacttctcttttaatgatgaagagatgaaaaatgtaatggattcttcaaatggactttctgaatacctggatctatcttcccctggaccagtagaaattttaaccacagtgacagaatcagttacaggtatttcaagaaatgtaagcactaatgtgttcttcaagcaacatgattacatcattgagttttttgattatactactgtcttgaagccatctctcaacttcacagccactgtgaaggtaactcgtgctgatggcaaccaactgactcttgaagaaagaagaaataatgtagtcataacagtgacacagagaaactatactgagtactggagcggatctaacagtggaaatcagaaaatggaagctgttcagaaaataaattatactgtcccccaaagtggaacttttaagattgaattcccaatcctggaggattccagtgagctacagttgaaggcctatttccttggtagtaaaagtagcatggcagttcatagtctgtttaagtctcctagtaagacatacatccaactaaaaacaagagatgaaaatataaaggtgggatcgccttttgagttggtggttagtggcaacaaacgattgaaggagttaagctatatggtagtatccaggggacagttggtggctgtaggaaaacaaaattcaacaatgttctctttaacaccagaaaattcttggactccaaaagcctgtgtaattgtgtattatattgaagatgatggggaaattataagtgatgttctaaaaattcctgttcagcttgtttttaaaaataagataaagctatattggagtaaagtgaaagctgaaccatctgagaaagtctctcttaggatctctgtgacacagcctgactccatagttgggattgtagctgttgacaaaagtgtgaatctgatgaatgcctctaatgatattacaatggaaaatgtggtccatgagttggaactttataacacaggatattatttaggcatgttcatgaattcttttgcagtctttcaggaatgtggactctgggtattgacagatgcaaacctcacgaaggattatattgatggtgtttatgacaatgcagaatatgctgagaggtttatggaggaaaatgaaggacatattgtagatattcatgacttttctttgggtagcagtccacatgtccgaaagcattttccagagacttggatttggctagacaccaacatgggttacaggatttaccaagaatttgaagtaactgtacctgattctatcacttcttgggtggctactggttttgtgatctctgaggacctgggtcttggactaacaactactccagtggagctccaagccttccaaccatttttcatttttttgaatcttccctactctgttatcagaggtgaagaatttgctttggaaataactatattcaattatttgaaagatgccactgaggttaaggtaatcattgagaaaagtgacaaatttgatattctaatgacttcaaatgaaataaatgccacaggccaccagcagacccttctggttcccagtgaggatggggcaactgttctttttcccatcaggccaacacatctgggagaaattcctatcacagtcacagctctttcacccactgcttctgatgctgtcacccagatgattttagtaaaggctgaaggaatagaaaaatcatattcacaatccatcttattagacttgactgacaataggctacagagtaccctgaaaactttgagtttctcatttcctcctaatacagtgactggcagtgaaagagttcagatcactgcaattggagatgttcttggtccttccatcaatggcttagcctcattgattcggatgccttatggctgtggtgaacagaacatgataaattttgctccaaatatttacattttggattatctgactaaaaagaaacaactgacagataatttgaaagaaaaagctctttcatttatgaggcaaggttaccagagagaacttctctatcagagggaagatggctctttcagtgcttttgggaattatgacccttctgggagcacttggttgtcagcttttgttttaagatgtttccttgaagccgatccttacatagatattgatcagaatgtgttacacagaacatacacttggcttaaaggacatcagaaatccaacggtgaattttgggatccaggaagagtgattcatagtgagcttcaaggtggcaataaaagtccagtaacacttacagcctatattgtaacttctctcctgggatatagaaagtatcagcctaacattgatgtgcaagagtctatccattttttggagtctgaattcagtagaggaatttcagacaattatactctagcccttataacttatgcattgtcatcagtggggagtcctaaagcgaaggaagctttgaatatgctgacttggagagcagaacaagaaggtggcatgcaattctgggtgtcatcagagtccaaactttctgactcctggcagccacgctccctggatattgaagttgcagcctatgcactgctctcacacttcttacaatttcagacttctgagggaatcccaattatgaggtggctaagcaggcaaagaaatagcttgggtggttttgcatctactcaggataccactgtggctttaaaggctctgtctgaatttgcagccctaatgaatacagaaaggacaaatatccaagtgaccgtgacggggcctagctcaccaagtcctgtaaagtttctgattgacacacacaaccgcttactccttcagacagcagagcttgctgtggtacagccaacggcagttaatatttccgcaaatggttttggatttgctatttgtcagctcaatgttgtatataatgtgaaggcttctgggtcttctagaagacgaagatctatccaaaatcaagaagcctttgatttagatgttgctgtaaaagaaaataaagatgatctcaatcatgtggatttgaatgtgtgtacaagcttttcgggcccgggtaggagtggcatggctcttatggaagttaacctattaagtggctttatggtgccttcagaagcaatttctctgagcgagacagtgaagaaagtggaatatgatcatggaaaactcaacctctatttagattctgtaaatgaaacccagttttgtgttaatattcctgctgtgagaaactttaaagtttcaaatacccaagatgcttcagtgtccatagtggattactatgagccaaggagacaggcggtgagaagttacaactctgaagtgaagctgtcctcctgtgacctttgcagtgatgtccagggctgccgtccttgtgaggatggagcttcaggctcccatcatcactcttcagtcatttttattttctgtttcaagcttctgtactttatggaactttggctgtgatttatttttaaaggactctgtgtaacactaacatttccagtagtcacatgtgattgttttgttttcgtagaagaatactgcttctattttgaaaaaagagttttttttctttctatggggttgcagggatggtgtacaacaggtcctagcatgtatagctgcatagatttcttcacctgatctttgtgtggaagatcagaatgaatgcagttgtgtgtctatattttcccctctcaaaatcttttagaatttttttggaggtgtttgttttctccagaataaaggtattactttagaataggtattctcctcattttgtgaaagaaatgaacctagattcttaagcattattacacatccatgtttgcttaaagatggatttccctgggaatgggagaaaacagccagcaggaggagcttcatctgttcccttcccacctccaacctagccctactgcccaccccaccccaacccaccccatgcccagtggtctcagtagatacttcttaactggaaattctttcttttcagaatctaggtggtgaattttttttaagtggcacggtctttttctgcttgaaatctgatcacaccccccagccattgccctccctctctttttcctctgtagagaaatgtgaggggcagtacatttactgtgcttttcacaccatctcagaggttgaggagcatactgaaaattgccctggggggtgctgggtgtgctgtctccttcccacatcctcagccccacaccagctctatttcaggggtgagagtcagagagcactgcaatatgtgcttcatgggatttcgattcgaagatcctagaccagggagacactgtgagccagggatacaacaaaatactaggtaagtcactgcagaccgacctccctgcagtttgggaaagaagctgggtttgtggagaatcagagcatcttgacatgactgctgacctaaagatccctggcattggccagggatcctgtggaacctcttctagttcaggggtgtgagcattagactgccagttgtctagtgacatctgatgcttgctgtgaacttttaagatccccgaatcctgagcacctcaatctttaattgccctgtattccgaagggtaatataatttatctggatggaaattttaaagatgaatcccccttttttcttttcttctctcttttctttccttctccctttcttctttgccttctaaatatactgaaatgatttagatatgtgtcaacaattaatgatcttttattcaatctaagaaatggtttagtttttctctttagctctatggcatttcactcaagtggacaggggaaaaagtaattgccatgggctccaaagaatttgctttatgtttttagctatttaaaaataaatccatcaaaaataaagtatgcaaatgtatctttt

SEQ ID NO: 970 - protein, 1445 aa, Homo sapiens
MQGPPLLTAAHLLCVCTAALAVAPGPRFLVTAPGIIRPGGNVTIGVELLEHCPSQVTVKAELLKTASNLTVSVLEAEGVFEKGSFKTLTLPSLPLNSADEIYELRVTGRTQDEILFSNSTRLSFETKRISVFIQTDKALYKPKQEVKFRIVTLFSDFKPYKTSLNILIKDPKSNLIQQWLSQQSDLGVISKTFQLSSHPILGDWSIQVQVNDQTYYQSFQVSEYVLPKFEVTLQTPLYCSMNSKHLNGTITAKYTYGKPVKGDVTLTFLPLSFWGKKKNITKTFKINGSANFSFNDEEMKNVMDSSNGLSEYLDLSSPGPVEILTTVTESVTGISRNVSTNVFFKQHDYIIEFFDYTTVLKPSLNFTATVKVTRADGNQLTLEERRNNVVITVTQRNYTEYWSGSNSGNQKMEAVQKINYTVPQSGTFKIEFPILEDSSELQLKAYFLGSKSSMAVHSLFKSPSKTYIQLKTRDENIKVGSPFELVVSGNKRLKELSYMVVSRGQLVAVGKQNSTMFSLTPENSWTPKACVIVYYIEDDGEIISDVLKIPVQLVFKNKIKLYWSKVKAEPSEKVSLRISVTQPDSIVGIVAVDKSVNLMNASNDITMENVVHELELYNTGYYLGMFMNSFAVFQECGLWVLTDANLTKDYIDGVYDNAEYAERFMEENEGHIVDIHDFSLGSSPHVRKHFPETWIWLDTNMGYRIYQEFEVTVPDSITSWVATGFVISEDLGLGLTTTPVELQAFQPFFIFLNLPYSVIRGEEFALEITIFNYLKDATEVKVIIEKSDKFDILMTSNEINATGHQQTLLVPSEDGATVLFPIRPTHLGEIPITVTALSPTASDAVTQMILVKAEGIEKSYSQSILLDLTDNRLQSTLKTLSFSFPPNTVTGSERVQITAIGDVLGPSINGLASLIRMPYGCGEQNMINFAPNIYILDYLTKKKQLTDNLKEKALSFMRQGYQRELLYQREDGSFSAFGNYDPSGSTWLSAFVLRCFLEADPYIDIDQNVLHRTYTWLKGHQKSNGEFWDPGRVIHSELQGGNKSPVTLTAYIVTSLLGYRKYQPNIDVQESIHFLESEFSRGISDNYTLALITYALSSVGSPKAKEALNMLTWRAEQEGGMQFWVSSESKLSDSWQPRSLDIEVAAYALLSHFLQFQTSEGIPIMRWLSRQRNSLGGFASTQDTTVALKALSEFAALMNTERTNIQVTVTGPSSPSPVKFLIDTHNRLLLQTAELAVVQPTAVNISANGFGFAICQLNVVYNVKASGSSRRRRSIQNQEAFDLDVAVKENKDDLNHVDLNVCTSFSGPGRSGMALMEVNLLSGFMVPSEAISLSETVKKVEYDHGKLNLYLDSVNETQFCVNIPAVRNFKVSNTQDASVSIVDYYEPRRQAVRSYNSEVKLSSCDLCSDVQGCRPCEDGASGSHHHSSVIFIFCFKLLYFMELWL

SEQ ID NO: 971 - DNA, 7661 bp, Homo sapiens
gggccggggggcggagccttgcgggctggagcgaaagaatgcgggggctgagcgcagaagcggctcgaggctggaagaggatcttgggcgccgccagtctttagcaccagttggtgtaggagttgagacctacttcacagtagttctgtggacaatcacaatgggaatccaaggagggtctgtcctgttcgggctgctgctcgtcctggctgtcttctgccattcaggtcatagcctgcagtgctacaactgtcctaacccaactgctgactgcaaaacagccgtcaattgttcatctgattttgatgcgtgtctcattaccaaagctgggttacaagtgtataacaagtgttggaagtttgagcattgcaatttcaacgacgtcacaacccgcttgagggaaaatgagctaacgtactactgctgcaagaaggacctgtgtaactttaacgaacagcttgaaaatggtgggacatccttatcagagaaaacagttcttctgctggtgactccatttctggcagcagcctggagccttcatccctaagtcaacaccaggagagcttctcccaaactccccgttcctgcgtagtccgctttctcttgctgccacattctaaaggcttgatattttccaaatggatcctgttgggaaagaataaaattagcttgagcaacctggctaagatagaggggctctgggagactttgaagaccagtcctgtttgcagggaagccccacttgaaggaagaagtctaagagtgaagtaggtgtgacttgaactagattgcatgcttcctcctttgctcttgggaagaccagctttgcagtgacagcttgagtgggttctctgcagccctcagattatttttcctctggctccttggatgtagtcagttagcatcattagtacatctttggagggtggggcaggagtatatgagcatcctctctcacatggaacgctttcataaacttcagggatcccgtgttgccatggaggcatgccaaatgttccatatgtgggtgtcagtcagggacaacaagatccttaatgcagagctagaggacttctggcagggaagtggggaagtgttccagatagcagggcatgaaaacttagagaggtacaagtggctgaaaatcgagtttttcctctgtctttaaattttatatgggctttgttatcttccactggaaaagtgtaatagcatacatcaatggtgtgttaaagctatttccttgccttttttttattggaatggtaggatatcttggctttgccacacacagttacagagtgaacactctactacatgtgactggcagtattaagtgtgcttattttaaatgttactggtagaaaggcagttcaggtatgtgtgtatatagtatgaatgcagtggggacaccctttgtggttacagtttgagacttccaaaggtcatccttaataacaacagatctgcaggggtatgttttaccatctgcatccagcctcctgctaactcctagctgactcagcatagattgtataaaatacctttgtaacggctcttagcacactcacagatgtttgaggctttcagaagctcttctaaaaaatgatacacacctttcacaagggcaaactttttccttttccctgtgtattctagtgaatgaatctcaagattcagtagacctaatgacatttgtattttatgatcttggctgtatttaatggcataggctgacttttgcagatggaggaatttcttgattaatgttgaaaaaaaacccttgattatactctgttggacaaaccgagtgcaatgaatgatgcttttctgaaaatgaaatataacaagtgggtgaatgtggttatggccgaaaaggatatgcagtatgcttaatggtagcaactgaaagaagacatcctgagcagtgccagctttcttctgttgatgccgttccctgaacataggaaaatagaaacttgcttatcaaaacttagcattaccttggtgctctgtgttctctgttagctcagtgtctttccttacatcaataggtttttttttttttttttggcctgaggaagtactgaccatgcccacagccaccggctgagcaaagaagctcatttcatgtgagttctaaggaatgagaaacaattttgatgaatttaagcagaaaatgaatttctgggaacttttttgggggcgggggggtggggaattcagccacactccagaaagccaggagtcgacagttttggaagcctctctcaggattgagattctaggatgagattggcttactgctatcttgtgtcatgtacccactttttggccagactacactgggaagaaggtagtcctctaaagcaaaatctgagtgccactaaatggggagatggggctgttaagctgtccaaatcaacaagggtcatataaatggccttaaactttggggttgctttctgcaaaaagttgctgtgactcatgccatagacaaggttgagtgcctggacccaaaggcaatactgtaatgtaaagacatttatagtactaggcaaacagcaccccaggtactccaggccctcctggctggagagggctgtggcaatagaaaattagtgccaactgcagtgagtcagcctaggttaaatagagagtgtaagagtgctggacaggaacctccaccctcatgtcacatttcttcaatgtgacccttctggcccctctcctcctgacagcggaacaatgactgccccgataggtgaggctggaggaagaatcagtcctgtccttggcaagctcttcactatgacagtaaaggctctctgcctgctgccaaggcctgtgactttctaacctggcctcacgctgggtaagcttaaggtagaggtgcaggattagcaagcccacctggctaccaggccgacagctacatcctccaactgaccctgatcaacgaagagggattcatgtgtctgtctcagttggttccaaatgaaaccagggagcaggggagttaggaatcgaacaccagtcatgcctactggctctctgctcgagagccaataccctgtgccctccactcatctggatttacaggaactgtcatagtgttcagtattgggtggtgataagcccattggattgtccccttggggggatgagctaggggtgcaaggaacacctgatgagtagataagtggagctcatggtatttcctgaaagatgctaatctatttgccaaacttggtcttgaatgtactgggggcttcaaggtatgggtatatttttcttgtgtccttgcagttagcccccatgtcttatgtgtgtcctgaaaaaataagagcctgcccaagactttgggcctcttgacagaattaaccacttttatacatctgagttctcttggtaagttctttagcagtgttcaaagtctactagctcgcattagtttctgttgctgccaacagatctgaactaatgctaacagatccccctgagggattcttgatgggctgagcagctggctggagctagtactgactgacattcattgtgatgagggcagctttctggtacaggattctaagctctatgttttatatacattttcatctgtacttgcacctcactttacacaagaggaaactatgcaaagttagctggatcgctcaaggtcacttaggtaagttggcaagtccatgcttcccactcagctcctcaggtcagcaagtctacttctctgcctattttgtatactctctttaatatgtgcctagctttggaaagtctagaatgggtccctggtgcctttttactttgaagaaatcagtttctgcctctttttggaaaagaaaacaaagtgcaattgttttttactggaaagttacccaatagcatgaggtgaacaggacgtagttaggccttcctgtaaacagaaaatcatatcaaaacactatcttcccatctgtttctcaatgcctgctacttcttgtagatatttcatttcaggagagcagcagttaaacccgtggattttgtagttaggaacctgggttcaaaccctcttccactaattggctatgtctctggacaagtttttttttttttttttttttaaaccctttctgaactttcactttctatgtctacctcaaagaattgttgtgaggcttgagataatgcatttgtaaagggtctgccagataggaagatgctagttatggatttacaaggttgttaaggctgtaagagtctaaaacctacagtgaatcacaatgcatttacccccactgacttggacataagtgaaaactagccagaagtctctttttcaaattacttacaggttattcaatataaaatttttgtaatggataatcttatttatctaaactaaagcttcctgtttatacacactcctgttattctgggataagataaatgaccacagtaccttaatttctaggtgggtgcctgtgatggttcattgtaggtaaggacattttctctttttcagcagctgtgtaggtccagagcctctgggagaggaggggggtagcatgcacccagcaggggactgaactgggaaactcaaggttctttttactgtggggtagtgagctgcctttctgtgatcggtttccctagggatgttgctgttcccctccttgctattcgcagctacatacaacgtggccaaccccagtaggctgatcctatatatgatcagtgctggtgctgactctcaatagccccacccaagctggctataggtttacagatacattaattaggcaacctaaaatattgatgctggtgttggtgtgacataatgctatggccagaactgaaacttagagttataattcatgtattagggttctccagagggacagaattagtaggatatatgtatatatgaaagggaggttattagggagaactggctcccacagttagaaggcgaagtcgcacaataggccgtctgcaagctgggttagagagaagccagtagtggctcagcctgagttcaaaaacctcaaaactggggaagctgacagtgcagccagccttcagtctgtggccaaaggcccaagagcccctggcaaccaacccactggtgcaagtcctagattccaaaggctgaagaacctggagtctgatgtccaagagcaggaagagtggaagaaagccagaagactcagcaaacaaggtagacagtgtctaccaccatagtggccataccaaagaggctaccgattccttcctgctacctggatccctgaagttgccctggtctctgcaccttctaaacctagttcttaagagctttccattacatgagctgtctcaaagccctccaataaattctcagtgtaagcttctgttgcttgtggacagaaaattctgacagacctaccctataagtgttactgtcaggataacatgagaacgcacaacagtaagtggtcactaagtgttagctacggttattttgcccaaggtagcatggctagttgatgccggttgatggggcttaaacccagctccctcatcttccaggcctctgtactccctattccactaaactacctctcaggtttatttttttaaattcttactctgcaagtacataggaccacatttacctgggaaaacaagaataaaggctgctctgcattttttagaaacttttttgaaagggagatgggaatgcctgcacccccaagtccagaccaacacaatggttaattgagatgaataataaaggaaagactgttctgggcttcccagaatagcttggtccttaaattgtggcacaaacaacctcctgtcagagccagcctcctgccaggaagaggggtaggagactagaggccgtgtgtgcagccttgccctgaaggctagggtgacaatttggaggctgtccaaacaccctggcctctagagctggcctgtctatttgaaatgccggctctgatgctaatcggcgaccctcaggcaagttacttaaccttacatgcctcagttttctcatctggaaaatgagaaccctaggtttagggttgttagaaaagttaaatgagttaagacaagtgcctgggacacagtagcctcttgtgtgtgtttatcattatgtcctcagcaggtcgtagaagcagcttctcaggtgtgaggctggcgcgattatctggagtgggttgggttttctaggatggaccccctgctgcattttcctcattcatccaccagggcttaatggggaatcaaggaatccatgtgtaactgtataataactgtagccacactccaatgaccacctactagttgtccctggcactgcttatacatatgtccatcaaatcaatcctatgaagtagatactgtcttcattttatagatcagagacaattggggttcagagagctgatgtgattttcccagggtcacagagagtcccagattcaggcacaactcttgtattccaagacacaaccactacatgtccaaaggctgcccagagccaccgggcacggcaaattgtgacatatccctaaagaggctgagcacctggtcaggatctgatggctgacagtgtgtccagatgcagagctggagtgggggaggggaaggggggctccttgggacagagaaggctttctgtgctttctctgaagggagcagtctgaggaccaagggaacccggcaaacagcacctcaggtactccaggccctcctggctggagagggctgtggcaatggaaaattagtgccaactgcaatgagtcagcctcggttaaatagagagtgaagaatgctggacaggaacctccaccctcatgtcacatttcttcagtgtgacccttctggcccctctcctcctgacagcggaacaatgactgccccgataggtgaggctggaggaagaatcagtcctgtccttggcaagctcttcactatgacagtaaaggctctctgcctgctgccaaggcctgtgactttctaacctggcctcacgctgggtaagcttaaggtagaggtgcaggattagcaagcccacctggctaccaggccgacagctacatctttcaactgaccctgatcaacgaagagggacttgtgtctctcagttggttccaaatgaaaccagggagcaggggcgttaggaagctccaacaggatggtacttaatggggcatttgagtggagaggtaggtgacatagtgctttggagcccagggagggaaaggttctgctgaagttgaattcaagactgttctttcatcacaaacttgagtttcctggacatttgtttgcagaaacaaccgtagggttttgccttaacctcgtgggtttattattacctcatagggactttgcctcctgacagcagtttatgggtgttcattgtggcacttgagttttcttgcatacttgttagagaaaccaagtttgtcatcaacttcttatttaaccccctggctataacttcatggattatgttataattaagccatccagagtaaaatctgtttagattatcttggagtaagggggaaaaaatctgtaattttttctcctcaactagatatatacataaaaaatgattgtattgcttcatttaaaaaatataacgcaaaatctcttttccttct

SEQ ID NO: 972 - protein, 128 aa, Homo sapiens
MGIQGGSVLFGLLLVLAVFCHSGHSLQCYNCPNPTADCKTAVNCSSDFDACLITKAGLQVYNKCWKFEHCNFNDVTTRLRENELTYYCCKKDLCNFNEQLENGGTSLSEKTVLLLVTPFLAAAWSLHP

SEQ ID NO: 973 - DNA, 7616 bp, Homo sapiens
gggccggggggcggagccttgcgggctggagcgaaagaatgcgggggctgagcgcagaagcggctcgaggctggaagaggatcttgggcgccgccaggttctgtggacaatcacaatgggaatccaaggagggtctgtcctgttcgggctgctgctcgtcctggctgtcttctgccattcaggtcatagcctgcagtgctacaactgtcctaacccaactgctgactgcaaaacagccgtcaattgttcatctgattttgatgcgtgtctcattaccaaagctgggttacaagtgtataacaagtgttggaagtttgagcattgcaatttcaacgacgtcacaacccgcttgagggaaaatgagctaacgtactactgctgcaagaaggacctgtgtaactttaacgaacagcttgaaaatggtgggacatccttatcagagaaaacagttcttctgctggtgactccatttctggcagcagcctggagccttcatccctaagtcaacaccaggagagcttctcccaaactccccgttcctgcgtagtccgctttctcttgctgccacattctaaaggcttgatattttccaaatggatcctgttgggaaagaataaaattagcttgagcaacctggctaagatagaggggctctgggagactttgaagaccagtcctgtttgcagggaagccccacttgaaggaagaagtctaagagtgaagtaggtgtgacttgaactagattgcatgcttcctcctttgctcttgggaagaccagctttgcagtgacagcttgagtgggttctctgcagccctcagattatttttcctctggctccttggatgtagtcagttagcatcattagtacatctttggagggtggggcaggagtatatgagcatcctctctcacatggaacgctttcataaacttcagggatcccgtgttgccatggaggcatgccaaatgttccatatgtgggtgtcagtcagggacaacaagatccttaatgcagagctagaggacttctggcagggaagtggggaagtgttccagatagcagggcatgaaaacttagagaggtacaagtggctgaaaatcgagtttttcctctgtctttaaattttatatgggctttgttatcttccactggaaaagtgtaatagcatacatcaatggtgtgttaaagctatttccttgccttttttttattggaatggtaggatatcttggctttgccacacacagttacagagtgaacactctactacatgtgactggcagtattaagtgtgcttattttaaatgttactggtagaaaggcagttcaggtatgtgtgtatatagtatgaatgcagtggggacaccctttgtggttacagtttgagacttccaaaggtcatccttaataacaacagatctgcaggggtatgttttaccatctgcatccagcctcctgctaactcctagctgactcagcatagattgtataaaatacctttgtaacggctcttagcacactcacagatgtttgaggctttcagaagctcttctaaaaaatgatacacacctttcacaagggcaaactttttccttttccctgtgtattctagtgaatgaatctcaagattcagtagacctaatgacatttgtattttatgatcttggctgtatttaatggcataggctgacttttgcagatggaggaatttcttgattaatgttgaaaaaaaacccttgattatactctgttggacaaaccgagtgcaatgaatgatgcttttctgaaaatgaaatataacaagtgggtgaatgtggttatggccgaaaaggatatgcagtatgcttaatggtagcaactgaaagaagacatcctgagcagtgccagctttcttctgttgatgccgttccctgaacataggaaaatagaaacttgcttatcaaaacttagcattaccttggtgctctgtgttctctgttagctcagtgtctttccttacatcaataggtttttttttttttttttggcctgaggaagtactgaccatgcccacagccaccggctgagcaaagaagctcatttcatgtgagttctaaggaatgagaaacaattttgatgaatttaagcagaaaatgaatttctgggaacttttttgggggcgggggggtggggaattcagccacactccagaaagccaggagtcgacagttttggaagcctctctcaggattgagattctaggatgagattggcttactgctatcttgtgtcatgtacccactttttggccagactacactgggaagaaggtagtcctctaaagcaaaatctgagtgccactaaatggggagatggggctgttaagctgtccaaatcaacaagggtcatataaatggccttaaactttggggttgctttctgcaaaaagttgctgtgactcatgccatagacaaggttgagtgcctggacccaaaggcaatactgtaatgtaaagacatttatagtactaggcaaacagcaccccaggtactccaggccctcctggctggagagggctgtggcaatagaaaattagtgccaactgcagtgagtcagcctaggttaaatagagagtgtaagagtgctggacaggaacctccaccctcatgtcacatttcttcaatgtgacccttctggcccctctcctcctgacagcggaacaatgactgccccgataggtgaggctggaggaagaatcagtcctgtccttggcaagctcttcactatgacagtaaaggctctctgcctgctgccaaggcctgtgactttctaacctggcctcacgctgggtaagcttaaggtagaggtgcaggattagcaagcccacctggctaccaggccgacagctacatcctccaactgaccctgatcaacgaagagggattcatgtgtctgtctcagttggttccaaatgaaaccagggagcaggggagttaggaatcgaacaccagtcatgcctactggctctctgctcgagagccaataccctgtgccctccactcatctggatttacaggaactgtcatagtgttcagtattgggtggtgataagcccattggattgtccccttggggggatgagctaggggtgcaaggaacacctgatgagtagataagtggagctcatggtatttcctgaaagatgctaatctatttgccaaacttggtcttgaatgtactgggggcttcaaggtatgggtatatttttcttgtgtccttgcagttagcccccatgtcttatgtgtgtcctgaaaaaataagagcctgcccaagactttgggcctcttgacagaattaaccacttttatacatctgagttctcttggtaagttctttagcagtgttcaaagtctactagctcgcattagtttctgttgctgccaacagatctgaactaatgctaacagatccccctgagggattcttgatgggctgagcagctggctggagctagtactgactgacattcattgtgatgagggcagctttctggtacaggattctaagctctatgttttatatacattttcatctgtacttgcacctcactttacacaagaggaaactatgcaaagttagctggatcgctcaaggtcacttaggtaagttggcaagtccatgcttcccactcagctcctcaggtcagcaagtctacttctctgcctattttgtatactctctttaatatgtgcctagctttggaaagtctagaatgggtccctggtgcctttttactttgaagaaatcagtttctgcctctttttggaaaagaaaacaaagtgcaattgttttttactggaaagttacccaatagcatgaggtgaacaggacgtagttaggccttcctgtaaacagaaaatcatatcaaaacactatcttcccatctgtttctcaatgcctgctacttcttgtagatatttcatttcaggagagcagcagttaaacccgtggattttgtagttaggaacctgggttcaaaccctcttccactaattggctatgtctctggacaagtttttttttttttttttttttaaaccctttctgaactttcactttctatgtctacctcaaagaattgttgtgaggcttgagataatgcatttgtaaagggtctgccagataggaagatgctagttatggatttacaaggttgttaaggctgtaagagtctaaaacctacagtgaatcacaatgcatttacccccactgacttggacataagtgaaaactagccagaagtctctttttcaaattacttacaggttattcaatataaaatttttgtaatggataatcttatttatctaaactaaagcttcctgtttatacacactcctgttattctgggataagataaatgaccacagtaccttaatttctaggtgggtgcctgtgatggttcattgtaggtaaggacattttctctttttcagcagctgtgtaggtccagagcctctgggagaggaggggggtagcatgcacccagcaggggactgaactgggaaactcaaggttctttttactgtggggtagtgagctgcctttctgtgatcggtttccctagggatgttgctgttcccctccttgctattcgcagctacatacaacgtggccaaccccagtaggctgatcctatatatgatcagtgctggtgctgactctcaatagccccacccaagctggctataggtttacagatacattaattaggcaacctaaaatattgatgctggtgttggtgtgacataatgctatggccagaactgaaacttagagttataattcatgtattagggttctccagagggacagaattagtaggatatatgtatatatgaaagggaggttattagggagaactggctcccacagttagaaggcgaagtcgcacaataggccgtctgcaagctgggttagagagaagccagtagtggctcagcctgagttcaaaaacctcaaaactggggaagctgacagtgcagccagccttcagtctgtggccaaaggcccaagagcccctggcaaccaacccactggtgcaagtcctagattccaaaggctgaagaacctggagtctgatgtccaagagcaggaagagtggaagaaagccagaagactcagcaaacaaggtagacagtgtctaccaccatagtggccataccaaagaggctaccgattccttcctgctacctggatccctgaagttgccctggtctctgcaccttctaaacctagttcttaagagctttccattacatgagctgtctcaaagccctccaataaattctcagtgtaagcttctgttgcttgtggacagaaaattctgacagacctaccctataagtgttactgtcaggataacatgagaacgcacaacagtaagtggtcactaagtgttagctacggttattttgcccaaggtagcatggctagttgatgccggttgatggggcttaaacccagctccctcatcttccaggcctctgtactccctattccactaaactacctctcaggtttatttttttaaattcttactctgcaagtacataggaccacatttacctgggaaaacaagaataaaggctgctctgcattttttagaaacttttttgaaagggagatgggaatgcctgcacccccaagtccagaccaacacaatggttaattgagatgaataataaaggaaagactgttctgggcttcccagaatagcttggtccttaaattgtggcacaaacaacctcctgtcagagccagcctcctgccaggaagaggggtaggagactagaggccgtgtgtgcagccttgccctgaaggctagggtgacaatttggaggctgtccaaacaccctggcctctagagctggcctgtctatttgaaatgccggctctgatgctaatcggcgaccctcaggcaagttacttaaccttacatgcctcagttttctcatctggaaaatgagaaccctaggtttagggttgttagaaaagttaaatgagttaagacaagtgcctgggacacagtagcctcttgtgtgtgtttatcattatgtcctcagcaggtcgtagaagcagcttctcaggtgtgaggctggcgcgattatctggagtgggttgggttttctaggatggaccccctgctgcattttcctcattcatccaccagggcttaatggggaatcaaggaatccatgtgtaactgtataataactgtagccacactccaatgaccacctactagttgtccctggcactgcttatacatatgtccatcaaatcaatcctatgaagtagatactgtcttcattttatagatcagagacaattggggttcagagagctgatgtgattttcccagggtcacagagagtcccagattcaggcacaactcttgtattccaagacacaaccactacatgtccaaaggctgcccagagccaccgggcacggcaaattgtgacatatccctaaagaggctgagcacctggtcaggatctgatggctgacagtgtgtccagatgcagagctggagtgggggaggggaaggggggctccttgggacagagaaggctttctgtgctttctctgaagggagcagtctgaggaccaagggaacccggcaaacagcacctcaggtactccaggccctcctggctggagagggctgtggcaatggaaaattagtgccaactgcaatgagtcagcctcggttaaatagagagtgaagaatgctggacaggaacctccaccctcatgtcacatttcttcagtgtgacccttctggcccctctcctcctgacagcggaacaatgactgccccgataggtgaggctggaggaagaatcagtcctgtccttggcaagctcttcactatgacagtaaaggctctctgcctgctgccaaggcctgtgactttctaacctggcctcacgctgggtaagcttaaggtagaggtgcaggattagcaagcccacctggctaccaggccgacagctacatctttcaactgaccctgatcaacgaagagggacttgtgtctctcagttggttccaaatgaaaccagggagcaggggcgttaggaagctccaacaggatggtacttaatggggcatttgagtggagaggtaggtgacatagtgctttggagcccagggagggaaaggttctgctgaagttgaattcaagactgttctttcatcacaaacttgagtttcctggacatttgtttgcagaaacaaccgtagggttttgccttaacctcgtgggtttattattacctcatagggactttgcctcctgacagcagtttatgggtgttcattgtggcacttgagttttcttgcatacttgttagagaaaccaagtttgtcatcaacttcttatttaaccccctggctataacttcatggattatgttataattaagccatccagagtaaaatctgtttagattatcttggagtaagggggaaaaaatctgtaattttttctcctcaactagatatatacataaaaaatgattgtattgcttcatttaaaaaatataacgcaaaatctcttttccttct

SEQ ID NO: 974 - protein, 128 aa, Homo sapiens; identical to SEQ ID NO: 972

SEQ ID NO: 975 - DNA, 3178 bp, Homo sapiens
agcctgtggagacgggacagccctgtcccactcactctttcccctgccgctcctgccggcagctccaaccatgggaggccgcgtctttctcgcattctgtgtctggctgactctgccgggagctgaaacccaggactccaggggctgtgcccggtggtgccctcagaactcctcgtgtgtcaatgccaccgcctgtcgctgcaatccagggttcagctctttttctgagatcatcaccaccccgacggagacttgtgacgacatcaacgagtgtgcaacaccgtcgaaagtgtcatgcggaaaattctcggactgctggaacacagaggggagctacgactgcgtgtgcagcccgggatatgagcctgtttctggggcaaaaacattcaagaatgagagcgagaacacctgtcaagatgtggacgaatgtcagcagaacccaaggctctgtaaaagctacggcacctgcgtcaacacccttggcagctatacctgccagtgcctgcctggcttcaagttcatacctgaggatccgaaggtctgcacagatgtgaatgaatgcacctccggacaaaacccgtgccacagctccacccactgcctcaacaacgtgggcagctatcagtgccgctgccgcccgggctggcaaccgattccggggtcccccaatggcccaaacaataccgtctgtgaagatgtggacgagtgcagctccgggcagcatcagtgtgacagctccaccgtctgcttcaacaccgtgggttcatacagctgccgctgccgcccaggctggaagcccagacacggaatcccgaataaccaaaaggacactgtctgtgaagatatgactttctccacctggaccccgccccctggagtccacagccagacgctttcccgattcttcgacaaagtccaggacctgggcagagactccaagacaagctcagccgaggtcaccatccagaatgtcatcaaattggtggatgaactgatggaagctcctggagacgtagaggccctggcgccacctgtccggcacctcatagccacccagctgctctcaaaccttgaagatatcatgaggatcctggccaagagcctgcctaaaggccccttcacctacatttccccttcgaacacagagctgaccctgatgatccaggagcggggggacaagaacgtcactatgggtcagagcagcgcacgcatgaagctgaattgggctgtggcagctggagccgaggatccaggccccgccgtggcgggcatcctctccatccagaacatgacgacattgctggccaatgcctccttgaacctgcattccaagaagcaagccgaactggaggagatatatgaaagcagcatccgtggtgtccaactcagacgcctctctgccgtcaactccatctttctgagccacaacaacaccaaggaactcaactcccccatccttttcgccttctcccaccttgagtcctccgatggggaggcgggaagagaccctcctgccaaggacgtgatgcctgggccacggcaggagctgctctgtgccttctggaagagtgacagcgacaggggagggcactgggccaccgagggctgccaggtgctgggcagcaagaacggcagcaccacctgccaatgcagccacctgagcagctttgcgatccttatggctcattatgacgtggaggactggaagctgaccctgatcaccagggtgggactggcgctgtcactcttctgcctgctgctgtgcatcctcactttcctgctggtgcggcccatccagggctcgcgcaccaccatacacctgcacctctgcatctgcctcttcgtgggctccaccatcttcctggccggcatcgagaacgaaggcggccaggtggggctgcgctgccgcctggtggccgggctgctgcactactgtttcctggccgccttctgctggatgagcctcgaaggcctggagctctactttcttgtggtgcgcgtgttccaaggccagggcctgagtacgcgctggctctgcctgatcggctatggcgtgcccctgctcatcgtgggcgtctcggctgccatctacagcaagggctacggccgccccagatactgctggttggactttgagcagggcttcctctggagcttcttgggacctgtgaccttcatcattttgtgcaatgctgtcattttcgtgactaccgtctggaagctcactcagaagttttctgaaatcaatccagacatgaagaaattaaagaaggcgagggcgctgaccatcacggccatcgcgcagctcttcctgttgggctgcacctgggtctttggcctgttcatcttcgacgatcggagcttggtgctgacctatgtgtttaccatcctcaactgcctgcagggcgccttcctctacctgctgcactgcctgctcaacaagaaggttcgggaagaataccggaagtgggcctgcctagttgctggggggagcaagtactcagaattcacctccaccacgtctggcactggccacaatcagacccgggccctcagggcatcagagtccggcatatgaaggcgcatggttctggacggcccagcagctcctgtggccacagcagctttgtacacgaagaccatccatcctcccttcgtccaccactctactccctccaccctccctccctgatcccgtgtgccaccaggagggagtggcagctatagtctggcaccaaagtccaggacacccagtggggtggagtcggagccactggtcctgctgctggctgcctctctgctccaccttgtgacccagggtggggacaggggctggcccagggctgcaatgcagcatgttgccctggcacctgtggccagtactcgggacagactaagggcgcttgtcccatcctggacttttcctctcatgtctttgctgcagaactgaagagactaggcgctggggctcagcttccctcttaagctaagactgatgtcagaggccccatggcgaggccccttggggccactgcctgaggctcacggtacagaggcctgccctgcctggccgggcaggaggttctcactgttgtgaaggttgtagacgttgtgtaatgtgtttttatctgttaaaatttttcagtgttgacacttaaaattaaacacatgcatacag

SEQ ID NO: 976 - protein, 835 aa, Homo sapiens
MGGRVFLAFCVWLTLPGAETQDSRGCARWCPQNSSCVNATACRCNPGFSSFSEIITTPTETCDDINECATPSKVSCGKFSDCWNTEGSYDCVCSPGYEPVSGAKTFKNESENTCQDVDECQQNPRLCKSYGTCVNTLGSYTCQCLPGFKFIPEDPKVCTDVNECTSGQNPCHSSTHCLNNVGSYQCRCRPGWQPIPGSPNGPNNTVCEDVDECSSGQHQCDSSTVCFNTVGSYSCRCRPGWKPRHGIPNNQKDTVCEDMTFSTWTPPPGVHSQTLSRFFDKVQDLGRDSKTSSAEVTIQNVIKLVDELMEAPGDVEALAPPVRHLIATQLLSNLEDIMRILAKSLPKGPFTYISPSNTELTLMIQERGDKNVTMGQSSARMKLNWAVAAGAEDPGPAVAGILSIQNMTTLLANASLNLHSKKQAELEEIYESSIRGVQLRRLSAVNSIFLSHNNTKELNSPILFAFSHLESSDGEAGRDPPAKDVMPGPRQELLCAFWKSDSDRGGHWATEGCQVLGSKNGSTTCQCSHLSSFAILMAHYDVEDWKLTLITRVGLALSLFCLLLCILTFLLVRPIQGSRTTIHLHLCICLFVGSTIFLAGIENEGGQVGLRCRLVAGLLHYCFLAAFCWMSLEGLELYFLVVRVFQGQGLSTRWLCLIGYGVPLLIVGVSAAIYSKGYGRPRYCWLDFEQGFLWSFLGPVTFIILCNAVIFVTTVWKLTQKFSEINPDMKKLKKARALTITAIAQLFLLGCTWVFGLFIFDDRSLVLTYVFTILNCLQGAFLYLLHCLLNKKVREEYRKWACLVAGGSKYSEFTSTTSGTGHNQTRALRASESGI

SEQ ID NO: 977 - DNA, 3019 bp, Homo sapiens
gacgggacagccctgtcccactcactctttcccctgccgctcctgccggcagctccaaccatgggaggccgcgtctttctcgcattctgtgtctggctgactctgccgggagctgaaacccaggactccaggggctgtgcccggtggtgccctcagaactcctcgtgtgtcaatgccaccgcctgtcgctgcaatccagggttcagctctttttctgagatcatcaccaccccgacggagacttgtgacgacatcaacgagtgtgcaacaccgtcgaaagtgtcatgcggaaaattctcggactgctggaacacagaggggagctacgactgcgtgtgcagcccgggatatgagcctgtttctggggcaaaaacattcaagaatgagagcgagaacacctgtcaagatgtggacgaatgtcagcagaacccaaggctctgtaaaagctacggcacctgcgtcaacacccttggcagctatacctgccagtgcctgcctggcttcaagttcatacctgaggatccgaaggtctgcacagatgtggacgagtgcagctccgggcagcatcagtgtgacagctccaccgtctgcttcaacaccgtgggttcatacagctgccgctgccgcccaggctggaagcccagacacggaatcccgaataaccaaaaggacactgtctgtgaagatatgactttctccacctggaccccgccccctggagtccacagccagacgctttcccgattcttcgacaaagtccaggacctgggcagagactccaagacaagctcagccgaggtcaccatccagaatgtcatcaaattggtggatgaactgatggaagctcctggagacgtagaggccctggcgccacctgtccggcacctcatagccacccagctgctctcaaaccttgaagatatcatgaggatcctggccaagagcctgcctaaaggccccttcacctacatttccccttcgaacacagagctgaccctgatgatccaggagcggggggacaagaacgtcactatgggtcagagcagcgcacgcatgaagctgaattgggctgtggcagctggagccgaggatccaggccccgccgtggcgggcatcctctccatccagaacatgacgacattgctggccaatgcctccttgaacctgcattccaagaagcaagccgaactggaggagatatatgaaagcagcatccgtggtgtccaactcagacgcctctctgccgtcaactccatctttctgagccacaacaacaccaaggaactcaactcccccatccttttcgccttctcccaccttgagtcctccgatggggaggcgggaagagaccctcctgccaaggacgtgatgcctgggccacggcaggagctgctctgtgccttctggaagagtgacagcgacaggggagggcactgggccaccgagggctgccaggtgctgggcagcaagaacggcagcaccacctgccaatgcagccacctgagcagctttgcgatccttatggctcattatgacgtggaggactggaagctgaccctgatcaccagggtgggactggcgctgtcactcttctgcctgctgctgtgcatcctcactttcctgctggtgcggcccatccagggctcgcgcaccaccatacacctgcacctctgcatctgcctcttcgtgggctccaccatcttcctggccggcatcgagaacgaaggcggccaggtggggctgcgctgccgcctggtggccgggctgctgcactactgtttcctggccgccttctgctggatgagcctcgaaggcctggagctctactttcttgtggtgcgcgtgttccaaggccagggcctgagtacgcgctggctctgcctgatcggctatggcgtgcccctgctcatcgtgggcgtctcggctgccatctacagcaagggctacggccgccccagatactgctggttggactttgagcagggcttcctctggagcttcttgggacctgtgaccttcatcattttgtgcaatgctgtcattttcgtgactaccgtctggaagctcactcagaagttttctgaaatcaatccagacatgaagaaattaaagaaggcgagggcgctgaccatcacggccatcgcgcagctcttcctgttgggctgcacctgggtctttggcctgttcatcttcgacgatcggagcttggtgctgacctatgtgtttaccatcctcaactgcctgcagggcgccttcctctacctgctgcactgcctgctcaacaagaaggttcgggaagaataccggaagtgggcctgcctagttgctggggggagcaagtactcagaattcacctccaccacgtctggcactggccacaatcagacccgggccctcagggcatcagagtccggcatatgaaggcgcatggttctggacggcccagcagctcctgtggccacagcagctttgtacacgaagaccatccatcctcccttcgtccaccactctactccctccaccctccctccctgatcccgtgtgccaccaggagggagtggcagctatagtctggcaccaaagtccaggacacccagtggggtggagtcggagccactggtcctgctgctggctgcctctctgctccaccttgtgacccagggtggggacaggggctggcccagggctgcaatgcagcatgttgccctggcacctgtggccagtactcgggacagactaagggcgcttgtcccatcctggacttttcctctcatgtctttgctgcagaactgaagagactaggcgctggggctcagcttccctcttaagctaagactgatgtcagaggccccatggcgaggccccttggggccactgcctgaggctcacggtacagaggcctgccctgcctggccgggcaggaggttctcactgttgtgaaggttgtagacgttgtgtaatgtgtttttatctgttaaaatttttcagtgttgacacttaaaattaaacacatgcatac

SEQ ID NO: 978 - protein, 786 aa, Homo sapiens
MGGRVFLAFCVWLTLPGAETQDSRGCARWCPQNSSCVNATACRCNPGFSSFSEIITTPTETCDDINECATPSKVSCGKFSDCWNTEGSYDCVCSPGYEPVSGAKTFKNESENTCQDVDECQQNPRLCKSYGTCVNTLGSYTCQCLPGFKFIPEDPKVCTDVDECSSGQHQCDSSTVCFNTVGSYSCRCRPGWKPRHGIPNNQKDTVCEDMTFSTWTPPPGVHSQTLSRFFDKVQDLGRDSKTSSAEVTIQNVIKLVDELMEAPGDVEALAPPVRHLIATQLLSNLEDIMRILAKSLPKGPFTYISPSNTELTLMIQERGDKNVTMGQSSARMKLNWAVAAGAEDPGPAVAGILSIQNMTTLLANASLNLHSKKQAELEEIYESSIRGVQLRRLSAVNSIFLSHNNTKELNSPILFAFSHLESSDGEAGRDPPAKDVMPGPRQELLCAFWKSDSDRGGHWATEGCQVLGSKNGSTTCQCSHLSSFAILMAHYDVEDWKLTLITRVGLALSLFCLLLCILTFLLVRPIQGSRTTIHLHLCICLFVGSTIFLAGIENEGGQVGLRCRLVAGLLHYCFLAAFCWMSLEGLELYFLVVRVFQGQGLSTRWLCLIGYGVPLLIVGVSAAIYSKGYGRPRYCWLDFEQGFLWSFLGPVTFIILCNAVIFVTTVWKLTQKFSEINPDMKKLKKARALTITAIAQLFLLGCTWVFGLFIFDDRSLVLTYVFTILNCLQGAFLYLLHCLLNKKVREEYRKWACLVAGGSKYSEFTSTTSGTGHNQTRALRASESGI

SEQ ID NO: 979 - DNA, 2811 bp, Homo sapiens
gcattctgtgtctggctgactctgccgggagctgaaacccaggactccaggggctgtgcccggtggtgccctcagaactcctcgtgtgtcaatgccaccgcctgtcgctgcaatccagggttcagctctttttctgagatcatcaccaccccgacggagacttgtgacgacatcaacgagtgtgcaacaccgtcgaaagtgtcatgcggaaaattctcggactgctggaacacagaggggagctacgactgcgtgtgcagcccgggatatgagcctgtttctggggcaaaaacattcaagaatgagagcgagaacacctgtcaagatgtggacgagtgcagctccgggcagcatcagtgtgacagctccaccgtctgcttcaacaccgtgggttcatacagctgccgctgccgcccaggctggaagcccagacacggaatcccgaataaccaaaaggacactgtctgtgaagatatgactttctccacctggaccccgccccctggagtccacagccagacgctttcccgattcttcgacaaagtccaggacctgggcagagactccaagacaagctcagccgaggtcaccatccagaatgtcatcaaattggtggatgaactgatggaagctcctggagacgtagaggccctggcgccacctgtccggcacctcatagccacccagctgctctcaaaccttgaagatatcatgaggatcctggccaagagcctgcctaaaggccccttcacctacatttccccttcgaacacagagctgaccctgatgatccaggagcggggggacaagaacgtcactatgggtcagagcagcgcacgcatgaagctgaattgggctgtggcagctggagccgaggatccaggccccgccgtggcgggcatcctctccatccagaacatgacgacattgctggccaatgcctccttgaacctgcattccaagaagcaagccgaactggaggagatatatgaaagcagcatccgtggtgtccaactcagacgcctctctgccgtcaactccatctttctgagccacaacaacaccaaggaactcaactcccccatccttttcgccttctcccaccttgagtcctccgatggggaggcgggaagagaccctcctgccaaggacgtgatgcctgggccacggcaggagctgctctgtgccttctggaagagtgacagcgacaggggagggcactgggccaccgagggctgccaggtgctgggcagcaagaacggcagcaccacctgccaatgcagccacctgagcagctttgcgatccttatggctcattatgacgtggaggactggaagctgaccctgatcaccagggtgggactggcgctgtcactcttctgcctgctgctgtgcatcctcactttcctgctggtgcggcccatccagggctcgcgcaccaccatacacctgcacctctgcatctgcctcttcgtgggctccaccatcttcctggccggcatcgagaacgaaggcggccaggtggggctgcgctgccgcctggtggccgggctgctgcactactgtttcctggccgccttctgctggatgagcctcgaaggcctggagctctactttcttgtggtgcgcgtgttccaaggccagggcctgagtacgcgctggctctgcctgatcggctatggcgtgcccctgctcatcgtgggcgtctcggctgccatctacagcaagggctacggccgccccagatactgctggttggactttgagcagggcttcctctggagcttcttgggacctgtgaccttcatcattttgtgcaatgctgtcattttcgtgactaccgtctggaagctcactcagaagttttctgaaatcaatccagacatgaagaaattaaagaaggcgagggcgctgaccatcacggccatcgcgcagctcttcctgttgggctgcacctgggtctttggcctgttcatcttcgacgatcggagcttggtgctgacctatgtgtttaccatcctcaactgcctgcagggcgccttcctctacctgctgcactgcctgctcaacaagaaggttcgggaagaataccggaagtgggcctgcctagttgctggggggagcaagtactcagaattcacctccaccacgtctggcactggccacaatcagacccgggccctcagggcatcagagtccggcatatgaaggcgcatggttctggacggcccagcagctcctgtggccacagcagctttgtacacgaagaccatccatcctcccttcgtccaccactctactccctccaccctccctccctgatcccgtgtgccaccaggagggagtggcagctatagtctggcaccaaagtccaggacacccagtggggtggagtcggagccactggtcctgctgctggctgcctctctgctccaccttgtgacccagggtggggacaggggctggcccagggctgcaatgcagcatgttgccctggcacctgtggccagtactcgggacagactaagggcgcttgtcccatcctggacttttcctctcatgtctttgctgcagaactgaagagactaggcgctggggctcagcttccctcttaagctaagactgatgtcagaggccccatggcgaggccccttggggccactgcctgaggctcacggtacagaggcctgccctgcctggccgggcaggaggttctcactgttgtgaaggttgtagacgttgtgtaatgtgtttttatctgttaaaatttttcagtgttgacacttaaaattaaacacatgcatacagaag

SEQ ID NO: 980 - protein, 735 aa, Homo sapiens
AFCVWLTLPGAETQDSRGCARWCPQNSSCVNATACRCNPGFSSFSEIITTPTETCDDINECATPSKVSCGKFSDCWNTEGSYDCVCSPGYEPVSGAKTFKNESENTCQDVDECSSGQHQCDSSTVCFNTVGSYSCRCRPGWKPRHGIPNNQKDTVCEDMTFSTWTPPPGVHSQTLSRFFDKVQDLGRDSKTSSAEVTIQNVIKLVDELMEAPGDVEALAPPVRHLIATQLLSNLEDIMRILAKSLPKGPFTYISPSNTELTLMIQERGDKNVTMGQSSARMKLNWAVAAGAEDPGPAVAGILSIQNMTTLLANASLNLHSKKQAELEEIYESSIRGVQLRRLSAVNSIFLSHNNTKELNSPILFAFSHLESSDGEAGRDPPAKDVMPGPRQELLCAFWKSDSDRGGHWATEGCQVLGSKNGSTTCQCSHLSSFAILMAHYDVEDWKLTLITRVGLALSLFCLLLCILTFLLVRPIQGSRTTIHLHLCICLFVGSTIFLAGIENEGGQVGLRCRLVAGLLHYCFLAAFCWMSLEGLELYFLVVRVFQGQGLSTRWLCLIGYGVPLLIVGVSAAIYSKGYGRPRYCWLDFEQGFLWSFLGPVTFIILCNAVIFVTTVWKLTQKFSEINPDMKKLKKARALTITAIAQLFLLGCTWVFGLFIFDDRSLVLTYVFTILNCLQGAFLYLLHCLLNKKVREEYRKWACLVAGGSKYSEFTSTTSGTGHNQTRALRASESGI

SEQ ID NO: 981 - DNA, 5192 bp, Homo sapiens
cgggcgagggccgggcaggaggagcgggcgcggcgcgggcgaggctgggacccgagcgcgctcacttcgccgcaaagtgccaacttcccctggagtgccgggcgcgcaccgtccgggcgcgggggaaagaaaggcagcgggaatttgagatttttgggaagaaagtcggatttcccccgtccccttccccctgttactaatcctcattaaaaagaaaaacaacagtaactgcaaacttgctaccatcccgtacgtcccccactcctggcaccatgaaggcggccgtcgatctcaagccgactctcaccatcatcaagacggaaaaagtcgatctggagcttttcccctccccggatatggaatgtgcagatgtcccactattaactccaagcagcaaagaaatgatgtctcaagcattaaaagctactttcagtggtttcactaaagaacagcaacgactggggatcccaaaagacccccggcagtggacagaaacccatgttcgggactgggtgatgtgggctgtgaatgaattcagcctgaaaggtgtagacttccagaagttctgtatgaatggagcagccctctgcgccctgggtaaagactgctttctcgagctggccccagactttgttggggacatcttatgggaacatctagagatcctgcagaaagaggatgtgaaaccatatcaagttaatggagtcaacccagcctatccagaatcccgctatacctcggattacttcattagctatggtattgagcatgcccagtgtgttccaccatcggagttctcagagcccagcttcatcacagagtcctatcagacgctccatcccatcagctcggaagagctcctctccctcaagtatgagaatgactacccctcggtcattctccgagaccctctccagacagacaccttgcagaatgactactttgctatcaaacaagaagtcgtcaccccagacaacatgtgcatggggaggaccagtcgtggtaaactcgggggccaggactcttttgaaagcatagagagctacgatagttgtgatcgcctcacccagtcctggagcagccagtcatctttcaacagcctgcagcgtgttccctcctatgacagcttcgactcagaggactatccggctgccctgcccaaccacaagcccaagggcaccttcaaggactatgtgcgggaccgtgctgacctcaataaggacaagcctgtcattcctgctgctgccctagctggctacacaggcagtggaccaatccagctatggcagtttcttctggaattactcactgataaatcctgtcagtcttttatcagctggacaggagatggctgggaattcaaactttctgacccagatgaggtggccaggagatggggaaagaggaaaaacaaacctaagatgaattatgagaaactgagccgtggcctacgctactattacgacaaaaacatcatccacaagacagcggggaaacgctacgtgtaccgctttgtgtgtgacctgcagagcctgctggggtacacccctgaggagctgcacgccatgctggacgtcaagccagatgccgacgagtgatggcactgaaggggctggggaaaccctgctgagaccttccaaggacagccgtgttggttggactctgaattttgaattgttattctattttttattttccagaactcattttttaccttcaggggtgggagctaagtcagttgcagctgtaatcaattgtgcgcagttgggaaaggaaagccaggacttgtggggtgggtgggaccagaaattcttgagcaaattttcaggagagggagaagggccttctcagaagcttgaaggctctggcttaacagagaaagagactaatgtgtccaatcatttttaaaaatcatccatgaaaaagtgtcttgagttgtggacccattagcaagtgacattgtcacatcagaactcatgaaactgatgtaaggcaattaatttgcttctgtttttaggtctgggagggcaaaaaagaggtgggtgggatgaaacatgttttggggggggatgcactgaaaatctgagaactatttacctatcactctagttttgaagcaaagatggacttcagtggggaggggccaaaaccgttgttgtgttaaaatttattttattaaattttgtgccagtattttttttcttaaaaatcgtcttaagctctaaggtggtctcagtattgcaatatcatgtaagtttgtttttatttgccggctgaggattctgtcacaatgaaagaaaactgtttatatagaccccattggaaaagcaaaacgctctcactgagatcagggatcccaaattcatgggacttatataagaaggacaattaatgctgatttgggtacaggggaattatgtgtgtgaatgtcatctacaattaaaaaaaattagcacatccctttacttacttgttatcagtggattctcggggtttggacttaatgttgagctaagaagcattaagtctttgaactgaatgtattttgcatccctggttttggacgacagtaaacgtaggagcactgttgaagtcctggaagggagatcgaaggaggaagattgacttggttctttcttagtcctatatctgtagcatagatgacttggaataaaagctgtatgcatgggcattacccctcaggtcctaagaaataagtcctgaatgcatgtcgttccaaactaacactctgtaatttttcttttatgtcttattttccaagagtcctccattttttgcaccccctcaccgccaactctgttattcagtagagagaagtgtacggctttctgattggtgagtgaaaaagtaacttgagacacgacctaagttgaagagtttagacttgctgagttttagaagtgatggaaattaagagagcatttcaataaaatgtgacttggctgtctttggaagagaagtgcaaggctttcctttgaagaatttaaattagtccggtaggatgtcaggtgagactgtgtatgcaaaatgaatggcacaggtgatgccagggcctcttgcttgggtctgatgtcttggcacagggtaagtgaaggttaattccagaagagaggaatgacttgaaggcaaaggaaactaaggaaggaggttcagtgaggaaaataaggttgtccatgagatttgaatagatttttagttcccccaaggtttaaatacaaacatagtcaagcaaggtagtcatctttctgctggttgtgagggggaatctgaaaatggagttttagaggaaaagtcaacatctaactagtgaggaaaagtgcctaatacaattagaatctccctcactctatagttgcccagttgaaaggataaggaggaggggtggcttttatggacttccatgagagaaggaaagaaatatttcaggtaagcttctcagggctggccctttttgggatttggatgagaaattggaagtactaactactttctagcatatctttaagaaaattgattgttatttactcccagatcctcttgcagacccagaattatcaggaacatagctctgtgattcatgagtgtccccatactgatgaattggagcatccatatggaaagcaaaggcagaattatcccagctgtattattttgatcttttggatgcaggtgccttaatgaagctctcaaaatattttaggagctgctcagggagtgttgggtggaactgtttggactacattgttttctcttagattatgtgatttttgttgggcactggcaaaaggtgtgtgtgtgaatgtgtgcatgtgtgtgaatgttgtgtgtgtgtgtgtgtgtgtgtgtgtgtgtgtgtgtgtgtgtgtttgcagacatgcaaaactgcagctgaaataataccttagatttctaggtaagtctttccacatttcaataatgggtaagagtagaaccagggccgggtatcaattattgcttgctgtttgcaaccaggcataaaatcactttctcaaatcatccaccgttcctattaaatttatgccggaaactctccttctgtgagtataactcctgcagttcctatagcagataagatataagaaagtgcctcctagtgctcctccgcccgcttgtttgctaaaattccctttctctctaagtccaccattttcaagatttgtagatagtgtattagttaagacagctttgtcgatctggccagatgttttttctcctttgtccaaaggccagagaccatcccaggaagagtggtgggtggtttatacactggaaatgttgcgtttatgctttttaaaaacacacgttaacttcagaggaaggatgggcaaatctggtctagctgggtgaaacccttattttcccagagatgccttaacctttgttggttttggctttagggttcagagtcacttttgttcccttctccattctggagagggacttcccctacatagagccctgatttttgtggctgtggggattggaggtagcattcaaagatcagatgtgcttttcctcactttggagatgaacactctgggttttacagcattaacctgcctaaccttcatggtgagaaatacaccatctctcttctagtcatgctgtgcatgccgcttactctgttggggtctatataaatttgttgaactcttacctacattccaaagaagtttcaaggaaccataaatatatgtatacatatacatatataaaatatatatattaaaataaaattatcaggaatactgcctcagttattgaacttttttttttaagaatactttttttttaagctgagaagtatagggatgaaaaagatgttatattgtgtttgactattttccaacttgtattttcatataatttatattttttaaaagctgaaaatttagaagcaagatgaaaaaaaggaaaagcaggtgctttttaaaaatcagaactgaggtagcttagagatgtagcgatgtaagtgtcgatgtttttttaaaaaaaaatgcaaaaaaattcttatggcggagttttttgtttgtttattttagtagctgatgctggcacatcattttgctggagagttttttatatactgtagcctgatttcatattgtattttaaactgtgtgaaattaaaaacaaagaatttcattcat

SEQ ID NO: 982 - protein, 441 aa, Homo sapiens
MKAAVDLKPTLTIIKTEKVDLELFPSPDMECADVPLLTPSSKEMMSQALKATFSGFTKEQQRLGIPKDPRQWTETHVRDWVMWAVNEFSLKGVDFQKFCMNGAALCALGKDCFLELAPDFVGDILWEHLEILQKEDVKPYQVNGVNPAYPESRYTSDYFISYGIEHAQCVPPSEFSEPSFITESYQTLHPISSEELLSLKYENDYPSVILRDPLQTDTLQNDYFAIKQEVVTPDNMCMGRTSRGKLGGQDSFESIESYDSCDRLTQSWSSQSSFNSLQRVPSYDSFDSEDYPAALPNHKPKGTFKDYVRDRADLNKDKPVIPAAALAGYTGSGPIQLWQFLLELLTDKSCQSFISWTGDGWEFKLSDPDEVARRWGKRKNKPKMNYEKLSRGLRYYYDKNIIHKTAGKRYVYRFVCDLQSLLGYTPEELHAMLDVKPDADE

SEQ ID NO: 983 - DNA, 2201 bp, Homo sapiens
ggcgagggccgggcaggaggagcgggcgcggcgcgggcgaggctgggacccgagcgcgctcacttcgccgcaaagtgccaacttcccctggagtgccgggcgcgcaccgtccgggcgcgggggaaagaaaggcagcgggaatttgagatttttgggaagaaagtcggatttcccccgtccccttccccctgttactaatcctcattaaaaagaaaaacaacagtaactgcaaacttgctaccatcccgtacgtcccccactcctggcaccatgaaggcggccgtcgatctcaagccgactctcaccatcatcaagacggaaaaagtcgatctggagcttttcccctccccggatatggaatgtgcagatgtcccactattaactccaagcagcaaagaaatgatgtctcaagcattaaaagctactttcagtggtttcactaaagaacagcaacgactggggatcccaaaagacccccggcagtggacagaaacccatgttcgggactgggtgatgtgggctgtgaatgaattcagcctgaaaggtgtagacttccagaagttctgtatgaatggagcagccctctgcgccctgggtaaagactgctttctcgagctggccccagactttgttggggacatcttatgggaacatctagagatcctgcagaaagaggatgtgaaaccatatcaagttaatggagtcaacccagcctatccagaatcccgctatacctcggattacttcattagctatggtattgagcatgcccagtgtgttccaccatcggagttctcagagcccagcttcatcacagagtcctatcagacgctccatcccatcagctcggaagagctcctctccctcaagtatgagaatgactacccctcggtcattctccgagaccctctccagacagacaccttgcagaatgactactttgctatcaaacaagaagtcgtcaccccagacaacatgtgcatggggaggaccagtcgtggtagtggaccaatccagctatggcagtttcttctggaattactcactgataaatcctgtcagtcttttatcagctggacaggagatggctgggaattcaaactttctgacccagatgaggtggccaggagatggggaaagaggaaaaacaaacctaagatgaattatgagaaactgagccgtggcctacgctactattacgacaaaaacatcatccacaagacagcggggaaacgctacgtgtaccgctttgtgtgtgacctgcagagcctgctggggtacacccctgaggagctgcacgccatgctggacgtcaagccagatgccgacgagtgatggcactgaaggggctggggaaaccctgctgagaccttccaaggacagccgtgttggttggactctgaattttgaattgttattctattttttattttccagaactcattttttaccttcaggggtgggagctaagtcagttgcagctgtaatcaattgtgcgcagttgggaaaggaaagccaggacttgtggggtgggtgggaccagaaattcttgagcaaattttcaggagagggagaagggccttctcagaagcttgaaggctctggcttaacagagaaagagactaatgtgtccaatcatttttaaaaatcatccatgaaaaagtgtcttgagttgtggacccattagcaagtgacattgtcacatcagaactcatgaaactgatgtaaggcaattaatttgcttctgtttttaggtctgggagggcaaaaaagaggtgggtgggatgaaacatgttttggggggggatgcactgaaaatctgagaactatttacctatcactctagttttgaagcaaagatggacttcagtggggaggggccaaaaccgttgttgtgttaaaatttattttattaaattttgtgccagtattttttttcttaaaaatcgtcttaagctctaaggtggtctcagtattgcaatatcatgtaagtttgtttttatttgccggctgaggattctgtcacaatgaaagaaaactgtttatatagaccccattggaaaagcaaaacgctctcactgagatcagggatcccaaattcatgggacttatataagaaggacaattaatgctgatttgggtacaggggaattatgtgtgtgaatgtcatctacaattaaaaaaaattagcacatcccttt

SEQ ID NO: 984 - protein, 354 aa, Homo sapiens
MKAAVDLKPTLTIIKTEKVDLELFPSPDMECADVPLLTPSSKEMMSQALKATFSGFTKEQQRLGIPKDPRQWTETHVRDWVMWAVNEFSLKGVDFQKFCMNGAALCALGKDCFLELAPDFVGDILWEHLEILQKEDVKPYQVNGVNPAYPESRYTSDYFISYGIEHAQCVPPSEFSEPSFITESYQTLHPISSEELLSLKYENDYPSVILRDPLQTDTLQNDYFAIKQEVVTPDNMCMGRTSRGSGPIQLWQFLLELLTDKSCQSFISWTGDGWEFKLSDPDEVARRWGKRKNKPKMNYEKLSRGLRYYYDKNIIHKTAGKRYVYRFVCDLQSLLGYTPEELHAMLDVKPDADE

SEQ ID NO: 985 - DNA, 1168 bp, Homo sapiens
ggcctccaccgccttccccggctgcccggcagcctcccctcgctcgctctcctcttcctctagggccccagcgcagctcgggagcccgcgcaccgaggcgctaggggcaccgcgcactagagggacacccgccgcgcctggacagcccccggcgggcgcccccctcgcacctcctgccccgcgcgggccgcgctcccctcccccgcgcctgtgtccccagggcgcagggccgcgcgtccagccccagacccgccggggtccctggggacgcgccagcccggcagtggctcgacgatggaggagccgcagcgcgcccgctcgcacacagtcaccaccaccgccagctccttcgcagagaacttctccaccagcagcagcagcttcgcctacgaccgggagttcctccgcaccctgcccggcttcctcatcgtggccgagatcgttctggggctgctggtatggacgcttattgctggaactgagtacttccgggtccccgcatttggctgggtcatgtttgtagctgtattttactgggtcctcaccgtcttcttcctcattatctacataacaatgacctacaccaggattccccaggtgccctggacaacagtgggcctgtgctttaacggcagtgccttcgtcttgtacctctctgccgctgttgtagatgcatcttccgtctcccctgagagggacagtcacaacttcaacagctgggcggcctcatcgttctttgccttcctggtcaccatctgctacgctggaaatacatatttcagttttatagcatggagatccaggaccatacagtgatttaccattttgataattaaaaggaaaaaaaaaggaagactctcactgtaaaaacagctgtaggtataatgtatattcccagagaattgtatttaactaattaatgttttttatattcttaaatttgctcacaaattgtggtttgttacaattaaactggatacttatttgcaaagtgttgtagcttataatgaactcttaagtatcttattaatgtattaatgtcttcatagatcatattttcttagacaatgtttaaatagataaattgctaatattgagaatgtgtcaagtttgtaaacctaacttttaagatgccagattcttttttgattaaatgttgcaaaatccc

SEQ ID NO: 986 - protein, 173 aa, Homo sapiens
MEEPQRARSHTVTTTASSFAENFSTSSSSFAYDREFLRTLPGFLIVAEIVLGLLVWTLIAGTEYFRVPAFGWVMFVAVFYWVLTVFFLIIYITMTYTRIPQVPWTTVGLCFNGSAFVLYLSAAVVDASSVSPERDSHNFNSWAASSFFAFLVTICYAGNTYFSFIAWRSRTIQ

SEQ ID NO: 987 - DNA, 813 bp, Homo sapiens
acccgcgcctgaccgcggcagctcccaccatggcggagaccaagctccagctgtttgtcaaggcgagtgaggacggggagagcgtgggtcactgcccctcctgccagcggctcttcatggtcctgctcctcaagggcgtacctttcaccctcaccacggtggacacgcgcaggtccccggacgtgctgaaggacttcgcccccggctcgcagctgcccatcctgctctatgacagcgacgccaagacagacacgctgcagatcgaggactttctggaggagacgctggggccgcccgacttccccagcctggcgcctcgttacagggagtccaacaccgccggcaacgacgttttccacaagttctccgcgttcatcaagaacccggtgcccgcgcaggacgaagccctgtaccagcagctgctgcgcgccctcgccaggctggacagctacctgcgcgcgcccctggagcacgagctggcgggggagccgcagctgcgcgagtcccgccgccgcttcctggacggcgacaggctcacgctggccgactgcagcctcctgcccaagctgcacatcgtcgacacggtgtgcgcgcacttccgccaggcgcccatccccgcggagctgcgcggcgtacgccgctacctggacagcgcgatgcaggagaaagagttcaaatacacgtgtccgcacagcgccgagatcctggcggcctaccggcccgccgtgcacccccgctagcgccccaccccgcgtctgtcgcccaataaaggcatctttgtcgggagtgagggtgtcctgacatctgaagggc

SEQ ID NO: 988 - protein, 236 aa, Homo sapiens
MAETKLQLFVKASEDGESVGHCPSCQRLFMVLLLKGVPFTLTTVDTRRSPDVLKDFAPGSQLPILLYDSDAKTDTLQIEDFLEETLGPPDFPSLAPRYRESNTAGNDVFHKFSAFIKNPVPAQDEALYQQLLRALARLDSYLRAPLEHELAGEPQLRESRRRFLDGDRLTLADCSLLPKLHIVDTVCAHFRQAPIPAELRGVRRYLDSAMQEKEFKYTCPHSAEILAAYRPAVHPR

SEQ ID NO: 989 - DNA, 1418 bp, Homo sapiens
gtaaggcgatgctgtagaggctggcgatctccagtcttcacgaatccgcacgtctctccattatccaccgcgcccgcccactgggccccggggcggccggcggccgggtctctcgggctccgcgtgtcgcccgagccgccgccggagcgagggtccctgccccctggggagcggtctccagccgcttcgaagccgccttcttccccctccggacctcaggatggaaaccagcagcctgcaccgcccgagaaggtcggctgggtccggaaattctgcgggaaagggattttcagggagatttggaaaaaccgctatgtggtgctgaaaggggaccagctctacatctctgagaaggaggtaaaagatgagaaaaatattcaagaggtatttgacctgagtgactatgagaagtgtgaagagctccggaagtccaagagcaggagcaagaaaaatcatagcaagtttactcttgcccactccaaacagcccggtaacacggcacccaacctgatcttcctggcagtgagtccagaagagaaggaatcgtggatcaatgccctcaactctgccatcacccgagccaagaaccgtatcttggatgaggcttccacctctacctcggatgggatgctgaccttggacttgatccaagaggaagacccttcccctgaggaaccaacctcttgtgctgagagctttcgggttgacctggacaagtctgtggcccagctggcagggagccggcggagagcggactcagaccgcatccagccctccgcagaccgggcaagcagtctctcccgaccttgggaaaaaacagacaaaggggccacctacaccccccaggcacccaagaagttgacgcccacagagaaaggccgctgcgcctccctggaggagatcctatctcagcgggatgctgcctctgcccgcaccctccagctgcgggctgaggaacccccaacccctgccctccccaacccggggcagctgtcccggatccaggacctggtagcaaggaaactggaggagactcaggagcttctggcagaggttcagggactgggagatgggaagcgaaaggccaaggacccccctcggtctccgccggattctgagtcagagcagctgctgctggagacggaacggctgctgggagaggcatcatcgaattggagccaggcaaagagggtgctgcaggaggtcagggagctgagagacctgtacagacagatggacctgcagaccccggactcccacctcagacagaccaccccgcacagtcagtaccggaagagcctgatgtgagggcagggtggggtctggaacttgtcgggttggacagactcttatctccgtgttgctggataaagcttttttatttacctcaatcaaaaaaagaaaacaaaaatgaactc

SEQ ID NO: 990 - protein, 435 aa, Homo sapiens
VRRCCRGWRSPVFTNPHVSPLSTAPAHWAPGRPAAGSLGLRVSPEPPPERGSLPPGERSPAASKPPSSPSGPQDGNQQPAPPEKVGWVRKFCGKGIFREIWKNRYVVLKGDQLYISEKEVKDEKNIQEVFDLSDYEKCEELRKSKSRSKKNHSKFTLAHSKQPGNTAPNLIFLAVSPEEKESWINALNSAITRAKNRILDEASTSTSDGMLTLDLIQEEDPSPEEPTSCAESFRVDLDKSVAQLAGSRRRADSDRIQPSADRASSLSRPWEKTDKGATYTPQAPKKLTPTEKGRCASLEEILSQRDAASARTLQLRAEEPPTPALPNPGQLSRIQDLVARKLEETQELLAEVQGLGDGKRKAKDPPRSPPDSESEQLLLETERLLGEASSNWSQAKRVLQEVRELRDLYRQMDLQTPDSHLRQTTPHSQYRKSLM

SEQ ID NO: 991 - DNA, 1593 bp, Homo sapiens
ggggacccgggccgcgtgggcgccgggatggagggcgccaaggggcggggagcgggcgtgcgtgtgtgtgcgagtgcgaatgcgagggaggccggccttgagtgaaaccggagctacaaagaaggggagagtccgggagcgggagggcgcgagggaggagcggcggcgccggggcagctccgacgccctcccgcggggaaggagcccccgcggtgccgccgaggccccgacgcggggccgcccctcggctcgccgccccgcgcccgcgcccgctgggaatgatgaagaagaacaattccgccaagcggggacctcaggatggaaaccagcagcctgcaccgcccgagaaggtcggctgggtccggaaattctgcgggaaagggattttcagggagatttggaaaaaccgctatgtggtgctgaaaggggaccagctctacatctctgagaaggaggtaaaagatgagaaaaatattcaagaggtatttgacctgagtgactatgagaagtgtgaagagctccggaagtccaagagcaggagcaagaaaaatcatagcaagtttactcttgcccactccaaacagcccggtaacacggcacccaacctgatcttcctggcagtgagtccagaagagaaggaatcgtggatcaatgccctcaactctgccatcacccgagccaagaaccgtatcttggatgaggtcaccgttgaggaggacagctatcttgcccatcccactcgagacagggcaaaaatccagcactcccgccgccccccaacaaggggacacctaatggctgtggcttccacctctacctcggatgggatgctgaccttggacttgatccaagaggaagacccttcccctgaggaaccaacctcttgtgctgagagctttcgggttgacctggacaagtctgtggcccagctggcagggagccggcggagagcggactcagaccgcatccagccctccgcagaccgggcaagcagtctctcccgaccttgggaaaaaacagacaaaggggccacctacaccccccaggcacccaagaagttgacgcccacagagaaaggccgctgcgcctccctggaggagatcctatctcagcgggatgctgcctctgcccgcaccctccagctgcgggctgaggaacccccaacccctgccctccccaacccggggcagctgtcccggatccaggacctggtagcaaggaaactggaggagactcaggagcttctggcagaggttcagggactgggagatgggaagcgaaaggccaaggacccccctcggtctccgccggattctgagtcagagcagctgctgctggagacggaacggctgctgggagaggcatcatcgaattggagccaggcaaagagggtgctgcaggaggtcagggagctgagagacctgtacagacagatggacctgcagaccccggactcccacctcagacagaccaccccgcacagtcagtaccggaagagcctgatgtgagggcagggtggggtctggaacttgtcgggttggacagactcttatctccgtgttgctggataaagcttttttatttacctcaatc

SEQ ID NO: 992 - protein, 409 aa, Homo sapiens
MMKKNNSAKRGPQDGNQQPAPPEKVGWVRKFCGKGIFREIWKNRYVVLKGDQLYISEKEVKDEKNIQEVFDLSDYEKCEELRKSKSRSKKNHSKFTLAHSKQPGNTAPNLIFLAVSPEEKESWINALNSAITRAKNRILDEVTVEEDSYLAHPTRDRAKIQHSRRPPTRGHLMAVASTSTSDGMLTLDLIQEEDPSPEEPTSCAESFRVDLDKSVAQLAGSRRRADSDRIQPSADRASSLSRPWEKTDKGATYTPQAPKKLTPTEKGRCASLEEILSQRDAASARTLQLRAEEPPTPALPNPGQLSRIQDLVARKLEETQELLAEVQGLGDGKRKAKDPPRSPPDSESEQLLLETERLLGEASSNWSQAKRVLQEVRELRDLYRQMDLQTPDSHLRQTTPHSQYRKSLM

SEQ ID NO: 993 - DNA, 5605 bp, Homo sapiens
gcaggccgagcccagtggcgcaggcactgagctgtacttatttgctgtgctatttgacctcttggtttcagagagctccctggaccatctaatggctatgggagatgataaaagcttcgatgatgaagaatcagtggatggaaataggccatcatcagctgcatcagccttcaaggttcctgcacctaaaacatccggaaatcctgccaacagtgcaaggaagcctggttcagcaggtggccctaaggttggaggtgcttctaaggaaggaggtgctggagcagttgatgaagatgattttataaaagcttttacagatgtcccttctattcagatttattctagtcgagaactcgaagaaacattaaataaaatcagggaaattttgtcagatgataaacatgactgggatcagcgtgccaatgcactgaagaaaattcgatcactgcttgttgctggagctgcacagtatgattgcttttttcaacatttacgattgttggatggagcacttaaactttcagctaaggatcttagatcccaggtggttagagaagcttgtattactgtagcccacctttcaacagttttgggaaacaagtttgatcatggcgctgaagccattgtacctacactttttaatctcgtccccaatagtgcaaaagtcatggcaacttctggatgtgcagcaatcagatttatcattcggcatactcatgtacccagacttatacctttaataacaagcaattgcacatcaaaatcagttcccgtgaggagacgttcatttgaatttttagatttattgttgcaagagtggcagactcattcattggaaagacatgcagccgtcttggttgaaactattaaaaagggaattcatgatgctgacgctgaggccagagtggaggcaagaaagacatacatgggtcttagaaaccactttcctggtgaagctgaaacattatataattcccttgagccatcttatcagaagagtcttcaaacttacttaaagagttctggcagtgtagcatctcttccacaatcagacaggtcctcatccagctcacaggaaagtctcaatcgccctttttcttccaaatggtctacagcaaatccatcaactgtggctggaagagtatcagcaggcagcagcaaagccagttcccttccaggaagcctgcagcgttcacgaagtgacattgatgtgaatgctgctgcaggtgccaaggcacatcatgctgctggacagtctgtgcgaagcgggcgcttaggtgcaggtgccctgaatgcaggttcctatgcgtcactagaggatacttctgacaagctggatgtacctaaaaatagccgggtgagagcaaaactttcagcaccacttgctggcatgggaaatgccaaggcagattctagaggaagaagtcgaacaaaaatggtgtctcaatcacagcctggtagccggtctgggtctccaggaagagttctgaccacaacagccctgtccactgtgagctctggtgttcaaagagtcctggtcaattcagcctcagcacaaaaaagaagcaagataccacggagccagggctgtagcagagaggctagtccatctaggctttcagtggcccgaagcagtcgtattcctcgaccaagtgtgagtcaaggatgcagccgggaagctagtcgggagagcagcagagacacaagtcctgttcgctcttttcagcccctcgcctccagacaccattccagatcaactggtgccctctacgcccccgaagtgtatggggcctcaggtccaggttatgggatcagccaatcaagtcgactgtcgtcttctgttagtgccatgcgagtcctgaacacaggttctgatgtggaggaggcggtggcagatgccttgaaaaaaccagctcgaagaagatatgaatcatatggaatgcattcagatgatgacgccaacagcgatgcatctagtgcttgttcagaacgctcctatagttctcgaaatggtagtattcctacatatatgaggcagacggaagatgtggcagaagtcctcaatagatgtgctagttccaattggtcagaaaggaaagaaggcctcctaggtctgcagaacttattaaaaaatcagagaacactaagtcgagttgaactgaaaagattatgtgaaattttcacaagaatgtttgctgaccctcatggcaaggtattcagcatgtttttggagactctagtggatttcatacaagtccacaaagatgatcttcaagattggttgtttgtactgctgacacaactactaaaaaaaatgggtgctgatttgcttggatctgttcaggcaaaagttcagaaagcccttgatgttacaagagagtcttttccaaatgatcttcagttcaatattctaatgagatttacagttgatcagacccagacaccaagcttaaaggtgaaggttgctatccttaaatacatagaaactctggccaaacagatggatccaggagattttataaattccagtgaaactcgcctagcagtgtctcgggtcatcacttggacaacagaacccaaaagttctgatgttcggaaggcagcacagtcagtgctgatttcattatttgaactcaataccccagagtttacaatgttattaggagctttaccaaaaacttttcaggatggtgctaccaagcttcttcataatcaccttcgaaacactggcaatggaacccagagttccatggggagtcctttgacaagaccaacaccacgatcaccagctaactggtccagtcctcttacttctcctaccaatacatcacagaatactttatctccaagtgcatttgattatgacacagaaaatatgaactctgaagatatttatagctctcttagaggtgtcactgaagcaatccagaatttcagcttccgtagccaagaagatatgaatgagccattgaaaagggattctaaaaaagatgatggcgattcaatgtgtggtggtcctgggatgtctgacccaagagcaggaggtgatgctactgactcaagtcaaacagctcttgataataaagcttcattgctccattcaatgcctactcactcctctccacgctctcgagactataatccatataactattcagatagcatcagtcccttcaacaagtctgccctcaaggaagccatgtttgatgatgatgctgaccagtttcctgacgatctttccctagatcattctgacctagttgcagagttgttgaaggagctgtctaaccataatgagcgtgtagaagaaagaaaaattgccctctatgaacttatgaaactgacacaggaagaatcttttagtgtttgggatgaacacttcaaaacaatattgcttttattgcttgaaacgcttggagataaagagcctacaatcagggctttggcattaaaggttttaagagaaatcctaaggcatcaaccagcaagatttaaaaactatgcagaattgactgtcatgaaaacattggaagcacataaagatcctcataaggaggtggtgagatctgctgaggaagcggcatcagtgttggccacttcaattagtccagagcagtgcatcaaagtgctttgtcctatcattcaaactgcagactacccaattaatctggctgcaatcaaaatgcaaacaaaagtgatagagagagtgtccaaggaaaccctaaacctgcttttgccagagattatgccaggtctaatacagggttatgataattcagagagcagtgttcggaaagcttgtgtcttctgcctggtggctgttcatgcggtaattggtgatgaactaaaaccacatctcagtcaacttactggcagtaaaatgaagctactgaatctttacatcaaacgtgcacaaacaggttctggaggagctgatcccactactgatgtttctggacaaagttagtgaagctcatcacagcgaaccaggtctctcaaaagaaaggacagatagaccaccctcatcaatgaaaggaagttctcaaacacatcctttggaacttactattgtttcccagttttagttttttgtttcgtttcgttttgtattttctgtaacagaggactatcctcagtctgcatgtaacttttatgatagttattccaaattcaagaagaagcagtattaacatcaattgatcgacacaaagtaatttttaatttaattcatcatttcacatgtttgtactttgtcttcccattaacctttgccagtgttatgattgtataaatttttttaaatgctggttaaacaggaatgcttaaagctttaaaagtttaacagtctaaaacatttttgcttttattcaactgcagaataatatttttattgctactttgagttttgtttcgtatcatgtcctatgctagaaatatttaaatgatgtgaaacaaagcaggactaatttgaactacagctggactccgtttgtgtgatggtgatacatgtcattagttgcaacttctttggggtgatctatagtttgaaaactaaaacctcaaagacagatgttacagaatcagccagttctgtaaaactgatattgtctattggttattgatcttgccatctttatttaaaaccatgtcccttctatgatcccttaagaaagctgcaccaaatcatctgcctgttttttcttgatacttactgaaatagaaggttttattgcagggtttattttggtttgtttatatctttgttgtgaatgatgcttttttgtatttattaatatcaaattcacttatgaataaacttgataatggaaacggacaaaaaaaatcaagtgcgtgtgtgtccttgaccgtcttctgtttctcacgtaataaacaaattatcgagacatgggagtgaccagcaccttttctttaaatggtggaacctggtttccttttaccatgaaattgtcttacttgaaaatattgatcctgatgagagagaagatggtgccaaggctgtctttgtataatgggctcaaattctctacctcttcagggctaatacttttaactgagctgctgcctatagtgtcttttggaaaactacttaaagggtgattttctgttactttttagcaaatttttttaatcacctcttgctacacccattcttttcatgtgcagccgactcaaaaattaccagttttggtgaaaggctaaattagataatttggaaccaggatactaatgatttctcatctttacttttttttaatcctaatataaagtgaatttgattgaaaaggcaaatagctattagggaagcagtttgccattgttgcagagttatctgtactttgtttaactgaaaaaaatgtagaaatatatgtaaagaatttaagacaagagtactgaatggatgatttgtcataggctttcccctttctttctgttctagcagcaggaaaagtttctctatatcctctccctctacctgtaacaattttgttttctactgttaattacattgtgtatttatagttctatgcttactgttgtgcatatactggcaataaaactgtacataacattacttgaaaaagtt

SEQ ID NO: 994 - protein, 1321 aa, Homo sapiens
QAEPSGAGTELYLFAVLFDLLVSESSLDHLMAMGDDKSFDDEESVDGNRPSSAASAFKVPAPKTSGNPANSARKPGSAGGPKVGGASKEGGAGAVDEDDFIKAFTDVPSIQIYSSRELEETLNKIREILSDDKHDWDQRANALKKIRSLLVAGAAQYDCFFQHLRLLDGALKLSAKDLRSQVVREACITVAHLSTVLGNKFDHGAEAIVPTLFNLVPNSAKVMATSGCAAIRFIIRHTHVPRLIPLITSNCTSKSVPVRRRSFEFLDLLLQEWQTHSLERHAAVLVETIKKGIHDADAEARVEARKTYMGLRNHFPGEAETLYNSLEPSYQKSLQTYLKSSGSVASLPQSDRSSSSSQESLNRPFSSKWSTANPSTVAGRVSAGSSKASSLPGSLQRSRSDIDVNAAAGAKAHHAAGQSVRSGRLGAGALNAGSYASLEDTSDKLDVPKNSRVRAKLSAPLAGMGNAKADSRGRSRTKMVSQSQPGSRSGSPGRVLTTTALSTVSSGVQRVLVNSASAQKRSKIPRSQGCSREASPSRLSVARSSRIPRPSVSQGCSREASRESSRDTSPVRSFQPLASRHHSRSTGALYAPEVYGASGPGYGISQSSRLSSSVSAMRVLNTGSDVEEAVADALKKPARRRYESYGMHSDDDANSDASSACSERSYSSRNGSIPTYMRQTEDVAEVLNRCASSNWSERKEGLLGLQNLLKNQRTLSRVELKRLCEIFTRMFADPHGKVFSMFLETLVDFIQVHKDDLQDWLFVLLTQLLKKMGADLLGSVQAKVQKALDVTRESFPNDLQFNILMRFTVDQTQTPSLKVKVAILKYIETLAKQMDPGDFINSSETRLAVSRVITWTTEPKSSDVRKAAQSVLISLFELNTPEFTMLLGALPKTFQDGATKLLHNHLRNTGNGTQSSMGSPLTRPTPRSPANWSSPLTSPTNTSQNTLSPSAFDYDTENMNSEDIYSSLRGVTEAIQNFSFRSQEDMNEPLKRDSKKDDGDSMCGGPGMSDPRAGGDATDSSQTALDNKASLLHSMPTHSSPRSRDYNPYNYSDSISPFNKSALKEAMFDDDADQFPDDLSLDHSDLVAELLKELSNHNERVEERKIALYELMKLTQEESFSVWDEHFKTILLLLLETLGDKEPTIRALALKVLREILRHQPARFKNYAELTVMKTLEAHKDPHKEVVRSAEEAASVLATSISPEQCIKVLCPIIQTADYPINLAAIKMQTKVIERVSKETLNLLLPEIMPGLIQGYDNSESSVRKACVFCLVAVHAVIGDELKPHLSQLTGSKMKLLNLYIKRAQTGSGGADPTTDVSGQS

SEQ ID NO: 995 - DNA, 3439 bp, Homo sapiens
ggaacagcatctgaagatggccgggtgagagcaaaactttcagcaccacttgctggcatgggaaatgccaaggcagattctagaggaagaagtcgaacaaaaatggtgtctcaatcacagcctggtagccggtctgggtctccaggaagagttctgaccacaacagccctgtccactgtgagctctggtgttcaaagagtcctggtcaattcagcctcagcacaaaaaagaagcaagataccacggagccagggctgtagcagagaggctagtccatctaggctttcagtggcccgaagcagtcgtattcctcgaccaagtgtgagtcaaggatgcagccgggaagctagtcgggagagcagcagagacacaagtcctgttcgctcttttcagcccctcggtccaggttatgggatcagccaatcaagtcgactgtcgtcttctgttagtgccatgcgagtcctgaacacaggttctgatgtggaggaggcggtggcagatgccttgaaaaaaccagctcgaagaagatatgaatcatatggaatgcattcagatgatgacgccaacagcgatgcatctagtgcttgttcagaacgctcctatagttctcgaaatggtagtattcctacatatatgaggcagacggaagatgtggcagaagtcctcaatagatgtgctagttccaattggtcagaaaggaaagaaggcctcctaggtctgcagaacttattaaaaaatcagagaacactaagtcgagttgaactgaaaagattatgtgaaattttcacaagaatgtttgctgaccctcatggcaaggtattcagcatgtttttggagactctagtggatttcatacaagtccacaaagatgatcttcaagattggttgtttgtactgctgacacaactactaaaaaaaatgggtgctgatttgcttggatctgttcaggcaaaagttcagaaagcccttgatgttacaagagagtcttttccaaatgatcttcagttcaatattctaatgagatttacagttgatcagacccagacaccaagcttaaaggtgaaggttgctatccttaaatacatagaaactctggccaaacagatggatccaggagattttataaattccagtgaaactcgcctagcagtgtctcgggtcatcacttggacaacagaacccaaaagttctgatgttcggaaggcagcacagtcagtgctgatttcattatttgaactcaataccccagagtttacaatgttattaggagctttaccaaaaacttttcaggatggtgctaccaagcttcttcataatcaccttcgaaacactggcaatggaacccagagttccatggggagtcctttgacaagaccaacaccacgatcaccagctaactggtccagtcctcttacttctcctaccaatacatcacagaatactttatctccaagtgcatttgattatgacacagaaaatatgaactctgaagatatttatagctctcttagaggtgtcactgaagcaatccagaatttcagcttccgtagccaagaagatatgaatgagccattgaaaagggattctaaaaaagatgatggcgattcaatgtgtggtggtcctgggatgtctgacccaagagcaggaggtgatgctactgactcaagtcaaacagctcttgataataaagcttcattgctccattcaatgcctactcactcctctccacgctctcgagactataatccatataactattcagatagcatcagtcccttcaacaagtctgccctcaaggaagccatgtttgatgatgatgctgaccagtttcctgacgatctttccctagatcattctgacctagttgcagagttgttgaaggagctgtctaaccataatgagcgtgtagaagaaagaaaaattgccctctatgaacttatgaaactgacacaggaagaatcttttagtgtttgggatgaacacttcaaaacaatattgcttttattgcttgaaacgcttggagataaagagcctacaatcagggctttggcattaaaggttttaagagaaatcctaaggcatcaaccagcaagatttaaaaactatgcagaattgactgtcatgaaaacattggaagcacataaagatcctcataaggaggtggtgagatctgctgaggaagcggcatcagtgttggccacttcaattagtccagagcagtgcatcaaagtgctttgtcctatcattcaaactgcagactacccaattaatctggctgcaatcaaaatgcaaacaaaagtgatagagagagtgtccaaggaaaccctaaacctgcttttgccagagattatgccaggtctaatacagggttatgataattcagagagcagtgttcggaaagcttgtgtcttctgcctggtggctgttcatgcggtaattggtgatgaactaaaaccacatctcagtcaacttactggcagtaaaatgaagctactgaatctttacatcaaacgtgcacaaacaggttctggaggagctgatcccactactgatgtttctggacaaagttagtgaagctcatcacagcgaaccaggtctctcaaaagaaaggacagatagaccaccctcatcaatgaaaggaagttctcaaacacatcctttggaacttactattgtttcccagttttagttttttgtttcgtttcgttttgtattttctgtaacagaggactatcctcagtctgcatgtaacttttatgatagttattccaaattcaagaagaagcagtattaacatcaattgatcgacacaaagtaatttttaatttaattcatcatttcacatgtttgtactttgtcttcccattaacctttgccagtgttatgattgtataaatttttttaaatgctggttaaacaggaatgcttaaagctttaaaagtttaacagtctaaaacatttttgcttttattcaactgcagaataatatttttattgctactttgagttttgtttcgtatcatgtcctatgctagaaatatttaaatgatgtgaaacaaagcaggactaatttgaactacagctggactccgtttgtgtgatggtgatacatgtcattagttgcaacttctttggggtgatctatagtttgaaaactaaaacctcaaagacagatgttacagaatcagccagttctgtaaaactgatattgtctattggttattgatcttgccatctttatttaaaaccatgtcccttctatgatcccttaagaaagctgcaccaaatcatctgcctgttttttcttgatacttactgaaatagaaggttttattgcagggtttattttggtttgtttatatctttgttgtgaatgatgcttttttgtatttattaatatcaaattcacttatgaataaacttgataatggaaacggac

SEQ ID NO: 996 - protein, 856 aa, Homo sapiens
GTASEDGRVRAKLSAPLAGMGNAKADSRGRSRTKMVSQSQPGSRSGSPGRVLTTTALSTVSSGVQRVLVNSASAQKRSKIPRSQGCSREASPSRLSVARSSRIPRPSVSQGCSREASRESSRDTSPVRSFQPLGPGYGISQSSRLSSSVSAMRVLNTGSDVEEAVADALKKPARRRYESYGMHSDDDANSDASSACSERSYSSRNGSIPTYMRQTEDVAEVLNRCASSNWSERKEGLLGLQNLLKNQRTLSRVELKRLCEIFTRMFADPHGKVFSMFLETLVDFIQVHKDDLQDWLFVLLTQLLKKMGADLLGSVQAKVQKALDVTRESFPNDLQFNILMRFTVDQTQTPSLKVKVAILKYIETLAKQMDPGDFINSSETRLAVSRVITWTTEPKSSDVRKAAQSVLISLFELNTPEFTMLLGALPKTFQDGATKLLHNHLRNTGNGTQSSMGSPLTRPTPRSPANWSSPLTSPTNTSQNTLSPSAFDYDTENMNSEDIYSSLRGVTEAIQNFSFRSQEDMNEPLKRDSKKDDGDSMCGGPGMSDPRAGGDATDSSQTALDNKASLLHSMPTHSSPRSRDYNPYNYSDSISPFNKSALKEAMFDDDADQFPDDLSLDHSDLVAELLKELSNHNERVEERKIALYELMKLTQEESFSVWDEHFKTILLLLLETLGDKEPTIRALALKVLREILRHQPARFKNYAELTVMKTLEAHKDPHKEVVRSAEEAASVLATSISPEQCIKVLCPIIQTADYPINLAAIKMQTKVIERVSKETLNLLLPEIMPGLIQGYDNSESSVRKACVFCLVAVHAVIGDELKPHLSQLTGSKMKLLNLYIKRAQTGSGGADPTTDVSGQS

SEQ ID NO: 997 - DNA, 2518 bp, Homo sapiens
agaggtcctatcgctcccagcggtttccgcagccacctccaccacctccgcagcaaaacgctagccggactggagggccctcgccggcgtcgtgctgacgtcacgcgcgtgctgacgtcgcccgcggccgcggcctctgaagcgggctggggatcggggggcgccgagtttgactagtttgggggcggctgggcgcttggcgttcctcccgccgcccgctgcgccccgcaagccgcgcccctggcgggctaagtgagtcccgcccgctcccgcggggacccgcactggaggctgggcggctctcggcgaaagttggccgctcacagactggcaggcgggcgggcggccgcagccatggagccccgcagcatggagtacttctgcgcccaggtgcagcagaaggacgtcggcggccggctgcaggtcggccaggagctcctgctctaccttggcgcccccggcgccatctcggacctggaggaggacctgggccgcctaggcaagacagtcgacgcgctcaccggctgggtgggttcgagcaactaccgggtatcattaatgggattggaaattttaagtgcctttgtggacagattatcaacacgctttaaatcctatgtagcaatggttattgtagctttaatagacagaatgggagatgccaaagacaaggttcgagatgaagctcagactctgatattgaagttaatggatcaagtagcaccacctatgtacatttgggagcagttggcttctggttttaaacacaagaattttcgatctcgagaaggcgtgtgtctgtgtcttattgaaaccttaaacatttttggggctcagccactagtcatcagcaaattgataccacatttgtgtatcctgtttggagactccaacagtcaggtgagagatgctgcaatattggctatagtggagatttatagacatgtgggagaaaaagtgaggatggatctttataagagaggaattccccctgctagattagaaatgatatttgccaaatttgatgaagtgcaaagttcaggcggtatgattttgagtgtctgcaaagataaaagcttcgatgatgaagaatcagtggatggaaataggccatcatcagctgcatcagccttcaaggttcctgcacctaaaacatccggaaatcctgccaacagtgcaaggaagcctggttcagcaggtggccctaaggttggaggtgcttctaaggaaggaggtgctggagcagttgatgaagatgattttataaaagcttttacagatgtcccttctattcagatttattctagtcgagaactcgaagaaacattaaataaaatcagggaaattttgtcagatgataaacatgactgggatcagcgtgccaatgcactgaagaaaattcgatcactgcttgttgctggagctgcacagtatgattgcttttttcaacatttacgattgttggatggagcacttaaactttcagctaaggatcttagatcccaggtggttagagaagcttgtattactgtagcccacctttcaacagttttgggaaacaagtttgatcatggcgctgaagccattgtacctacactttttaatctcgtccccaatagtgcaaaagtcatggcaacttctggatgtgcagcaatcagatttatcattcggcatactcatgtacccagacttatacctttaataacaagcaattgcacatcaaaatcagttcccgtgaggagacgttcatttgaatttttagatttattgttgcaagagtggcagactcattcattggaaagacatgcagccgtcttggttgaaactattaaaaagggaattcatgatgctgacgctgaggccagagtggaggcaagaaagacatacatgggtcttagaaaccactttcctggtgaagctgaaacattatataattcccttgagccatcttatcagaagagtcttcaaacttacttaaagagttctggcagtgtagcatctcttccacaatcagacaggtcctcatccagctcacaggaaagtctcaatcgccctttttcttccaaatggtctacagcaaatccatcaactgtggctggaagagtatcagcaggcagcagcaaagccagttcccttccaggaagcctgcagcgttcacgaagtgacattgatgtgaatgctgctgcaggtgccaaggcacatcatgctgctggacagtctgtgcgaagcgggcgcttaggtgcaggtgccctgaatgcaggttcctatgcgtcactagaggatacttctgacaagctggatgtacctaaaaatagccgggtgagagcaaaactttcagcaccacttgctggcatgggaaatgccaaggcagattctagaggaagaagtcgaacaaaaatggtgtctcaatcacagcctggtagccggtctgggtctccaggaagagttctgaccacaacagccctgtccactgtgagctctggtgttcaaagagtcctggtcaattcagcctcagcac

SEQ ID NO: 998 - protein, 721 aa, Homo sapiens
MEPRSMEYFCAQVQQKDVGGRLQVGQELLLYLGAPGAISDLEEDLGRLGKTVDALTGWVGSSNYRVSLMGLEILSAFVDRLSTRFKSYVAMVIVALIDRMGDAKDKVRDEAQTLILKLMDQVAPPMYIWEQLASGFKHKNFRSREGVCLCLIETLNIFGAQPLVISKLIPHLCILFGDSNSQVRDAAILAIVEIYRHVGEKVRMDLYKRGIPPARLEMIFAKFDEVQSSGGMILSVCKDKSFDDEESVDGNRPSSAASAFKVPAPKTSGNPANSARKPGSAGGPKVGGASKEGGAGAVDEDDFIKAFTDVPSIQIYSSRELEETLNKIREILSDDKHDWDQRANALKKIRSLLVAGAAQYDCFFQHLRLLDGALKLSAKDLRSQVVREACITVAHLSTVLGNKFDHGAEAIVPTLFNLVPNSAKVMATSGCAAIRFIIRHTHVPRLIPLITSNCTSKSVPVRRRSFEFLDLLLQEWQTHSLERHAAVLVETIKKGIHDADAEARVEARKTYMGLRNHFPGEAETLYNSLEPSYQKSLQTYLKSSGSVASLPQSDRSSSSSQESLNRPFSSKWSTANPSTVAGRVSAGSSKASSLPGSLQRSRSDIDVNAAAGAKAHHAAGQSVRSGRLGAGALNAGSYASLEDTSDKLDVPKNSRVRAKLSAPLAGMGNAKADSRGRSRTKMVSQSQPGSRSGSPGRVLTTTALSTVSSGVQRVLVNSASA

SEQ ID NO: 999 - DNA, 1453 bp, Homo sapiens
gagaaagaaaaatgccggcacaaacctcagtggtggttctgtggttgtttctgtctttttttgatagaatctttgattagtatcgaatttactgtatttggccatgtgaactattgggagcctcctagggtgagggaaattaagagctttcagaggaatgaggcgactgatttgcaaacggatctgtgattataaaagcttcgatgatgaagaatcagtggatggaaataggccatcatcagctgcatcagccttcaaggttcctgcacctaaaacatccggaaatcctgccaacagtgcaaggaagcctggttcagcaggtggccctaaggttggaggtgcttctaaggaaggaggtgctggagcagttgatgaagatgattttataaaagcttttacagatgtcccttctattcagatttattctagtcgagaactcgaagaaacattaaataaaatcagggaaattttgtcagatgataaacatgactgggatcagcgtgccaatgcactgaagaaaattcgatcactgcttgttgctggagctgcacagtatgattgcttttttcaacatttacgattgttggatggagcacttaaactttcagctaaggatcttagatcccaggtggttagagaagcttgtattactgtagcccacctttcaacagttttgggaaacaagtttgatcatggcgctgaagccattgtacctacactttttaatctcgtccccaatagtgcaaaagtcatggcaacttctggatgtgcagcaatcagatttatcattcggcatactcatgtacccagacttatacctttaataacaagcaattgcacatcaaaatcagttcccgtgaggagacgttcatttgaatttttagatttattgttgcaagagtggcagactcattcattggaaagacatgcagccgtcttggttgaaactattaaaaagggaattcatgatgctgacgctgaggccagagtggaggcaagaaagacatacatgggtcttagaaaccactttcctggtgaagctgaaacattatataattcccttgagccatcttatcagaagagtcttcaaacttacttaaagagttctggcagtgtagcatctcttccacaatcagacaggtcctcatccagctcacaggaaagtctcaatcgccctttttcttccaaatggtctacagcaaatccatcaactgtggctggaagagtatcagcaggcagcagcaaagccagttcccttccaggaagcctgcagcgttcacgaagtgacattgatgtgaatgctgctgcaggtgccaaggcacatcatgctgctggacagtctgtgcgaagcgggcgcttaggtgcaggtgccctgaatgcaggttcctatgcgtcactagaatgtgaagccttttggagatctgggagaactgcaaagctctactctgtctaa

SEQ ID NO: 1000 - protein, 431 aa, Homo sapiens
MRRLICKRICDYKSFDDEESVDGNRPSSAASAFKVPAPKTSGNPANSARKPGSAGGPKVGGASKEGGAGAVDEDDFIKAFTDVPSIQIYSSRELEETLNKIREILSDDKHDWDQRANALKKIRSLLVAGAAQYDCFFQHLRLLDGALKLSAKDLRSQVVREACITVAHLSTVLGNKFDHGAEAIVPTLFNLVPNSAKVMATSGCAAIRFIIRHTHVPRLIPLITSNCTSKSVPVRRRSFEFLDLLLQEWQTHSLERHAAVLVETIKKGIHDADAEARVEARKTYMGLRNHFPGEAETLYNSLEPSYQKSLQTYLKSSGSVASLPQSDRSSSSSQESLNRPFSSKWSTANPSTVAGRVSAGSSKASSLPGSLQRSRSDIDVNAAAGAKAHHAAGQSVRSGRLGAGALNAGSYASLECEAFWRSGRTAKLYSV

SEQ ID NO: 1001 - DNA, 1619 bp, Homo sapiens
ccgctctgaggactggagggaccagccgcccacagagccccgagcccgtggtcccggcgagaagaggcacgcgcggcacaggccggcctccgcttcccgggaagacggcgcactcctggccctgggttcttgctgctgcccaccctctgctccctgggatgggccccgaggcgagcagcttcagcacaggcctggccctgctccaggtgcaggaaggaggataaggccgggccgagaggcggcacacctggaccatcccatgggcctccgcccgcgccgccccgaggatgagtggtgatgtcctctagccacccctagcagcgtcggctctccctggacgtgcggccgcggactgggacttggctttctccggataagcggcggcaccggcgtcagcgatgaccgtgcagagactcgtggccgcggccgtgctggtggccctggtctcactcatcctcaacaacgtggcggccttcacctccaactgggtgtgccagacgctggaggatgggcgcaggcgcagcgtggggctgtggaggtcctgctggctggtggacaggacccggggagggccgagccctggggccagagccggccaggtggacgcacatgactgtgaggcgctgggctggggctccgaggcagccggcttccaggagtcccgaggcaccgtcaaactgcagttcgacatgatgcgcgcctgcaacctggtggccacggccgcgctcaccgcaggccagctcaccttcctcctggggctggtgggcctgcccctgctgtcacccgacgccccgtgctgggaggaggccatggccgctgcattccaactggcgagttttgtcctggtcatcgggctcgtgactttctacagaattggcccatacaccaacctgtcctggtcctgctacctgaacattggcgcctgccttctggccacgctggcggcagccatgctcatctggaacattctccacaagagggaggactgcatggccccccgggtgattgtcatcagccgctccctgacagcgcgctttcgccgtgggctggacaatgactacgtggagtcaccatgctgagtcgcccttctcagcgctccatcaacgcacacctgctatcgtggaacagcctagaaaccaagggactccaccaccaagtcacttcccctgctcgtgcagaggcacgggatgagtctgggtgacctctgcgccatgcgtgcgagacacgtgtgcgtttactgttatgtcggtcatatgtctgtacgtgtcgtgggccaacctcgttctgcctccagctttcctggttagcgcaacgcggctccacgaccacacgcacttcagggtggaagctggaagctgagacacaggttaggtggcgcgaggctgccctgcgctccgctttgctttgggattaatttattctgcatctgctgagaggggcaccccagccatatcttacactttggtaaagcagaaaaccaggaaaattttcttaaaatatccacaatattccttgagtgagtcagaatctatagccggttagtgatggtttcagacagaatcgtgttcgtgtctgttttgctcgattcttttcctaagttaaataaatgcaagcctctg

SEQ ID NO: 1002 - protein, 226 aa, Homo sapiens
MTVQRLVAAAVLVALVSLILNNVAAFTSNWVCQTLEDGRRRSVGLWRSCWLVDRTRGGPSPGARAGQVDAHDCEALGWGSEAAGFQESRGTVKLQFDMMRACNLVATAALTAGQLTFLLGLVGLPLLSPDAPCWEEAMAAAFQLASFVLVIGLVTFYRIGPYTNLSWSCYLNIGACLLATLAAAMLIWNILHKREDCMAPRVIVISRSLTARFRRGLDNDYVESPC

SEQ ID NO: 1003 - DNA, 1848 bp, Homo sapiens
aaaaacaaccatttcctctctgctgagagccagggaaggcgagctctgcgcacacgggcgtccctgcagcagccactctgctttccaggaccggccaactgccctggaggcatccacacaggggcccaggcagcacagaggagctgtgaacccgctccacaccggccaccctgcccggagcctggcactcacagcaggccggtgctaaggagtgtggcgcgggctcgactcccactgctgccggcctcccgagtgactctgttttccactgctgcaggcgagaagaggcacgcgcggcacaggccggcctccgcttcccgggaagacggcgcactcctggccctgggttcttgctgctgcccaccctctgctccctgggatgggccccgaggcgagcagcttcagcacaggcctggccctgctccaggtgcaggaaggaggataaggccgggccgagaggcggcacacctggaccatcccatgggcctccgcccgcgccgccccgaggatgagtggtgatgtcctctagccacccctagcagcgtcggctctccctggacgtgcggccgcggactgggacttggctttctccggataagcggcggcaccggcgtcagcgatgaccgtgcagagactcgtggccgcggccgtgctggtggccctggtctcactcatcctcaacaacgtggcggccttcacctccaactgggtgtgccagacgctggaggatgggcgcaggcgcagcgtggggctgtggaggtcctgctggctggtggacaggacccggggagggccgagccctggggccagagccggccaggtggacgcacatgactgtgaggcgctgggctggggctccgaggcagccggcttccaggagtcccgaggcaccgtcaaactgcagttcgacatgatgcgcgcctgcaacctggtggccacggccgcgctcaccgcaggccagctcaccttcctcctggggctggtgggcctgcccctgctgtcacccgacgccccgtgctgggaggaggccatggccgctgcattccaactggcgagttttgtcctggtcatcgggctcgtgactttctacagaattcatacaccaacctgtcctggtcctgctacctgaacattggcgcctgccttctggccacgctggcggcagccatgctcatctggaacattctccacaagagggaggactgcatggccccccgggtgattgtcatcagccgctccctgacagcgcgctttcgccgtgggctggacaatgactacgtggagtcaccatgctgagtcgcccttctcagcgctccatcaacgcacacctgctatcgtggaacagcctagaaaccaagggactccaccaccaagtcacttcccctgctcgtgcagaggcacgggatgagtctgggtgacctctgcgccatgcgtgcgagacacgtgtgcgtttactgttatgtcggtcatatgtctgtacgtgtcgtgggccaacctcgttctgcctccagctttcctggttagcgcaacgcggctccacgaccacacgcacttcagggtggaagctggaagctgagacacaggttaggtggcgcgaggctgccctgcgctccgctttgctttgggattaatttattctgcatctgctgagaggggcaccccagccatatcttacactttggtaaagcagaaaaccaggaaaattttcttaaaatatccacaatattccttgagtgagtcagaatctatagccggttagtgatggtttcagacagaatcgtgttcgtgtctgttttgctcgattcttttcctaagttaaataaatgcaagcctctgaactctgtctat

SEQ ID NO: 1004 - protein, 169 aa, Homo sapiens
MTVQRLVAAAVLVALVSLILNNVAAFTSNWVCQTLEDGRRRSVGLWRSCWLVDRTRGGPSPGARAGQVDAHDCEALGWGSEAAGFQESRGTVKLQFDMMRACNLVATAALTAGQLTFLLGLVGLPLLSPDAPCWEEAMAAAFQLASFVLVIGLVTFYRIHTPTCPGPAT

SEQ ID NO: 1005 - DNA, 2885 bp, Homo sapiens
acatctggctgggcttcgctccttgcgcgtctgtcccactttctccctctcttcctttactttcgagaaaccgcgcttccgcttctggtcgcagagacctcggagaccgcgccggggagacggaggtgctgtgggtgggggggacctgtggctgctcgtaccgccccccaccctcctcttctgcactgccgtcctccggaagaccttttcccctgctctgtttccttcaccgagtctgtgcatcgccccggacctggccgggaggaggcttggccggcgggagatgctctacgggcggcgcgggaggagcggccggcgggacggagggcccggcaggaagatgggctcccgtggacagggactcttgctggcgtactgcctgctccttgcctttgcctctggcctggtcctgagtcgtgtgccccatgtccagggggaacagcaggagtgggaggggactgaggagctgccgtcgcctccggaccatgccgagagggctgaagaacaacatgaaaaatacaggcccagtcaggaccaggggctccctgcttcccggtgcttgcgctgctgtgaccccggtacctccatgtacccggcgaccgccgtgccccagatcaacatcactatcttgaaaggggagaagggtgaccgcggagatcgaggcctccaagggaaatatggcaaaacaggctcagcaggggccaggggccacactggacccaaagggcagaagggctccatgggggcccctggggagcggtgcaagagccactacgccgccttttcggtgggccggaagaagcccatgcacagcaaccactactaccagacggtgatcttcgacacggagttcgtgaacctctacgaccacttcaacatgttcaccggcaagttctactgctacgtgcccggcctctacttcttcagcctcaacgtgcacacctggaaccagaaggagacctacctgcacatcatgaagaacgaggaggaggtggtgatcttgttcgcgcaggtgggcgaccgcagcatcatgcaaagccagagcctgatgctggagctgcgagagcaggaccaggtgtgggtacgcctctacaagggcgaacgtgagaacgccatcttcagcgaggagctggacacctacatcaccttcagtggctacctggtcaagcacgccaccgagccctagctggccggccacctcctttcctctcgccaccttccacccctgcgctgtgctgaccccaccgcctcttccccgatccctggactccgactccctggctttggcattcagtgagacgccctgcacacacagaaagccaaagcgatcggtgctcccagatcccgcagcctctggagagagctgacggcagatgaaatcaccagggcggggcacccgcgagaaccctctgggaccttccgcggccctctctgcacacatcctcaagtgaccccgcacggcgagacgcgggtggcggcagggcgtcccagggtgcggcaccgcggctccagtccttggaaataattaggcaaattctaaaggtctcaaaaggagcaaagtaaaccgtggaggacaaagaaaagggttgttatttttgtctttccagccagcctgctggctcccaagagagaggccttttcagttgagactctgcttaagagaagatccaaagttaaagctctggggtcaggggaggggccgggggcaggaaactacctctggcttaattcttttaagccacgtaggaactttcttgagggataggtggaccctgacatccctgtggccttgcccaagggctctgctggtctttctgagtcacagctgcgaggtgatgggggctggggccccaggcgtcagcctcccagagggacagctgagccccctgccttggctccaggttggtagaagcagccgaagggctcctgacagtggccagggacccctgggtcccccaggcctgcagatgtttctatgaggggcagagctcctggtacatccatgtgtggctctgctccacccctgtgccaccccagagccctggggggtggtctccatgcctgccaccctggcatcggctttctgtgccgcctcccacacaaatcagccccagaaggccccggggccttggcttctgttttttataaaacacctcaagcagcactgcagtctcccatctcctcgtgggctaagcatcaccgcttccacgtgtgttgtgttggttggcagcaaggctgatccagaccccttctgcccccactgccctcatccaggcctctgaccagtagcctgagaggggctttttctaggcttcagagcaggggagagctggaaggggctagaaagctcccgcttgtctgtttctcaggctcctgtgagcctcagtcctgagaccagagtcaagaggaagtacacgtcccaatcacccgtgtcaggattcactctcaggagctgggtggcaggagaggcaatagcccctgtggcaattgcaggaccagctggagcagggttgcggtgtctccacggtgctctcgccctgcccatggccaccccagactctgatctccaggaaccccatagcccctctccacctcaccccatgttgatgcccagggtcactcttgctacccgctgggcccccaaacccccgctgcctctcttccttccccccatcccccacctggttttgactaatcctgcttccctctctgggcctggctgccgggatctggggtccctaagtccctctctttaaagaacttctgcgggtcagactctgaagccgagttgctgtgggcgtgcccggaagcagagcgccacactcgctgcttaagctcccccagctctttccagaaaacattaaactcagaattgtgttttcagc

SEQ ID NO: 1006 - protein, 281 aa, Homo sapiens
MGSRGQGLLLAYCLLLAFASGLVLSRVPHVQGEQQEWEGTEELPSPPDHAERAEEQHEKYRPSQDQGLPASRCLRCCDPGTSMYPATAVPQINITILKGEKGDRGDRGLQGKYGKTGSAGARGHTGPKGQKGSMGAPGERCKSHYAAFSVGRKKPMHSNHYYQTVIFDTEFVNLYDHFNMFTGKFYCYVPGLYFFSLNVHTWNQKETYLHIMKNEEEVVILFAQVGDRSIMQSQSLMLELREQDQVWVRLYKGERENAIFSEELDTYITFSGYLVKHATEP

SEQ ID NO: 1007 - DNA, 2716 bp, Homo sapiens
acatctggctgggcttcgctccttgcgcgtctgtcccactttctccctctcttcctttactttcgagaaaccgcgcttccgcttctggtcgcagagacctcggagaccgcgccggggagacggaggtgctgtgggtgggggggacctgtggctgctcgtaccgccccccaccctcctcttctgcactgccgtcctccggaagaccttttcccctgctctgtttccttcaccgagtctgtgcatcgccccggacctggccgggaggaggcttggccggcgggagatgctctacgggcggcgcgggaggagcggccggcgggacggagggctgaagaacaacatgaaaaatacaggcccagtcaggaccaggggctccctgcttcccggtgcttgcgctgctgtgaccccggtacctccatgtacccggcgaccgccgtgccccagatcaacatcactatcttgaaaggggagaagggtgaccgcggagatcgaggcctccaagggaaatatggcaaaacaggctcagcaggggccaggggccacactggacccaaagggcagaagggctccatgggggcccctggggagcggtgcaagagccactacgccgccttttcggtgggccggaagaagcccatgcacagcaaccactactaccagacggtgatcttcgacacggagttcgtgaacctctacgaccacttcaacatgttcaccggcaagttctactgctacgtgcccggcctctacttcttcagcctcaacgtgcacacctggaaccagaaggagacctacctgcacatcatgaagaacgaggaggaggtggtgatcttgttcgcgcaggtgggcgaccgcagcatcatgcaaagccagagcctgatgctggagctgcgagagcaggaccaggtgtgggtacgcctctacaagggcgaacgtgagaacgccatcttcagcgaggagctggacacctacatcaccttcagtggctacctggtcaagcacgccaccgagccctagctggccggccacctcctttcctctcgccaccttccacccctgcgctgtgctgaccccaccgcctcttccccgatccctggactccgactccctggctttggcattcagtgagacgccctgcacacacagaaagccaaagcgatcggtgctcccagatcccgcagcctctggagagagctgacggcagatgaaatcaccagggcggggcacccgcgagaaccctctgggaccttccgcggccctctctgcacacatcctcaagtgaccccgcacggcgagacgcgggtggcggcagggcgtcccagggtgcggcaccgcggctccagtccttggaaataattaggcaaattctaaaggtctcaaaaggagcaaagtaaaccgtggaggacaaagaaaagggttgttatttttgtctttccagccagcctgctggctcccaagagagaggccttttcagttgagactctgcttaagagaagatccaaagttaaagctctggggtcaggggaggggccgggggcaggaaactacctctggcttaattcttttaagccacgtaggaactttcttgagggataggtggaccctgacatccctgtggccttgcccaagggctctgctggtctttctgagtcacagctgcgaggtgatgggggctggggccccaggcgtcagcctcccagagggacagctgagccccctgccttggctccaggttggtagaagcagccgaagggctcctgacagtggccagggacccctgggtcccccaggcctgcagatgtttctatgaggggcagagctcctggtacatccatgtgtggctctgctccacccctgtgccaccccagagccctggggggtggtctccatgcctgccaccctggcatcggctttctgtgccgcctcccacacaaatcagccccagaaggccccggggccttggcttctgttttttataaaacacctcaagcagcactgcagtctcccatctcctcgtgggctaagcatcaccgcttccacgtgtgttgtgttggttggcagcaaggctgatccagaccccttctgcccccactgccctcatccaggcctctgaccagtagcctgagaggggctttttctaggcttcagagcaggggagagctggaaggggctagaaagctcccgcttgtctgtttctcaggctcctgtgagcctcagtcctgagaccagagtcaagaggaagtacacgtcccaatcacccgtgtcaggattcactctcaggagctgggtggcaggagaggcaatagcccctgtggcaattgcaggaccagctggagcagggttgcggtgtctccacggtgctctcgccctgcccatggccaccccagactctgatctccaggaaccccatagcccctctccacctcaccccatgttgatgcccagggtcactcttgctacccgctgggcccccaaacccccgctgcctctcttccttccccccatcccccacctggttttgactaatcctgcttccctctctgggcctggctgccgggatctggggtccctaagtccctctctttaaagaacttctgcgggtcagactctgaagccgagttgctgtgggcgtgcccggaagcagagcgccacactcgctgcttaagctcccccagctctttccagaaaacattaaactcagaattgtgttttcagc

SEQ ID NO: 1008 - protein, 199 aa, Homo sapiens
MYPATAVPQINITILKGEKGDRGDRGLQGKYGKTGSAGARGHTGPKGQKGSMGAPGERCKSHYAAFSVGRKKPMHSNHYYQTVIFDTEFVNLYDHFNMFTGKFYCYVPGLYFFSLNVHTWNQKETYLHIMKNEEEVVILFAQVGDRSIMQSQSLMLELREQDQVWVRLYKGERENAIFSEELDTYITFSGYLVKHATEP

SEQ ID NO: 1009 - DNA, 2703 bp, Homo sapiens
ctttgtttccactgggacggaatcggagctctggaggctgggctggccaagcgccccgaaggcccgatgcctgacggctcatgcggcctccttgtttgcagggcctgggcaaaaatttacactgagtcccactcttcgctccagggcccggcaggaagatgggctcccgtggacagggactcttgctggcgtactgcctgctccttgcctttgcctctggcctggtcctgagtcgtgtgccccatgtccagggggaacagcaggagtgggaggggactgaggagctgccgtcgcctccggaccatgccgagagggctgaagaacaacatgaaaaatacaggcccagtcaggaccaggggctccctgcttcccggtgcttgcgctgctgtgaccccggtacctccatgtacccggcgaccgccgtgccccagatcaacatcactatcttgaaaggggagaagggtgaccgcggagatcgaggcctccaagggaaatatggcaaaacaggctcagcaggggccaggggccacactggacccaaagggcagaagggctccatgggggcccctggggagcggtgcaagagccactacgccgccttttcggtgggccggaagaagcccatgcacagcaaccactactaccagacggtgatcttcgacacggagttcgtgaacctctacgaccacttcaacatgttcaccggcaagttctactgctacgtgcccggcctctacttcttcagcctcaacgtgcacacctggaaccagaaggagacctacctgcacatcatgaagaacgaggaggaggtggtgatcttgttcgcgcaggtgggcgaccgcagcatcatgcaaagccagagcctgatgctggagctgcgagagcaggaccaggtgtgggtacgcctctacaagggcgaacgtgagaacgccatcttcagcgaggagctggacacctacatcaccttcagtggctacctggtcaagcacgccaccgagccctagctggccggccacctcctttcctctcgccaccttccacccctgcgctgtgctgaccccaccgcctcttccccgatccctggactccgactccctggctttggcattcagtgagacgccctgcacacacagaaagccaaagcgatcggtgctcccagatcccgcagcctctggagagagctgacggcagatgaaatcaccagggcggggcacccgcgagaaccctctgggaccttccgcggccctctctgcacacatcctcaagtgaccccgcacggcgagacgcgggtggcggcagggcgtcccagggtgcggcaccgcggctccagtccttggaaataattaggcaaattctaaaggtctcaaaaggagcaaagtaaaccgtggaggacaaagaaaagggttgttatttttgtctttccagccagcctgctggctcccaagagagaggccttttcagttgagactctgcttaagagaagatccaaagttaaagctctggggtcaggggaggggccgggggcaggaaactacctctggcttaattcttttaagccacgtaggaactttcttgagggataggtggaccctgacatccctgtggccttgcccaagggctctgctggtctttctgagtcacagctgcgaggtgatgggggctggggccccaggcgtcagcctcccagagggacagctgagccccctgccttggctccaggttggtagaagcagccgaagggctcctgacagtggccagggacccctgggtcccccaggcctgcagatgtttctatgaggggcagagctcctggtacatccatgtgtggctctgctccacccctgtgccaccccagagccctggggggtggtctccatgcctgccaccctggcatcggctttctgtgccgcctcccacacaaatcagccccagaaggccccggggccttggcttctgttttttataaaacacctcaagcagcactgcagtctcccatctcctcgtgggctaagcatcaccgcttccacgtgtgttgtgttggttggcagcaaggctgatccagaccccttctgcccccactgccctcatccaggcctctgaccagtagcctgagaggggctttttctaggcttcagagcaggggagagctggaaggggctagaaagctcccgcttgtctgtttctcaggctcctgtgagcctcagtcctgagaccagagtcaagaggaagtacacgtcccaatcacccgtgtcaggattcactctcaggagctgggtggcaggagaggcaatagcccctgtggcaattgcaggaccagctggagcagggttgcggtgtctccacggtgctctcgccctgcccatggccaccccagactctgatctccaggaaccccatagcccctctccacctcaccccatgttgatgcccagggtcactcttgctacccgctgggcccccaaacccccgctgcctctcttccttccccccatcccccacctggttttgactaatcctgcttccctctctgggcctggctgccgggatctggggtccctaagtccctctctttaaagaacttctgcgggtcagactctgaagccgagttgctgtgggcgtgcccggaagcagagcgccacactcgctgcttaagctcccccagctctttccagaaaacattaaactcagaattgtgttttcagc

SEQ ID NO: 1010 - protein, 281 aa, Homo sapiens; identical to SEQ ID NO: 1006

SEQ ID NO: 1011 - DNA, 1822 bp, Homo sapiens
agtggccagagcgactcttcagggaggtggcaggaaaggcttggaacagctgccggaggtgacggagcggcggccccgcccggtgcgctggaggtcgaagcttccaggtagcggcccgcagagcctgacccaggctctggacatcctgagcccaagtcccccacactcagtgcagtgatgagtgcggaagtgaaggtgacagggcagaaccaggagcaatttctgctcctagccaagtcggccaagggggcagcgctggccacactcatccatcaggtgctggaggcccctggtgtctacgtgtttggagaactgctggacatgcccaatgttagagagctggctgagagtgactttgcctctaccttccggctgctcacagtgtttgcttatgggacatacgctgactacttagctgaagcccggaatcttcctccactaacagaggctcagaagaataagcttcgacacctctcagttgtcaccctggctgctaaagtaaagtgtatcccatatgcagtgttgctggaggctcttgccctgcgtaatgtgcggcagctggaagaccttgtgattgaggctgtgtatgctgacgtgcttcgtggctccctggaccagcgcaaccagcggctcgaggttgactacagcatcgggcgggacatccagcgccaggacctcagtgccattgcccgaaccctgcaggaatggtgtgtgggctgtgaggtcgtgctgtcaggcattgaggagcaggtgagccgtgccaaccaacacaaggagcagcagctgggcctgaagcagcagattgagagtgaggttgccaaccttaaaaaaaccattaaagttacgacggcagcagcagccgcagccacatctcaggaccctgagcaacacctgactgagctgagggaaccagctcctggcaccaaccagcgccagcccagcaagaaagcctcaaagggcaaggggctccgagggagcgccaagatttggtccaagtcgaattgaaaggactgtcgtttcctccctggggatgtggggtcccagctgcctgcctgcctcttaggagtcctcagagagccttctgtgcccctggccagctgataatcctaggttcatgacccttcacctcccctaaccccaaacatagatcacaccttctctagggaggaggcaaatgtaggtcatgtttttgttggtactttctgttttttgtgacttcatgtgttccattgctccccgctgccatgctctctcccttgtttccttaagagctcagcatctgtccctgttcattacatgtcattgagtaggtgggtagccctgatgggggtcgctctgtctggagcataacccacaggcgttttttctgccaccccatccctgcatgcctgatccccagttcctataccctacccctgacctattgagcagcctctgaagagccatagggcccccacctttactcacaccctgagaattctgggagccagtctgccatgccaggagtcactggacatgttcatcctagaatcctgtcacactacagtcatttcttttcctctctctggcccttgggtcctgggaatgctgctgcttcaaccccagagcctaagaatggcagccgtttcttaacatgttgagagatgattctttcttggccctggccatctcgggaagcttgatggcaatcctggaagggtttaatctccttttgtgagtttggtggggaagggaagggtatatagattgtattaaaaaaaaaaaggtatatatgcatatatctatatataatatgacgcagaaataaatctatgagaaatct

SEQ ID NO: 1012 - protein, 275 aa, Homo sapiens
MSAEVKVTGQNQEQFLLLAKSAKGAALATLIHQVLEAPGVYVFGELLDMPNVRELAESDFASTFRLLTVFAYGTYADYLAEARNLPPLTEAQKNKLRHLSVVTLAAKVKCIPYAVLLEALALRNVRQLEDLVIEAVYADVLRGSLDQRNQRLEVDYSIGRDIQRQDLSAIARTLQEWCVGCEVVLSGIEEQVSRANQHKEQQLGLKQQIESEVANLKKTIKVTTAAAAAATSQDPEQHLTELREPAPGTNQRQPSKKASKGKGLRGSAKIWSKSN

SEQ ID NO: 1013 - DNA, 3484 bp, Homo sapiens
accctcaacccccatccccgcctgacgggagctagccctcagtccgcccgagctgtggttgtgggcgccggacaagtccaaggcgcctcctcccaatatggacagccgctacaacagcactgcgggcatcggggacttgaaccagctgagcgctgccatcccggccacgcgggtggaggtgtccgtgtcctgcagaaatcttcttgacagagacacattttctaaatctgatccaatttgtgtcttatatgtacaaggagttggaaataaagaatggagagagtttggaagaactgaagtaattgataatactttaaatcctgattttgtaagaaagtttattctggactacttttttgaagaaagagagaatcttcgttttgacttgtatgatgttgattcaaagagccccaacttatccaaacatgactttctgggacaagtgttttgtacattgggagagatcgttggttcacagggaagtcgcctggaaaaaccaatagtaggaattccagggaagaaatgtggtacaatcatacttacagcagaggaattaaactgttgcagggatgccgttttgatgcaattttgtgcgaacaaattggacaagaaggacttctttggaaaatcagatcctttccttgtattttatcgaagtaatgaagatggcagttttacaatttgtcacaagacagaagttgtcaaaaacactctaaatccagtatggcaagcattcaagatctcagtcagagcattatgtaatggagactatgacagaacaatcaaagtagaggtgtatgactgggaccgagatggaagtcatgatttcattggagaatttacaacaagctatagggaactttctagagggcagtcacaattcaacgtatatgaggtggtgaatcccaaaaagaaaggaaaaaagaaaaaatatactaattctggaacagtaactttactctctttcttggtagaaacagaagtttcattccttgactacattaagggagggacgcaaatcaatttcacagtggctattgattttacagcatcaaacggcaaccctgctcagcccacttccctccactacatgaatccttaccaactgaatgcctatggtatggcactaaaagcagtgggagaaattgttcaagattatgacagtgataaaatgtttccagctctaggatttggtgcaaaactgcctccagatggaaggatatctcacgaatttgctttgaatgggaatcctcaaaacccctactgtgatggcattgagggggtcatggaggcttattacaggagtctgaaatctgtacaactatatgggcccaccaactttgctcctgtaattaatcatgtagcaagatatgcttcttctgtaaaggatggctcccagtattttgtgcttctgattgttacagatggtgttatctcagatatggcccagactaaggagtccatagttaatgcctcaaaacttccaatgtcaataattatagtaggtgttggaccagcagaatttgatgcaatggtcgaattggatggagatgatgtaagagtctcctctagaggaaaatatgctgaaagagacattgtgcagtttgtgccattcagggattatattgacagaagtggaaaccacatactgagcatggctagattggctaaagatgtcctagctgagatccctgagcagtttctctcctatatgagagcccgaggaatcaagccatcacctgcgcctcccccatacaccccacctacacatgtgttacagactcaaatatgactgtgctctgaaatgctaatgtcaactacaaatcaaaagtgctgagttaatgctttgtgcctggtgctctgtaatgaaccaggcaatgagatagttttctcagtttggtttcagcagttaatgtgctttcttggatccaaatttaaatatcttcctaaaccaaaactgtaaatatggttgttgcatgagcaacagaaaaaattgtttaaatgcttgaagcaaagtatggatgtcttctctaaatctttctttctttttttttttaacagaaacagctaatttccaatgtattgttgggaaaaagcacaaactgtgtttttaactcaaatattgtcttcgactgctatgtgtataggaaagcagtctctgtatcaatgtttacatgttactactttttaaatttcaatacttttataactgttcttaaaaataagagttttaaatactgaatcctttgtcttctaaattgcaatagctataatcacaagagcaatatctctttgaatgactgtctggacaaacacaattgcaaataagggaagggaaaaatgcttttctatttttcagtaactggattgtcttaagaaactacatctgcttaataaacaatttctcagcaatgtttgctgggtatgggagtttaagcccggcagatgtgtctcctggttgaacatgcatttttcatggagtttgggttctaaatttagactgcagttggtttgtattttgtaacactaagtagaaattataaaaagtcaaacattgtgatctataaatgcacagaaaatactttgtaaaaagtagcatccttatataataatgctatttagaaagactgaaaccaagactatttaactgtgaactatgtagcagatgttttaaactttttattccattatatcttgtctagatattttaattcaaagggatactggctctcttgatcggaatttcttgttatcaccattccacgttgccacacaaggtgcacaggctggaagtcttttgtgaaattcccagttaaatatatacaactatgtgacttagtgcacaacacatttgtgaaataacctactcctatatactgacctgcctgtccacgaataattgtaaagggtttttgcatgtacagtttttacaagaattacagttttgtgaagttgtgtctaaattaaagcatttctttagaacaaatggccttaaattctcacggaattcctggaaatgattgtgaattgccttcaaataatagaaaagtgtatttatttgtgtgtgtgtgtgtgtcaaaaatgtaactgctttataatattttttccttacctatatattctatttaatacttggtttatttctactgtacattgttttctttgtcccaagttgacctagggtgacttttataagcatgaaactattttactggaaagaaaaatatatacatccacatatctaacagtatcaatgttatataactatgtaataattgttgatttttaattatgtattaaaatctttaaatcataactatttgctttgtacgtttcatgtatgaatgacaatagtttgatgatttcctttactgatcttaaatatttatgccactacagtgtattacctacagatttttaaatttagctttatttatcaacccaaaaaacaaataaataagatcaatattcttttcttcttgtc

SEQ ID NO: 1014 - protein, 564 aa, Homo sapiens
MDSRYNSTAGIGDLNQLSAAIPATRVEVSVSCRNLLDRDTFSKSDPICVLYVQGVGNKEWREFGRTEVIDNTLNPDFVRKFILDYFFEERENLRFDLYDVDSKSPNLSKHDFLGQVFCTLGEIVGSQGSRLEKPIVGIPGKKCGTIILTAEELNCCRDAVLMQFCANKLDKKDFFGKSDPFLVFYRSNEDGSFTICHKTEVVKNTLNPVWQAFKISVRALCNGDYDRTIKVEVYDWDRDGSHDFIGEFTTSYRELSRGQSQFNVYEVVNPKKKGKKKKYTNSGTVTLLSFLVETEVSFLDYIKGGTQINFTVAIDFTASNGNPAQPTSLHYMNPYQLNAYGMALKAVGEIVQDYDSDKMFPALGFGAKLPPDGRISHEFALNGNPQNPYCDGIEGVMEAYYRSLKSVQLYGPTNFAPVINHVARYASSVKDGSQYFVLLIVTDGVISDMAQTKESIVNASKLPMSIIIVGVGPAEFDAMVELDGDDVRVSSRGKYAERDIVQFVPFRDYIDRSGNHILSMARLAKDVLAEIPEQFLSYMRARGIKPSPAPPPYTPPTHVLQTQI

SEQ ID NO: 1015 - DNA, 1757 bp, Homo sapiens
ggtgatggcttcacagggagatacatgagtcaacatttatcgaatgatggatgcactttaagtgcagttcattatatatgttatacctcactgaagtggaaacaaattggataaatcttcttgacagagacacattttctaaatctgatccaatttgtgtcttatatgtacaaggagttggaaataaagaatggagagagtttggaagaactgaagtaattgataatactttaaatcctgattttgtaagaaagtttattctggactacttttttgaagaaagagagaatcttcgttttgacttgtatgatgttgattcaaagagccccaacttatccaaacatgactttctgggacaagtgttttgtacattgggagagatcgttggttcacagggaagtcgcctggaaaaaccaatagtaggaattccagggaagaaatgtggtacaatcatacttacagcagaggaattaaactgttgcagggatgccgttttgatgcaattttgtgcgaacaaattggacaagaaggacttctttggaaaatcagatcctttccttgtattttatcgaagtaatgaagatggcagttttacaatttgtcacaagacagaagttgtcaaaaacactctaaatccagtatggcaagcattcaagatctcagtcagagcattatgtaatggagactatgacagaacaatcaaagtagaggtgtatgactgggaccgagatggaagtcatgatttcattggagaatttacaacaagctatagggaactttctagagggcagtcacaattcaacgtatatgaggtggtgaatcccaaaaagaaaggaaaaaagaaaaaatatactaattctggaacagtaactttactctctttcttggtagaaacagaagtttcattccttgactacattaagggagggacgcaaatcaatttcacagtggctattgattttacagcatcaaacggcaaccctgctcagcccacttccctccactacatgaatccttaccaactgaatgcctatggtatggcactaaaagcagtgggagaaattgttcaagattatgacagtgataaaatgtttccagctctaggatttggtgcaaaactgcctccagatggaaggatatctcacgaatttgctttgaatgggaatcctcaaaacccctactgtgatggcattgagggggtcatggaggcttattacaggagtctgaaatctgtacaactatatgggcccaccaactttgctcctgtaattaatcatgtagcaagatatgcttcttctgtaaaggatggctcccagtattttgtgcttctgattgttacagatggtgttatctcagatatggcccagactaaggagtccatagttaatgcctcaaaacttccaatgtcaataattatagtaggtgttggaccagcagaatttgatgcaatggtcgaattggatggagatgatgtaagagtctcctctagaggaaaatatgctgaaagagacattgtgcagtttgtgccattcagggattatattgacagaagtggaaaccacatactgagcatggctagattggctaaagatgtcctagctgagatccctgagcagtttctctcctatatgagagcccgaggaatcaagccatcacctgcgcctcccccatacaccccacctacacatgtgttacagactcaaatatgactgtgctctgaaatgctaatgtcaactacaaatcaaaagtgctgagtt

SEQ ID NO: 1016 - protein, 268 aa, Homo sapiens
MHFKCSSLYMLYLTEVETNWINLLDRDTFSKSDPICVLYVQGVGNKEWREFGRTEVIDNTLNPDFVRKFILDYFFEERENLRFDLYDVDSKSPNLSKHDFLGQVFCTLGEIVGSQGSRLEKPIVGIPGKKCGTIILTAEELNCCRDAVLMQFCANKLDKKDFFGKSDPFLVFYRSNEDGSFTICHKTEVVKNTLNPVWQAFKISVRALCNGDYDRTIKVEVYDWDRDGSHDFIGEFTTSYRELSRGQSQFNVYEVVNPKKKGKKKKYT

SEQ ID NO: 1017 - DNA, 3659 bp, Homo sapiens
agtgctggttggagggacgaggggggtgcggagccagccaggccgccctcccgttctcacagcagccgagcagagcgcagagcgggctgccatggcgctggccaggcctgggaccccggacccccaggccctggcctctgtcctgctactgctgctctgggcccctgccctttccctcctggctgggacggtgccttcagagccccccagtgcctgtgcctcagacccgtgcgctccagggaccgagtgccaggctaccgagagtggtggctatacctgtgggcccatggagccccggggctgtgccacccagccatgccaccacggcgctctgtgtgtgccccagggtccagatcccaccggcttccgctgctactgcgtgccgggtttccagggcccacgctgcgagctggacatcgatgagtgtgcatcccggccgtgccaccatggggccacctgccgcaacctggccgatcgctacgagtgccattgcccccttggctatgcaggcgtgacctgcgagatggaggtggacgagtgcgcctcagcgccctgcctgcacgggggctcgtgcctggacggcgtgggctccttccgctgtgtgtgcgcgccaggctacgggggcacccgttgccagctggacctcgacgagtgccagagccagccgtgcgcacatgggggcacgtgccacgacctggtcaacgggttccggtgcgactgcgcgggcaccggctacgagggcacgcactgcgagcgggaggtgctggagtgcgcatcggcgccctgcgagcacaacgcgtcctgcctcgagggcctcgggagcttccgctgcctctgttggccaggctacagcggcgagctgtgcgaggtggacgaggacgagtgtgcatcgagcccctgccagcatgggggccgatgcctgcagcgctctgacccggccctctacgggggtgtccaggccgccttccctggcgccttcagcttccgccatgctgcgggtttcctgtgccactgccctcctggctttgagggagccgactgcggtgtggaggtggacgagtgtgcctcacggccatgcctcaacggaggccactgccaggacctgcccaatggcttccagtgtcactgcccagatggctacgcagggccgacatgtgaggaagatgtggatgaatgcctgtcggatccctgcctgcacggcggaacctgcagtgacactgtggcaggctatatctgcaggtgcccagagacctggggtgggcgcgactgttctgtgcagctcactggctgccagggccacacctgcccgctggctgccacctgcatccctatcttcgagtctggggtccacagttacgtctgccactgcccacctggtacccatggaccgttctgtggccagaataccaccttctctgtgatggctgggagccccattcaggcatcagtgccagctggtggccccctgggtctggcactgaggtttcgcaccacactgcccgctgggaccttggccactcgcaatgacaccaaggaaagcttggagctggcattggtggcagccacacttcaggccacactctggagctacagcaccactgtgcttgtcctgagactgccggacctggccctaaacgatggccattggcaccaggtggaggttgtgctccatctagcgaccctggagctacggctctggcatgagggctgccctgcccggctctgtgtggcctctggtcctgtggccctggcttccacggcttcggcaactccgctgcctgccgggatctcctctgcccagctgggggacgcgacctttgcaggctgcctccaggacgtgcgtgtggatggccacctcctgctgcctgaggatctcggtgagaacgtcctcctgggctgtgagcgccgagagcagtgccggcctctgccttgtgtccacggagggtcctgtgtggatctgtggactcatttccgttgcgactgtgcccggccccatagaggtcccacgtgcgctgatgagattcctgctgccacctttggcttgggaggcgccccaagctctgcctcctttctgctccaagagctgccaggtcccaacctcacagtgtctttccttctccgcactcgggagtccgctggcctgttgctccagtttgccaatgactccgcagctggcctaacagtattcctgagtgagggtcggatccgggctgaggtgccgggcagtcctgctgtagtgctccctgggcgctgggatgatgggctccgtcacctggtgatgctcagcttcgggcctgaccagctgcaggacctggggcagcacgtgcacgtgggtgggaggctccttgctgccgacagccagccctggggtgggcccttccgaggctgcctccaggacctgcgactcgatggctgccacctccccttctttcctctgccactggataactcaagccagcccagcgagctcggcggcaggcagtcctggaacctcactgcgggctgcgtctccgaggacatgtgcagtcctgacccctgtttcaatggtgggacttgcctcgtcacctggaatgacttccactgtacctgccctgccaatttcacggggcctacgtgtgcccagcagctgtggtgtcccggccagccctgtctcccacctgccacgtgtgaggaggtccctgatggctttgtgtgtgtggcggaggccacgttccgcgagggtccccccgccgcgttcagcgggcacaacgcgtcgtcagggcgcttgctcggcggcctgtcgctggcctttcgcacgcgcgactccgaggcctggctgctgcgtgccgcggcgggcgccctggaaggcgtgtggctggcggtgcgcaatggctcgctggcggggggcgtgcgcggaggccatggcctgcccggcgctgtgctgcccataccggggccgcgcgtggccgatggtgcctggcaccgcgtgcgtctggccatggagcgcccggcggccaccacctcgcgctggctgctgtggctggatggtgccgccaccccggtggcgctgcgcggcctggccagtgacctgggcttcctgcagggcccgggtgctgtgcgcatcctgctggctgagaacttcaccggctgcttgggccgcgtggcgctgggcggcctgcccctgcccttggcgcggccccggcccggcgcggcccctggcgcccgagagcacttcgcgtcttggcctgggacgccggccccgatcctcggctgccgcggcgcgcccgtgtgtgcgccctcgccctgtctgcacgacggtgcctgccgtgacctcttcgacgcctttgcctgcgcctgcggcccggggtgggaaggcccgcgctgcgaagcccacgtcgacccctgtcactccgccccctgcgcccgtggccgctgtcacacgcaccccgacggccgcttcgagtgccgctgcccgcctggcttcgggggcccgcgctgcaggtgggatggctgggcaggggggtgggctgcgaatgccccctggggctatggtggggcagagaagtctgccaggtctgtggatgagtcgcttcccttccctggtcctcatgtccttatctgtgacatgaggaggacagtttaatttgataaatttcctgataaaatacagatcaaaacac

SEQ ID NO: 1018 - protein, 1176 aa, Homo sapiens
MALARPGTPDPQALASVLLLLLWAPALSLLAGTVPSEPPSACASDPCAPGTECQATESGGYTCGPMEPRGCATQPCHHGALCVPQGPDPTGFRCYCVPGFQGPRCELDIDECASRPCHHGATCRNLADRYECHCPLGYAGVTCEMEVDECASAPCLHGGSCLDGVGSFRCVCAPGYGGTRCQLDLDECQSQPCAHGGTCHDLVNGFRCDCAGTGYEGTHCEREVLECASAPCEHNASCLEGLGSFRCLCWPGYSGELCEVDEDECASSPCQHGGRCLQRSDPALYGGVQAAFPGAFSFRHAAGFLCHCPPGFEGADCGVEVDECASRPCLNGGHCQDLPNGFQCHCPDGYAGPTCEEDVDECLSDPCLHGGTCSDTVAGYICRCPETWGGRDCSVQLTGCQGHTCPLAATCIPIFESGVHSYVCHCPPGTHGPFCGQNTTFSVMAGSPIQASVPAGGPLGLALRFRTTLPAGTLATRNDTKESLELALVAATLQATLWSYSTTVLVLRLPDLALNDGHWHQVEVVLHLATLELRLWHEGCPARLCVASGPVALASTASATPLPAGISSAQLGDATFAGCLQDVRVDGHLLLPEDLGENVLLGCERREQCRPLPCVHGGSCVDLWTHFRCDCARPHRGPTCADEIPAATFGLGGAPSSASFLLQELPGPNLTVSFLLRTRESAGLLLQFANDSAAGLTVFLSEGRIRAEVPGSPAVVLPGRWDDGLRHLVMLSFGPDQLQDLGQHVHVGGRLLAADSQPWGGPFRGCLQDLRLDGCHLPFFPLPLDNSSQPSELGGRQSWNLTAGCVSEDMCSPDPCFNGGTCLVTWNDFHCTCPANFTGPTCAQQLWCPGQPCLPPATCEEVPDGFVCVAEATFREGPPAAFSGHNASSGRLLGGLSLAFRTRDSEAWLLRAAAGALEGVWLAVRNGSLAGGVRGGHGLPGAVLPIPGPRVADGAWHRVRLAMERPAATTSRWLLWLDGAATPVALRGLASDLGFLQGPGAVRILLAENFTGCLGRVALGGLPLPLARPRPGAAPGAREHFASWPGTPAPILGCRGAPVCAPSPCLHDGACRDLFDAFACACGPGWEGPRCEAHVDPCHSAPCARGRCHTHPDGRFECRCPPGFGGPRCRWDGWAGGWAANAPWGYGGAEKSARSVDESLPFPGPHVLICDMRRTV

SEQ ID NO: 1019 - DNA, 3947 bp, Homo sapiens
attcctgagcaggctccgaaggaggcagctgggccaggcagggagctctgcctcctccccacttccccagcctcagtgcccgcccaccactctcaacctgtctggagggcatggcaatggagccgggggctctgtggaccttcctgggccacctgtggctcctggcagggccgacatgtgaggaagatgtggatgaatgcctgtcggatccctgcctgcacggcggaacctgcagtgacactgtggcaggctatatctgcaggtgcccagagacctggggtgggcgcgactgttctgtgcagctcactggctgccagggccacacctgcccgctggctgccacctgcatccctatcttcgagtctggggtccacagttacgtctgccactgcccacctggtacccatggaccgttctgtggccagaataccaccttctctgtgatggctgggagccccattcaggcatcagtgccagctggtggccccctgggtctggcactgaggtttcgcaccacactgcccgctgggaccttggccactcgcaatgacaccaaggaaagcttggagctggcattggtggcagccacacttcaggccacactctggagctacagcaccactgtgcttgtcctgagactgccggacctggccctaaacgatggccattggcaccaggtggaggttgtgctccatctagcgaccctggagctacggctctggcatgagggctgccctgcccggctctgtgtggcctctggtcctgtggccctggcttccacggcttcggcaactccgctgcctgccgggatctcctctgcccagctgggggacgcgacctttgcaggctgcctccaggacgtgcgtgtggatggccacctcctgctgcctgaggatctcggtgagaacgtcctcctgggctgtgagcgccgagagcagtgccggcctctgccttgtgtccacggagggtcctgtgtggatctgtggactcatttccgttgcgactgtgcccggccccatagaggtcccacgtgcgctgatgagattcctgctgccacctttggcttgggaggcgccccaagctctgcctcctttctgctccaagagctgccaggtcccaacctcacagtgtctttccttctccgcactcgggagtccgctggcctgttgctccagtttgccaatgactccgcagctggcctaacagtattcctgagtgagggtcggatccgggctgaggtgccgggcagtcctgctgtagtgctccctgggcgctgggatgatgggctccgtcacctggtgatgctcagcttcgggcctgaccagctgcaggacctggggcagcacgtgcacgtgggtgggaggctccttgctgccgacagccagccctggggtgggcccttccgaggctgcctccaggacctgcgactcgatggctgccacctccccttctttcctctgccactggataactcaagccagcccagcgagctcggcggcaggcagtcctggaacctcactgcgggctgcgtctccgaggacatgtgcagtcctgacccctgtttcaatggtgggacttgcctcgtcacctggaatgacttccactgtacctgccctgccaatttcacggggcctacgtgtgcccagcagctgtggtgtcccggccagccctgtctcccacctgccacgtgtgaggaggtccctgatggctttgtgtgtgtggcggaggccacgttccgcgagggtccccccgccgcgttcagcgggcacaacgcgtcgtcagggcgcttgctcggcggcctgtcgctggcctttcgcacgcgcgactccgaggcctggctgctgcgtgccgcggcgggcgccctggaaggcgtgtggctggcggtgcgcaatggctcgctggcggggggcgtgcgcggaggccatggcctgcccggcgctgtgctgcccataccggggccgcgcgtggccgatggtgcctggcaccgcgtgcgtctggccatggagcgcccggcggccaccacctcgcgctggctgctgtggctggatggtgccgccaccccggtggcgctgcgcggcctggccagtgacctgggcttcctgcagggcccgggtgctgtgcgcatcctgctggctgagaacttcaccggctgcttgggccgcgtggcgctgggcggcctgcccctgcccttggcgcggccccggcccggcgcggcccctggcgcccgagagcacttcgcgtcttggcctgggacgccggccccgatcctcggctgccgcggcgcgcccgtgtgtgcgccctcgccctgtctgcacgacggtgcctgccgtgacctcttcgacgcctttgcctgcgcctgcggcccggggtgggaaggcccgcgctgcgaagcccacgtcgacccctgtcactccgccccctgcgcccgtggccgctgtcacacgcaccccgacggccgcttcgagtgccgctgcccgcctggcttcgggggcccgcgctgcaggttgcctgtcccatccaaggagtgcagcctgaatgtcacctgcctcgatggcagcccatgtgagggtggctctcccgctgccaactgcagctgcctggagggtcttgctggccagaggtgtcaggtccccactctcccctgtgaagccaacccctgcttgaatgggggcacctgccgggcagctggaggggtgtctgaatgtatctgcaatgccagattctccggccagttctgtgaagtggcgaagggcctgcccctgccgctgccattcccactgctggaggtggccgtacctgcagcctgtgcctgcctcctcctcctcctcctgggcctcctttcagggatcctggcagcccgaaagcgccgccagtctgagggcacctacagcccaagccagcaggaggtggctggggcccggctggagatggacagtgtcctcaaggtgccaccggaggagagactcatctaggccagcctggctgctggcaccagcacctggaggtcctgaatggtttctacctggagacccaaggaagctgcttccagggctcgggacattgctacggaagtgtccccttggctggcagcctctgcctctgcctctgccccatcctggatggaggacgaggggagcaactcagggaaacagaggcctagagaggctgcggacttctccatcccaccctcggggttccgccttggcaggtgtacggctgtgcgtgggagggcacacgtgggttcacagtgtgttcaggagtgtgtgtatctggaggagtgtgtgtgtgagtgtgtacctgggcctgtgttagtctgcagatgctagtgtgagtgtgtcctgacatggctccagggcgtgtctgccgtgtttactgtgtgtctatgactgtgatgggtgtagctgatcccaggaggtggcggctgcgccatggggtcaaccattacagtcctagggcaggggcggcccaaggctgcatgttctccaggaggccaggccggggttgcccaggcacctccttccccgcctctgggggctgctcctgctgtggaggcagctgggaagtcagggaaggccactagcagagcccattcctgagccagacaggtcacggttgacccaggaagagccatgtgccaggatggccgccaagcctcactgagcatgtgcagcagtggcagcctctcagacatagagggggctccctgggtgacatctccagagacccccttgtcccccagacacccctgggtagactgtgtctgacccttcacaaataggaaatgagagctcgggtcgaaatgctcacaatttcctgcgtgtctcagatggttgttttcttaaatggtcgggccatactttaacttggtttatggaaatgaatccatttcaagattcatcaaatcaataaggtaaaaaggaaaaagaaagataataaacattcaatct

SEQ ID NO: 1020 - protein, 215 aa, Homo sapiens
MGAPAGQLEGCLNVSAMPDSPASSVKWRRACPCRCHSHCWRWPYLQPVPASSSSSWASFQGSWQPESAASLRAPTAQASRRWLGPGWRWTVSSRCHRRRDSSRPAWLLAPAPGGPEWFLPGDPRKLLPGLGTLLRKCPLGWQPLPLPLPHPGWRTRGATQGNRGLERLRTSPSHPRGSALAGVRLCVGGHTWVHSVFRSVCIWRSVCVSVYLGLC

SEQ ID NO: 1021 - DNA, 1718 bp, Homo sapiens
ggagatgggatgtcccagatgatagggctcctgggatttcagacccaagaccagcaggactccagtcacctctaccccagctctccaggacacagcgctcccaactctgagtgacgtcccacctctggtccttgcagcacaaccaacgtgggaatcacaccctccagacctcccacagctccaccccagactgggcgccggccctgcctccatttcagctgtgacaacctcagagccgtgttggcccaagcatgacaaggacgtatgaaaacttccagtacttggagaataaggtgaaagtccaggggtttaaaaatgggccacttcctctccagtccctcctgcagcgtctctgctctgggccctgccatctcctgctgtccctgggcctcggcctcctgctgctggtcatcatctgtgtggttggattccaaaattccaaatttcagagggacctggtgaccctgagaacagattttagcaacttcacctcaaacactgtggcggagatccaggcactgacttcccagggtgacagcttggaagaaacgatagcatctctgaaagctgaggtggagggtttcaagcaggaacggcaggcaggggtatctgagctccaggaacacactacgcagaaggcacacctaggccactgtccccactgcccatctgtgtgtgtcccagttcattctgaaatgctcctgcgagtccagcagctggtgcaagacctgaagaaactgacctgccaggtggctactctcaacaacaatgcctccactgaagggacctgctgccctgtcaactgggtggagcaccaagacagctgctactggttctctcactctgggatgtcctgggccgaggctgagaagtactgccagctgaagaacgcccacctggtggtcatcaactccagggaggagcagaattttgtccagaaatatctaggctccgcatacacctggatgggcctcagtgaccctgaaggagcctggaagtgggtggatggaacagactatgcgaccggcttccagaactggaagccaggccagccagacgactggcaggggcacgggctgggtggaggcgaggactgtgctcacttccatccagacggcaggtggaatgacgacgtctgccagaggccctaccactgggtctgcgaggctggcctgggtcagaccagccaggagagtcactgagctgcctttggtgggaccacccggccacagaaatggcggtgggaggaggactcttctcacgacctcctcgcaagaccgctctgggagagaaataagcactgggagattggaagcactgctaacattttgaatttttttctctttaattttaaaaagatggtatagtgttcttaagcttttattttttttccaacttttgaaagtcaacttcatgaaggtataatttttacataataaaaatgcactcatttaaagagtagagatgactttgacaaatatgcatgcctaggtgactaccactccgatcgcaatagataacattgccatcgcccccaccagtcccctcatgcctctgggcagtccaaccacttccctgtttccaggccagtgatctacttctttttcactatttattggccttgcctcttctagagcttctagaacttcatataagtgaaatcatacactctcgtgtatatacttcatataagtgaatatatactctcgtgagaactt

SEQ ID NO: 1022 - protein, 316 aa, Homo sapiens
MTRTYENFQYLENKVKVQGFKNGPLPLQSLLQRLCSGPCHLLLSLGLGLLLLVIICVVGFQNSKFQRDLVTLRTDFSNFTSNTVAEIQALTSQGDSLEETIASLKAEVEGFKQERQAGVSELQEHTTQKAHLGHCPHCPSVCVPVHSEMLLRVQQLVQDLKKLTCQVATLNNNASTEGTCCPVNWVEHQDSCYWFSHSGMSWAEAEKYCQLKNAHLVVINSREEQNFVQKYLGSAYTWMGLSDPEGAWKWVDGTDYATGFQNWKPGQPDDWQGHGLGGGEDCAHFHPDGRWNDDVCQRPYHWVCEAGLGQTSQESH

SEQ ID NO: 1023 - DNA, 1718 bp, Homo sapiens
ggagatgggatgtcccagatgatagggctcctgggatttcagacccaagaccagcaggactccagtcacctctaccccagctctccaggacacagcgctcccaactctgagtgacgtcccacctctggtccttgcagcacaaccaacgtgggaatcacaccctccagacctcccacagctccaccccagactgggcgccggccctgcctccatttcagctgtgacaacctcagagccgtgttggcccaagcatgacaaggacgtatgaaaacttccagtacttggagaataaggtgaaagtccaggggtttaaaaatgggccacttcctctccagtccctcctgcagcgtctctgctctgggccctgccatctcctgctgtccctgggcctcggcctcctgctgctggtcatcatctgtgtggttggattccaaaattccaaatttcagagggacctggtgaccctgagaacagattttagcaacttcacctcaaacactgtggcggagatccaggcactgacttcccagggcagcagcttggaagaaacgatagcatctctgaaagctgaggtggagggtttcaagcaggaacggcaggcaggggtatctgagctccaggaacacactacgcagaaggcacacctaggccactgtccccactgcccatctgtgtgtgtcccagttcattctgaaatgctcctgcgagtccagcagctggtgcaagacctgaagaaactgacctgccaggtggctactctcaacaacaatgcctccactgaagggacctgctgccctgtcaactgggtggagcaccaagacagctgctactggttctctcactctgggatgtcctgggccgaggctgagaagtactgccagctgaagaacgcccacctggtggtcatcaactccagggaggagcagaattttgtccagaaatatctaggctccgcatacacctggatgggcctcagtgaccctgaaggagcctggaagtgggtggatggaacagactatgcgaccggcttccagaactggaagccaggccagccagacgactggcaggggcacgggctgggtggaggcgaggactgtgctcacttccatccagacggcaggtggaatgacgacgtctgccagaggccctaccactgggtctgcgaggctggcctgggtcagaccagccaggagagtcactgagctgcctttggtgggaccacccggccacagaaatggcggtgggaggaggactcttctcacgacctcctcgcaagaccgctctgggagagaaataagcactgggagattggaagcactgctaacattttgaatttttttctctttaattttaaaaagatggtatagtgttcttaagcttttattttttttccaacttttgaaagtcaacttcatgaaggtataatttttacataataaaaatgcactcatttaaagagtagagatgactttgacaaatatgcatgcctaggtgactaccactccgatcgcaatagataacattgccatcgcccccaccagtcccctcatgcctctgggcagtccaaccacttccctgtttccaggccagtgatctacttctttttcactatttattggccttgcctcttctagagcttctagaacttcatataagtgaaatcatacactctcgtgtatatacttcatataagtgaatatatactctcgtgagaactt

SEQ ID NO: 1024 - protein, 316 aa, Homo sapiens
MTRTYENFQYLENKVKVQGFKNGPLPLQSLLQRLCSGPCHLLLSLGLGLLLLVIICVVGFQNSKFQRDLVTLRTDFSNFTSNTVAEIQALTSQGSSLEETIASLKAEVEGFKQERQAGVSELQEHTTQKAHLGHCPHCPSVCVPVHSEMLLRVQQLVQDLKKLTCQVATLNNNASTEGTCCPVNWVEHQDSCYWFSHSGMSWAEAEKYCQLKNAHLVVINSREEQNFVQKYLGSAYTWMGLSDPEGAWKWVDGTDYATGFQNWKPGQPDDWQGHGLGGGEDCAHFHPDGRWNDDVCQRPYHWVCEAGLGQTSQESH

SEQ ID NO: 1025 - DNA, 2147 bp, Homo sapiens
ggaactgcaaccatggtgcccagcttcctctccctgagcttctcctccttgggcctgtgggcttctgggctgatcttggtcttaggctttctcaagctcatccacctgctgctgcggaggcagacgttggctaaggctatggacaaattcccagggcctcccacccactggctttttggacatgccctcgagatccaggagacggggagcctggacaaagtggtgtcctgggcccaccagttcccgtatgcccacccactctggttcggacagttcattggcttcctgaacatctatgagcctgactatgccaaagctgtgtacagccgtggggaccctaaggcccctgatgtgtatgacttcttcctccagtggattgggagaggcctgctggttcttgaggggcccaagtggttgcagcaccgcaagctgctcacacctggctttcattatgatgtgctgaagccctatgtggccgtgttcactgagtctacacgtatcatgctggacaagtgggaagagaaagctcgggagggtaagtcctttgacatcttctgcgatgtgggtcacatggcgctgaacacactcatgaagtgcacctttggaagaggagacaccggcctgggccacagggacagcagctactaccttgcagtcagcgatctcactctgttgatgcagcagcgccttgtgtccttccagtaccataatgacttcatctactggctcaccccacatggccgccgcttcctgcgggcctgccaggtggcccatgaccatacagaccaggtcatcagggagcggaaggcagccctgcaggatgagaaggtgcggaagaagatccagaaccggaggcacctggacttcctggacattctcctgggtgcccgggatgaagatgacatcaaactgtcagatgcagacctccgggctgaagtggacacattcatgtttgaaggccatgacaccaccaccagtggtatctcctggtttctctactgcatggccctgtaccctgagcaccagcatcgttgtagagaggaggtccgcgagatcctaggggaccaggacttcttccagtgggatgatctgggcaaaatgacttatctgaccatgtgcatcaaggagagcttccgcctctacccacctgtgccccaggtgtaccgccagctcagcaagcctgtcacctttgtggatggccggtctctacctgcaggaagcctgatctctatgcatatctatgccctccataggaacagtgctgtatggcccgaccctgaggtctttgactctctgcgcttttccactgagaatgcatccaaacgccatccctttgcctttatgcccttctctgctgggcccaggaactgcattgggcagcagtttgccatgagtgagatgaaggtggtcacagccatgtgcttgctccgctttgagttctctctggacccctcacggctgcccatcaagatgccccagcttgtcctgcgctccaagaatggctttcacctccacctgaagccactgggccctgggtctgggaagtagctctgatgagaatggggtcccagatggctcaggctgtgacctccctgggcaccaccctccccaggctgggtgtggaggagttggggccccctgccttcaggaggcttgtagtttagaagggaagtaggcattaccatagacgactcctagaggacagtgctatgtaaaaatgtgtgtctataaatgtttatcatgcatgtattctagagctcattcatttattcaacaaacatttggtgagcacctatttcgttcgagaaacttcatttatctcctataattggcaaacttaaaaatgcagcagaaacttacattccaaccttagagactcatagtgagcacaaggaaagttttgccctgagattcatggttatggctgggtaccaccaaatagaagaatggcttaggggagtgccccttcactgagatgtgtttctttgttgaactttgtgtgtgtgtgtttagaatataacagacataagaaaaaattacctaaatgaagactgtacaaaataataaataattctgaagcagactctcttgtaaccatcactgaagtcaagaaatatggaatatggtatcactgatgtgtcttctgc

SEQ ID NO: 1026 - protein, 511 aa, Homo sapiens
MVPSFLSLSFSSLGLWASGLILVLGFLKLIHLLLRRQTLAKAMDKFPGPPTHWLFGHALEIQETGSLDKVVSWAHQFPYAHPLWFGQFIGFLNIYEPDYAKAVYSRGDPKAPDVYDFFLQWIGRGLLVLEGPKWLQHRKLLTPGFHYDVLKPYVAVFTESTRIMLDKWEEKAREGKSFDIFCDVGHMALNTLMKCTFGRGDTGLGHRDSSYYLAVSDLTLLMQQRLVSFQYHNDFIYWLTPHGRRFLRACQVAHDHTDQVIRERKAALQDEKVRKKIQNRRHLDFLDILLGARDEDDIKLSDADLRAEVDTFMFEGHDTTTSGISWFLYCMALYPEHQHRCREEVREILGDQDFFQWDDLGKMTYLTMCIKESFRLYPPVPQVYRQLSKPVTFVDGRSLPAGSLISMHIYALHRNSAVWPDPEVFDSLRFSTENASKRHPFAFMPFSAGPRNCIGQQFAMSEMKVVTAMCLLRFEFSLDPSRLPIKMPQLVLRSKNGFHLHLKPLGPGSGK

SEQ ID NO: 1027 - DNA, 6351 bp, Homo sapiens
atgtcggcgccgtcggaggaggaggagtacgcgcggctggtgatggaggcgcagccggagtggctgcgcgccgaggtgaagcggctgtcccacgagctggccgagaccacgcgtgagaagatccaggcggccgagtacgggctggcggtgctcgaggagaagcaccagctcaagctgcagttcgaggagctcgaggtggactatgaggctatccgcagcgagatggagcagctcaaggaggcctttggacaagcacacacaaaccacaagaaggtggctgctgacggagagagccgggaggagagcctgatccaggagtcggcctccaaggagcagtactacgtgcggaaggtgctagagctgcagacggagctgaagcagttgcgcaatgtcctcaccaacacgcagtcggagaatgagcgcctggcctctgtggcccaggagctgaaggagatcaaccagaatgtggagatccagcgtggccgcctgcgggatgacatcaaggagtacaaattccgggaagctcgtctgctgcaggactactcggaactggaggaggagaacatcagcctgcagaagcaagtgtctgtgctcagacagaaccaggtggagtttgagggcctcaagcatgagatcaagcgtctggaggaggagaccgagtacctcaacagccagctggaggatgccatccgcctcaaggagatctcagagcggcagctggaggaggcgctggagaccctgaagacggagcgcgaacagaagaacagcctgcgcaaggagctgtcacactacatgagcatcaatgactccttctacaccagccacctgcatgtctcgctggatggcctcaagttcagtgacgatgctgccgagcccaacaacgatgccgaggccctggtcaatggctttgagcacggcggcctggccaagctgccactggacaacaagacctccacgcccaagaaggagggcctcgcaccgccctcccccagcctcgtctccgacctactcagtgagctcaacatctctgagatccagaagctgaagcagcagctgatgcagatggagcgggaaaaggcgggcctgctggcaacgctgcaggacacacagaagcagctggagcacacgcggggctccctgtcagaacagcaggagaaggtgacccgcctcacagagaatctgagtgccctgcggcgcctgcaggccagcaaggagcggcagacagccctggacaacgagaaggaccgtgacagccatgaggatggggactactacgaggtggacatcaacgggcctgagatcttggcctgcaagtaccatgtggctgtggctgaggctggcgagctccgcgagcagctcaaggcactgcgcagcacgcacgaggctcgtgaggcccagcacgccgaggagaagggccgctatgaggctgagggccaggcactcacggagaaggtctccctgctagagaaggccagccgccaggaccgcgagctgctggcccggctggagaaggagctaaagaaggtgagcgacgtcgccggcgagacacagggcagcctgagtgtggcccaggatgagctggtgaccttcagtgaggagctggccaatctctaccaccacgtgtgcatgtgcaacaatgagacacccaaccgtgtcatgctggactactaccgcgagggccagggcggggccggccgcaccagtcccgggggccgcaccagccccgaggcgcgtggccggcgctcacccatcctcctacccaaggggctgctggctcctgaggcgggccgagcagatggtgggacgggggacagcagcccctcgcctggctcctcactgccatcacccctgagtgacccacgccgggagcccatgaacatctacaacctgatcgctatcatccgtgaccagatcaagcacctgcaggcagccgtggaccgcaccacggagctgtcacgccagcgcattgcctctcaggagctgggccccgccgtggacaaggacaaggaagcgcttatggaggagatcctcaagctgaagtcgctgctcagcaccaagcgggagcagatcaccacgctgcgcactgtgctcaaggccaacaagcagacggccgaggtggcccttgccaacctgaagagcaagtatgagaatgagaaggccatggttaccgagaccatgatgaagctgcgcaatgagctcaaggccctcaaggaggacgcagccaccttctcctcgctgcgtgctatgtttgccaccaggtgtgacgagtacattacacagctggatgagatgcagcggcagctggcggctgctgaggacgagaagaagacgctgaactcgctgctgcgcatggccatccagcagaagctggcgctgacccagcggctggagctgctcgagctggaccatgagcagacccggcgtggccgtgccaaagccgccccgaagaccaagccagccacaccgagcgtaagtcacacctgtgcctgtgccagcgacagggccgagggcaccgggctggccaaccaggtgttctgcagcgagaagcacagcatttactgtgattaggggctgtggggcgccgcacgctgcagctaacatctgcttcacctcaactaacccagcagcagcgggacggcggtgctaggtcaatcttaacgtgactaatgcacagagggtaggagtctagccgaggcgccatggggcgttgcatcagcaggacacttgtgagagctttgtgtcgcttctcactcctcaaagccccctcaggagcacccagtcctcagctgctctcttaggtgggggtcagaggtggggatagagctgcacattcttgcagcagatgtgtgatgaaagcatcttctaagccctgcgcacccgtggggaaacccaagggaggagtcctggtcctgctccctcagcacccaaaaggggcagaacctgagttgagacttgcatgttcctcgcatgtgtctaatgtcagcactagaaagcagttttaggaggttccagcctgcagcataggtacgacctcagaggatggctttgcacttggcatagtttcatggaaaggagtacgttgtagtttatgcagtatctgactgcaaatcatattcaggaaagaagtgcagaatttcttccccaagcccagagaagagcagccctgagcccctgtattctgctggccagacacacatggcacagacacagctgaccataacccaggaatccagagctcggtttctcatttctgagatcaggatgcttgtatagtggcctgtgaggtgacagattggcagggcccaaggccccaggttttcatttttcatgagaaaagctttccaagtgcctggccagaccttggtccttagtgcagagcccgtccttttgtacttggggtgaccccagcagccaattatccggccttccatagggggttcagtcccaaagacatggggctttgaaaaccctagcctgaagtctgagccaccaagggcttggctgggttggacacccacaggtgtatccagagcccagcccggtgctgggaaagctttgcatagggccagggccacttgtcaggattcacaggtaggagatgtttaggtctctttatttagtgcaatctgggggatggcaacagagaaagaggaaaggtagctgtagggttctcccatttccagaggctccatccacacctgccttcccacattctgagcagaacttttctcagtacttttttcccgatcaccctgtgggaccagctggacctgaggctgcagtcttctctcctgcaggctgcttgccttgtctctcatgcggaagaggcattcgagttacctggtgagagaccgtgttgccccctcccacagctctctgccctgcgcgttcttccctttggtgccgagtatgtttcggtcccctccagactccaggacacgcccatgtatgtcccctgcgtgttcatcctgggcccagatccccctgccccagcaagactcgcagtgggatggctgctggcatgcccaccctgcatgcgctttgccctctccttgcaagcctggcacatagcttctctccatactcctaagggactttgcagacacccaagccactgggacccctgctaacacatgcaggtcttctcttctgccaactaacgtgctcgcgccctcccagcacgtggagagcttcaattgtcagataaacaggaagcgacagatgaccgctttctaacgctctcttttctcccgttttcagctgtagagtagctgccaggaggacttggccacccggccctgtcacactgcagccccttccccttccctctcgtggcccacaaggaggaaggaagggcaacctaaaagcccacttagaaactttttggatatgccactgcaattcttttcaaaatagcattccccaggtttttaatgggaggaaaaaaagctttaatgttgagcatgctgcgagctgctgcgtggaaaggcctctgtatgggccgaagacccttcttccctggctgccaggctcgccaggagcccactggaaacgcccaccacgggggctccttgttacacatgttctttttttatccgatcaacctgtgcacttttgatattttgatattatatttgcttccttaattcctcgcgtagagacggtctcaggtgccgtggtctatgctcgtggtcctgtagctgtccgcctcagctcccaccgtgtttgtctggtgtcagcacgaggcagagctgtgtgctccatagcgtgtagctttagactcggagatgagtgctttgacccagcgaggagctcagctaagtgtatccacgctgtggttcagcagcctttagatcatacggcattgtggttcatgtttgaaattacagattttaaatgccatgttcattaagaaatccagggtattcagattctggggtttttcatattgtattattattattcttaggaatagttcaatgtaacaagaagaaaacttgacctttgctctggttaaaacagtaataggcacttgaaaaaaaaagataaattattgaatgagtagtattacctacaaattccagaattttctgggttttaggacgttgtgaagcatgactgattaacagaattttatacaactgtaccaataaaattccaaattggaattgttttgttactctggttgttgtgccaaattgtggtacacttagaaaattctacagtcgtcgatttttagggtgttctctttcaacacctttttgttagtaatcattgccagtagtgccttcatcagttaagggaggtgtcccagcacagatcattctcaaaagcgagcagggaagagctagtgggcatgctgaaggccagcgtggacagcaggtgaggcaggtgctcctcacacccagacctgggcatcttcattgagggaaagaaaacagtcattgtgcaaaattctgttagtcagtgattctttacttgcaaattcaggggcttagaaaatgaaagcaaacacaaaaccttgagtgtgctttgggaaccaaatggaccttctgggacaagctgagcaagctgtatgaacgccacgtttgtgaagagctgagggtatcaggagggccgacgctgtgttggcatgcgcagtaggggatgagggttagccatagtattctttgcaaatgtgaaagcgagacattatatcttctcttgcttggtgtaactaatcactgttaatttcaggaaacagaactcattaaaactccttagcaaaccaggtctacatcctgttttgtttgctgagtgaggttagtgggagtggtcaaattggtactcttggaggaagaaaaactgtccttccttctccaaaaaaggaaaaattataataatataaatgacaaaaataaaagaattctgtttcctggaataagcatttcttattcctagttgtagggactcctatttttaccttccgttacagtgttgattcataagaaatattgttacatttgagataacttcatctgtatggggtatttatttgcaatgatgtctgagtactgtattttttctgtgcattaccttagtgtcagaatgttggtctttattttaaagtcatatgcatgttctcctgccaaggaacctttacacagacccaaacaaaaaaataataatcaaatgccttcaatttctgagaaaatgaggcagagcatggaaaaggaataggaaggagaaattaattgagattttcaggacacagacatatgatgtgaatgcctacaaagccagtgcgcataggaacagtgggcctgggtaaagagtcacattggtaggaccaataaagaataataaaaagac

SEQ ID NO: 1028 - protein, 855 aa, Homo sapiens
MSAPSEEEEYARLVMEAQPEWLRAEVKRLSHELAETTREKIQAAEYGLAVLEEKHQLKLQFEELEVDYEAIRSEMEQLKEAFGQAHTNHKKVAADGESREESLIQESASKEQYYVRKVLELQTELKQLRNVLTNTQSENERLASVAQELKEINQNVEIQRGRLRDDIKEYKFREARLLQDYSELEEENISLQKQVSVLRQNQVEFEGLKHEIKRLEEETEYLNSQLEDAIRLKEISERQLEEALETLKTEREQKNSLRKELSHYMSINDSFYTSHLHVSLDGLKFSDDAAEPNNDAEALVNGFEHGGLAKLPLDNKTSTPKKEGLAPPSPSLVSDLLSELNISEIQKLKQQLMQMEREKAGLLATLQDTQKQLEHTRGSLSEQQEKVTRLTENLSALRRLQASKERQTALDNEKDRDSHEDGDYYEVDINGPEILACKYHVAVAEAGELREQLKALRSTHEAREAQHAEEKGRYEAEGQALTEKVSLLEKASRQDRELLARLEKELKKVSDVAGETQGSLSVAQDELVTFSEELANLYHHVCMCNNETPNRVMLDYYREGQGGAGRTSPGGRTSPEARGRRSPILLPKGLLAPEAGRADGGTGDSSPSPGSSLPSPLSDPRREPMNIYNLIAIIRDQIKHLQAAVDRTTELSRQRIASQELGPAVDKDKEALMEEILKLKSLLSTKREQITTLRTVLKANKQTAEVALANLKSKYENEKAMVTETMMKLRNELKALKEDAATFSSLRAMFATRCDEYITQLDEMQRQLAAAEDEKKTLNSLLRMAIQQKLALTQRLELLELDHEQTRRGRAKAAPKTKPATPSVSHTCACASDRAEGTGLANQVFCSEKHSIYCD

SEQ ID NO: 1029 - DNA, 2727 bp, Homo sapiens
tgaggagggcccggcctgcgagagcctcagtgggagccggctcagccctcggccaccatgtcggcgccgtcggaggaggaggagtacgcgcggctggtgatggaggcgcagccggagtggctgcgcgccgaggtgaagcggctgtcccacgagctggccgagaccacgcgtgagaagatccaggcggccgagtacgggctggcggtgctcgaggagaagcaccagctcaagctgcagttcgaggagctcgaggtggactatgaggctatccgcagcgagatggagcagctcaaggaggcctttggacaagcacacacaaaccacaagaaggtggctgctgacggagagagccgggaggagagcctgatccaggagtcggcctccaaggagcagtactacgtgcggaaggtgctagagctgcagacggagctgaagcagttgcgcaatgtcctcaccaacacgcagtcggagaatgagcgcctggcctctgtggcccaggagctgaaggagatcaaccagaatgtggagatccagcgtggccgcctgcgggatgacatcaaggagtacaaattccgggaagctcgtctgctgcaggactactcggaactggaggaggagaacatcagcctgcagaagcaagtgtctgtgctcagacagaaccaggtggagtttgagggcctcaagcatgagatcaagcgtctggaggaggagaccgagtacctcaacagccagctggaggatgccatccgcctcaaggagatctcagagcggcagctggaggaggcgctggagaccctgaagacggagcgcgaacagaagaacagcctgcgcaaggagctgtcacactacatgagcatcaatgactccttctacaccagccacctgcatgtctcgctggatggcctcaagttcagtgacgatgctgccgagcccaacaacgatgccgaggccctggtcaatggctttgagcacggcggcctggccaagctgccactggacaacaagacctccacgcccaagaaggagggcctcgcaccgccctcccccagcctcgtctccgacctactcagtgagctcaacatctctgagatccagaagctgaagcagcagctgatgcagatggagcgggaaaaggcgggcctgctggcaacgctgcaggacacacagaagcagctggagcacacgcggggctccctgtcagaacagcaggagaaggtgacccgcctcacagagaatctgagtgccctgcggcgcctgcaggccagcaaggagcggcagacagccctggacaacgagaaggaccgtgacagccatgaggatggggactactacgaggtggacatcaacgggcctgagatcttggcctgcaagtaccatgtggctgtggctgaggctggcgagctccgcgagcagctcaaggcactgcgcagcacgcacgaggctcgtgaggcccagcacgccgaggagaagggccgctatgaggctgagggccaggcactcacggagaaggtctccctgctagagaaggccagccgccaggaccgcgagctgctggcccggctggagaaggagctaaagaaggtgagcgacgtcgccggcgagacacagggcagcctgagtgtggcccaggatgagctggtgaccttcagtgaggagctggccaatctctaccaccacgtgtgcatgtgcaacaatgagacacccaaccgtgtcatgctggactactaccgcgagggccagggcggggccggccgcaccagtcccgggggccgcaccagccccgaggcgcgtggccggcgctcacccatcctcctacccaaggggctgctggctcctgaggcgggccgagcagatggtgggacgggggacagcagcccctcgcctggctcctcactgccatcacccctgagtgacccacgccgggagcccatgaacatctacaacctgatcgctatcatccgtgaccagatcaagcacctgcaggcagccgtggaccgcaccacggagctgtcacgccagcgcattgcctctcaggagctgggccccgccgtggacaaggacaaggaagcgcttatggaggagatcctcaagctgaagtcgctgctcagcaccaagcgggagcagatcaccacgctgcgcactgtgctcaaggccaacaagcagacggccgaggtggcccttgccaacctgaagagcaagtatgagaatgagaaggccatggttaccgagaccatgatgaagctgcgcaatgagctcaaggccctcaaggaggacgcagccaccttctcctcgctgcgtgctatgtttgccaccaggtgtgacgagtacattacacagctggatgagatgcagcggcagctggcggctgctgaggacgagaagaagacgctgaactcgctgctgcgcatggccatccagcagaagctggcgctgacccagcggctggagctgctcgagctggaccatgagcagacccggcgtggccgtgccaaagccgccccgaagaccaagccagccacaccgagcctgtagagtagctgccaggaggacttggccacccggccctgtcacactgcagccccttccccttccctctcgtggcccacaaggaggaaggaagggcaacctaaaagcccacttagaaactttttggatatgccactgcaattcttttcaaaatagcattccccaggtttttaatgggaggaaaaaaagctttaatgttga

SEQ ID NO: 1030 - protein, 824 aa, Homo sapiens
MSAPSEEEEYARLVMEAQPEWLRAEVKRLSHELAETTREKIQAAEYGLAVLEEKHQLKLQFEELEVDYEAIRSEMEQLKEAFGQAHTNHKKVAADGESREESLIQESASKEQYYVRKVLELQTELKQLRNVLTNTQSENERLASVAQELKEINQNVEIQRGRLRDDIKEYKFREARLLQDYSELEEENISLQKQVSVLRQNQVEFEGLKHEIKRLEEETEYLNSQLEDAIRLKEISERQLEEALETLKTEREQKNSLRKELSHYMSINDSFYTSHLHVSLDGLKFSDDAAEPNNDAEALVNGFEHGGLAKLPLDNKTSTPKKEGLAPPSPSLVSDLLSELNISEIQKLKQQLMQMEREKAGLLATLQDTQKQLEHTRGSLSEQQEKVTRLTENLSALRRLQASKERQTALDNEKDRDSHEDGDYYEVDINGPEILACKYHVAVAEAGELREQLKALRSTHEAREAQHAEEKGRYEAEGQALTEKVSLLEKASRQDRELLARLEKELKKVSDVAGETQGSLSVAQDELVTFSEELANLYHHVCMCNNETPNRVMLDYYREGQGGAGRTSPGGRTSPEARGRRSPILLPKGLLAPEAGRADGGTGDSSPSPGSSLPSPLSDPRREPMNIYNLIAIIRDQIKHLQAAVDRTTELSRQRIASQELGPAVDKDKEALMEEILKLKSLLSTKREQITTLRTVLKANKQTAEVALANLKSKYENEKAMVTETMMKLRNELKALKEDAATFSSLRAMFATRCDEYITQLDEMQRQLAAAEDEKKTLNSLLRMAIQQKLALTQRLELLELDHEQTRRGRAKAAPKTKPATPSL

SEQ ID NO: 1031 - DNA, 1820 bp, Homo sapiens
gccggaagcgcggatcacacgggcccctacaaggggcccctacaagcggccacaaggatggcaggcttcgcggagctcgggctgtcatcgtggctcgtggaacaatgtcggcagctgggtttgaagcagcccacgcccgtgcagctcggctgcatccccgccatcctggagggtcgagactgcttgggctgtgctaagacaggcagtgggaagacagcagcgtttgtccttcccatcttgcagaagctgtctgaggatccctatggcatcttctgcctcgtcctgacacccaccagggagctggcctaccagatcgcagagcagttccgggtcctggggaagcctctagggctgaaagactgcatcatcgtcggtggcatggacatggtggcccaggcgctggagctctctcggaaaccacacgtggtcatcgccacgccggggcgcctggcagatcacctgcgcagctccaacacttttagtataaagaagatccgcttcctggtgatggatgaggcagaccggctgctggaacagggctgcactgacttcaccgtggacctggaggccatcctggcggctgtgccggcccgcaggcagacactgctgttcagcgccacgctgaccgacacactccgggagctgcagggtctggccaccaaccagcccttcttctgggaagcacaggccccggtgagcaccgtggagcagctggaccagcgctacctgctggtgcctgagaaggtcaaggacgcctacctggtccacctgatccagcgcttccaggatgagcacgaggactggtccattatcatcttcaccaacacgtgcaagacctgccagattctgtgcatgatgctgcgcaaattcagcttccccaccgtggctctgcactccatgatgaagcagaaagaacgctttgccgccctagccaagttcaagtccagcatctaccggatcctgatcgcaacagacgtggcctcccggggcctggacatccctacggtacaggtggtcatcaaccacaacacccccgggctccccaagatctacatccaccgagtcggccggacggcccgtgcagggcggcagggtcaggccatcacgctggtgacacagtacgacatccacctggtgcacgccatcgaggagcagatcaagaagaagctggaggagttctccgtggaagaggccgaggtgctacagatcctcacacaggtcaacgtggtgcgaagagagtgtgagatcaaactggaggcggcccactttgacgaaaagaaggagatcaacaaacggaagcagctgatcctggaggggaaggaccctgacctggaggccaagcgcaaggctgagctggccaagatcaagcagaagaaccggcgcttcaaggagaaggtggaggagacgctgaagcgacagaaggctggcagggctggccacaaggggcgtccacccaggacaccgtctgggtcccactcaggcccagtcccctcccagggcctggtctgagccccacacggccatctgcccagtccttgactcgtccatggagctgagggtcggaggaaccttccttgggggcagcagcccttcccgggggcctacccagtgccccacagcagaacccgtgggcgctcgtgttgtgcgggccctgctcctctgccccgaaaccactggctggtcccttccctgagccctggccaagattcaggctgcaggggaagaaagaacatgaccgggaggttgtgaccccaacccaaggtcaccccccaggggtgccgcatacaggaggtgcttaataaacgggtcttttgacttcc

SEQ ID NO: 1032 - protein, 483 aa, Homo sapiens
MAGFAELGLSSWLVEQCRQLGLKQPTPVQLGCIPAILEGRDCLGCAKTGSGKTAAFVLPILQKLSEDPYGIFCLVLTPTRELAYQIAEQFRVLGKPLGLKDCIIVGGMDMVAQALELSRKPHVVIATPGRLADHLRSSNTFSIKKIRFLVMDEADRLLEQGCTDFTVDLEAILAAVPARRQTLLFSATLTDTLRELQGLATNQPFFWEAQAPVSTVEQLDQRYLLVPEKVKDAYLVHLIQRFQDEHEDWSIIIFTNTCKTCQILCMMLRKFSFPTVALHSMMKQKERFAALAKFKSSIYRILIATDVASRGLDIPTVQVVINHNTPGLPKIYIHRVGRTARAGRQGQAITLVTQYDIHLVHAIEEQIKKKLEEFSVEEAEVLQILTQVNVVRRECEIKLEAAHFDEKKEINKRKQLILEGKDPDLEAKRKAELAKIKQKNRRFKEKVEETLKRQKAGRAGHKGRPPRTPSGSHSGPVPSQGLV

SEQ ID NO: 1033 - DNA, 4651 bp, Homo sapiens
gggagaagctaggaaaaaatgtctttgagctgtgagatgcttgtatattttgaaaatatgattatatgcatgtgtttgtattttatgacttggataatctgaaaatcaatttgctttgtcaatgcttcctggattagaattccactatttggtccctatcctagtctactaaagaaaattgagcgggaaacatggcgggaaagtggcgtttcattaattgctactgtaactcgtctaatggagaggttgttagattacagaacttctataagactgaactgaacaaggaggagatgtatatacgctacattcacaaactctatgatctgcatctcaaagcacagaactttacagaagctgcatataccctcctcttatatgacgagctactggaatggtctgatcggcccctcagggagttcctgacctaccccatgcaaacagaatggcagcgcaaagagcacctgcacctcaccatcatccagaactttgacagaggcaaatgttgggagaatggcattatcttgtgccggaagattgcagagcagtatgagagttattatgactacagaaacctgagcaagatgcggatgatggaagcctctttgtatgacaaaattatggaccagcaacgtcttgaaccagagttcttcagagttggattttatggaaaaaaatttccatttttcttaagaaataaggagtttgtgtgtcgagggcatgactacgagaggctggaagccttccaacagagaatgctgaacgagttcccccatgccatcgccatgcagcacgccaaccagcccgatgagaccatcttccaggcagaagctcagtatttgcagatatatgctgtgactcccattccagagagccaggaggtcctgcagagagagggtgttccggacaacatcaaaagcttctataaagtgaatcacatctggaaattccgctatgaccgaccatttcacaaaggcacaaaagataaagagaatgaattcaagagtctctgggtggagagaacgtcattatacttggtgcagagtttgcctggcatctctcgctggtttgaagtggaaaagcgtgaagtggtagaaatgagtcctctggaaaatgcaattgaagtgctagaaaataagaatcagcagctgaagactctgattagtcagtgtcagacaagacagatgcagaatattaatcccctgactatgtgcctgaatggagttatagatgctgcagttaatggtggcgtttccaggtatcaagaggcattctttgtcaaagaatatatcttaagtcaccctgaagatggggagaaaattgcacgattaagagagctgatgcttgagcaggcacagattctggaatttggtttggccgtgcatgagaagtttgtacctcaagatatgagaccccttcacaaaaagctggttgaccaattctttgtgatgaagtcgagcttagggatacaggagttctctgcttgtatgcaagccagtcctgtccattttcctaatggaagccctcgtgtgtgtagaaactcagcacctgcttctgtgagcccagatggtaccagggtaattcctagacgcagcccgttaagttacccagctgtcaaccgatattcttcctcctcactgtcctcacaagcttctgctgaagtaagcaatattacagggcaatcagaaagctctgatgaagtctttaacatgcagccaagtccatctacctcaagcttgagttctactcactcggcttcacctaatgtgacaagttctgctccatcgagtgccagagcttctcctttgttgtctgacaaacacaaacattcccgagaaaactcttgcctgtcaccaagagagagaccatgcagtgccatctatccaacacctgtggagccttcgcagaggatgctgtttaatcatattggagacggggccttgccacgcagtgacccaaatctctctgcacctgaaaaagcttcaccagcaagacacacgacatcagtatccccctcgcctgccgggcgatctccattgaagggctctgtgcagtctttcaccccctctccagtggagtaccactcgccaggactcatctccaactcccctgtcttgtcgggcagctacagcagtgggatttcttctctcagccggtgcagcacgtcggaaacctcaggctttgaaaatcaggtgaatgaacagtcggcccccctgccggtgccagtgccggtgcccgtgccgagctacggcggggaggagccagtgcgcaaggagagcaagactccgcccccgtacagcgtctacgagcggactctgcggcgccccgtcccgctacctcacagcctctccatccccgtcacgtcggagccgcccgcgctgccccccaagcctctggcagcgcgatccagccacctggagaatggggcccggaggactgaccccggcccgcggcccaggcccctgccccgcaaggtctctcagttataagtcacttttctatgtacctgcgatgcattctttgcccgtttacaaaataagaagtatgatgagaagacatttagtgtaggcactttaataacttactcagctccttcgatgaatggaattaaaacttgcttattaaatatcatgttgcacaatattaaaagttgctgatctaaaacgccagatgttaaatgaagtatggctgaatttcattaaaacgtttctcatttggaagtggtaaatagtgataaagactccttttgtacctttttatgttcacttttttttatatagtttaatcttaaaaccaatacgatattgtcaaacgatacaatgtgtgacaatgttgtatcgtttttactgaatacttgatacttggagaaagcttattaagtcagtgcacatcctaacacagtggtccttattttagaagacttctgtaaataaggcaaggtttatcagtgcagatcatcagaattaaagttcaagcaggcgagcaagacagtatacttaaggggttgcaaagcttgggactggaaattgttttgttcttgaaacaaaatacttctttaaggttgcttttgctgtttgactgctgtctacattcgtaaaattctattttgtgaattggtagctaaatcccttactaccctgacaccgtggtatctactgtatttcttttcaaggtgcaatttgcttcagagttccaatcagctagattaagcaagaggctccagaagaaatgtttacttgaattttgcgcttcctttcttgatagtttcctatataaaatttgtcattgaacaagagcaaatgctgaagtattaatgaggcacaaatgactgtgccccattagcaagaattcaggaatcaatacagacagtattaaattaatagcttaagtgaagaaaaaaaaaacttagtgaaaatgtattagcacgattaaatggcaaaaggacttataaaaggcaagggcattaactttcagtcctgcacaaaataaaaaattcctcacgactctccacttttaccagtggagtttgtcttagctgacctgtcgtctttctcttgaaggaggattgctgtagacttctctagcttgaatattgcaacatagcatcttaggtctagatagggatgctaatgccagttgtagaagtgtgaaaaaagcaccttgtatgtagtaatgtattttatatctttgttttttcttttactgactgtttataacactcaattgacaatagatatgaactgtattttaaatcatactgttaaatattttccctcttttgttgggaagctcattttagtttaaccatgtttgttttgttggtagcttacctggaaggcagtgaccacttttttatattctcttaatgaaaccattcagcaggtatatgctgttgaggctggttatagaggttttctataataaatgttcaagtatttttgtatataactggttaattttaataagagataccattatgtgtaaaaaaaagtaaaaataaacgcaaacagttgttgatgcagtatgattgttataattatgccaaatactttacgtatggaaaaagaatatttgtacatatgtgcttttaacaattctgccatattgactttacaattttgaatgtcggaaaaattaatatatgttaaatatttatgtttagtgaaagtgttcataattgagaaaaggaacatatgcattttagctttgtatcttgcaagttttgcagtcagaaattttttgaactagcttttgcttttgataacacttcgtgtttgtaaccacattcatatatatatacatatatatgtgaagctccatatttctgttgctttaaagaagtaaaaccttccatttaaataagatgacatgcataagataacaaagcttccttgatttccttttcctgtgtaatttaatagatttgttgactagtgcttgggcacattataaatcagtgttatttgctcttggagccattttttaaaaaaaattttggcagtgagcagttgaatttatcttgaatttatcatgtgtgtgtatttctgaagcagctacatagcagaacattttaagagattctgttagcccacatgttcatgttggttgctgctgaatggtaaatattaaataaaattaccagattaatctt

SEQ ID NO: 1034 - protein, 765 aa, Homo sapiens
MAGKWRFINCYCNSSNGEVVRLQNFYKTELNKEEMYIRYIHKLYDLHLKAQNFTEAAYTLLLYDELLEWSDRPLREFLTYPMQTEWQRKEHLHLTIIQNFDRGKCWENGIILCRKIAEQYESYYDYRNLSKMRMMEASLYDKIMDQQRLEPEFFRVGFYGKKFPFFLRNKEFVCRGHDYERLEAFQQRMLNEFPHAIAMQHANQPDETIFQAEAQYLQIYAVTPIPESQEVLQREGVPDNIKSFYKVNHIWKFRYDRPFHKGTKDKENEFKSLWVERTSLYLVQSLPGISRWFEVEKREVVEMSPLENAIEVLENKNQQLKTLISQCQTRQMQNINPLTMCLNGVIDAAVNGGVSRYQEAFFVKEYILSHPEDGEKIARLRELMLEQAQILEFGLAVHEKFVPQDMRPLHKKLVDQFFVMKSSLGIQEFSACMQASPVHFPNGSPRVCRNSAPASVSPDGTRVIPRRSPLSYPAVNRYSSSSLSSQASAEVSNITGQSESSDEVFNMQPSPSTSSLSSTHSASPNVTSSAPSSARASPLLSDKHKHSRENSCLSPRERPCSAIYPTPVEPSQRMLFNHIGDGALPRSDPNLSAPEKASPARHTTSVSPSPAGRSPLKGSVQSFTPSPVEYHSPGLISNSPVLSGSYSSGISSLSRCSTSETSGFENQVNEQSAPLPVPVPVPVPSYGGEEPVRKESKTPPPYSVYERTLRRPVPLPHSLSIPVTSEPPALPPKPLAARSSHLENGARRTDPGPRPRPLPRKVSQL

SEQ ID NO: 1035 - DNA, 5865 bp, Homo sapiens
gttattgccagtttccgaggaaccgttccatatggcctgtcattggaaattggagatacagttcagatcctggagaagtgtgatggctggtacagaggatttgccttaaaaaacccaaatatcaagggtatatttccttccagctacgttcacttgaaaaatgcctgtgtaaagaacaaaggacaatttgaaatggttattcccactgaagactctgttatcacagaaatgacatcaacattaagagactggggaaccatgtggaaacaactctatgtgcgtaatgaaggcgatctcttccaccggctgtggcacatcatgaatgaaatcctggacctgaggcggcaggtgctggtgggccacctcacccacgaccggatgaaggacgtgaagcgccacattactgcccggcttgactggggcaatgaacaactgggactggacctggtgcctaggaaagagtacgcaatggtggatccggaagacatcagcattactgagctctaccgattgatggaacatcgacatcggaagaaagacaccccggtgcaggccagcagtcaccacctctttgtccagatgaagagcctcatgtgttccaacctgggagaggagctggaggtcatcttctcactctttgacagtaaagagaaccggccaatcagtgagagatttttcttgaggctgaatagaaacgggcttcccaaagcccctgataaaccggaacgacattgctccctctttgtggatttgggcagcagtgagctaagaaaggacatttatatcaccgtgcacattatccgaatcggtcgaatgggagcaggagaaaaaaagaatgcctgtagtgtccagtaccgacgaccctttggctgtgcagttcttagcatcgctgacctgctaacaggagagacaaaggatgacctcattctgaaagtatacatgtgtaacacagagagtgagtggtaccaaatccatgagaacatcatcaaaaagctgaatgcacgttataacttgactggctccaatgcaggtttagcagtttccttacagctattgcacggagacattgaacaaatcagaagggaatattcatcagtattttctcatggagtatccataacaaggaagctgggattttcaaatattattatgcctggtgaaatgaggaatgatttatatatcactattgaaaggggagaatttgagaaaggagggaagagcgtggccagaaatgtggaagttacgatgttcattgtagacagtagtggccaaaccctgaaggattttatctccttcggctctggggagccaccagccagtgagtaccactcctttgtgctttaccataacaacagtcccaggtggtctgaactgctgaaacttcccattcctgtggataaattccggggtgcacacatccgcttcgagtttcggcattgttccacaaaggagaaaggagagaagaagttgtttgggttttcttttgtccctctgatgcaagaagatggtaggactcttccagatggcactcatgagctcatcgtgcataagtgtgaagaaaacacaaatcttcaggatactacccgctacctcaaacttcccttttccaagggcattttccttgggaataataatcaagccatgaaggccacaaaggagtccttttgtattacatcttttctctgttccacaaaactcacacaaaatggtgatatgcttgatcttttgaaatggagaacccacccagacaagatcactggctgtctctctaaattaaaagaaattgatggctcagagatagtaaagtttctgcaggatacactggataccttatttggaattttagatgaaaattcccaaaaatatgggtctaaagtgtttgattctttggttcacataataaatttgctgcaagatagcaaatttcatcattttaaacctgtaatggacacttacattgagagtcattttgctggggcacttgcatacagagatctcatcaaagtgctcaaatggtacgtggaccggatcacagaagcagagcggcaagagcatatccaggaggtgctgaaggcacaagaatacatttttaagtatatagttcaatctcgaaggctgttttcccttgccactggtgggcaaaacgaagaggagttccgctgctgcattcaggagcttctcatgtcagtccgtttctttctttcgcaagagagcaaagggtctggagcattatctcagtcacaggctgtgtttctgagctctttccctgccgtgtactcagaactgttgaagctctttgatgtccgggaagtagccaacttggtccaggacaccctgggcagtctgccgaccatcctgcatgtggatgattccctgcaggccatcaaactgcagtgcattggcaaaaccgtggaaagccagctttataccaacccagattcccgatacattcttctgcctgtcgtgttacatcacctccacattcacttgcaagaacagaaggacctgatcatgtgtgcacgtatccttagcaacgtattttgtcttatcaagaaaaatagctcagaaaaatctgtgctggaggaaatagatgtgatagtggccagcttgctggatattctgctgaggaccatattggagatcaccagccgacctcagccatccagctcagcaatgcggttccagttccaggatgtcactggggagtttgttgcttgtctcctgtccctattacgacaaatgacagatagacattatcaacagcttcttgatagttttaatacaaaggaagaactaagggatttcctgctgcagatatttactgtgttccgaatattgatacgcccggagatgtttccaaaggactggactgttatgcgcttggttgctaacaatgttattattacaacagttctatacctctcagatgcacttcgtaagaacttcttaaatgaaaactttgattataagatctgggattcctacttttacctcgcagtcatttttataaaccagttgtgtctgcagttggagatgttcacaccttccaagaagaaaaaggtgttagaaaagtatggtgacatgcgggtaacaatgggttgtgaaattttcagcatgtggcaaaacctaggagagcacaagcttcattttatccctgccctgattggccccttcctagaagtgaccttgataccccagccagatcttcggaatgtcatgattccaatttttcatgatatgatggactgggagcagaggcggagtggcaactttaaacaggtggaagccaagctaattgacaaactggatagcctgatgtcagaaggcaaaggtgacgaaacataccgcgagctcttcaacagtattctactaaagaaaattgagcgggaaacatggcgggaaagtggcgtttcattaattgctactgtaactcgtctaatggagaggttgttagattacagggactgcatgaaaatgggagaggtagatggcaaaaagattggctgcacagttagccttctgaacttctataagactgaactgaacaaggaggagatgtatatacgctacattcacaaactctatgatctgcatctcaaagcacagaactttacagaagctgcatataccctcctcttatatgacgagctactggaatggtctgatcggcccctcagggagttcctgacctaccccatgcaaacagaatggcagcgcaaagagcacctgcacctcaccatcatccagaactttgacagaggcaaatgttgggagaatggcattatcttgtgccggaagattgcagagcagtatgagagttattatgactacagaaacctgagcaagatgcggatgatggaagcctctttgtatgacaaaattatggaccagcaacgtcttgaaccagagttcttcagagttggattttatggaaaaaaatttccatttttcttaagaaataaggagtttgtgtgtcgagggcatgactacgagaggctggaagccttccaacagagaatgctgaacgagttcccccatgccatcgccatgcagcacgccaaccagcccgatgagaccatcttccaggcagaagctcagtatttgcagatatatgctgtgactcccattccagagagccaggaggtcctgcagagagagggtgttccggacaacatcaaaagcttctataaagtgaatcacatctggaaattccgctatgaccgaccatttcacaaaggcacaaaagataaagagaatgaattcaagagtctctgggtggagagaacgtcattatacttggtgcagagtttgcctggcatctctcgctggtttgaagtggaaaagcgtgaagtggtagaaatgagtcctctggaaaatgcaattgaagtgctagaaaataagaatcagcagctgaagactctgattagtcagtgtcagacaagacagatgcagaatattaatcccctgactatgtgcctgaatggagttatagatgctgcagttaatggtggcgtttccaggtatcaagaggcattctttgtcaaagaatatatcttaagtcaccctgaagatggggagaaaattgcacgattaagagagctgatgcttgagcaggcacagattctggaatttggtttggccgtgcatgagaagtttgtacctcaagatatgagaccccttcacaaaaagctggttgaccaattctttgtgatgaagtcgagcttagggatacaggagttctctgcttgtatgcaagccagtcctgtccattttcctaatggaagccctcgtgtgtgtagaaactcagcacctgcttctgtgagcccagatggtaccagggtaattcctagacgcagcccgttaagttacccagctgtcaaccgatattcttcctcctcactgtcctcacaagcttctgctgaagtaagcaatattacagggcaatcagaaagctctgatgaagtctttaacatgcagccaagtccatctacctcaagcttgagttctactcactcggcttcacctaatgtgacaagttctgctccatcgagtgccagagcttctcctttgttgtctgacaaacacaaacattcccgagaaaactcttgcctgtcaccaagagagagaccatgcagtgccatctatccaacacctgtggagccttcgcagaggatgctgtttaatcatattggagacggggccttgccacgcagtgacccaaatctctctgcacctgaaaaagctgtgaaccccacccctagcagctggagcctggacagtgggaaggaagccaagaacatgtcggatagtgggaaacttatctctccccctgtccctccaagacccacacagactgcttcaccagcaagacacacgacatcagtatccccctcgcctgccgggcgatctccattgaagggctctgtgcagtctttcaccccctctccagtggagtaccactcgccaggactcatctccaactcccctgtcttgtcgggcagctacagcagtgggatttcttctctcagccggtgcagcacgtcggaaacctcaggctttgaaaatcaggtgaatgaacagtcggcccccctgccggtgccagtgccggtgcccgtgccgagctacggcggggaggagccagtgcgcaaggagagcaagactccgcccccgtacagcgtctacgagcggactctgcggcgccccgtcccgctacctcacagcctctccatccccgtcacgtcggagccgcccgcgctgccccccaagcctctggcagcgcgatccagccacctggagaatggggcccggaggactgaccccggcccgcggcccaggcccctgccccgcaaggtctctcagttataa

SEQ ID NO: 1036 - protein, 1954 aa, Homo sapiens
VIASFRGTVPYGLSLEIGDTVQILEKCDGWYRGFALKNPNIKGIFPSSYVHLKNACVKNKGQFEMVIPTEDSVITEMTSTLRDWGTMWKQLYVRNEGDLFHRLWHIMNEILDLRRQVLVGHLTHDRMKDVKRHITARLDWGNEQLGLDLVPRKEYAMVDPEDISITELYRLMEHRHRKKDTPVQASSHHLFVQMKSLMCSNLGEELEVIFSLFDSKENRPISERFFLRLNRNGLPKAPDKPERHCSLFVDLGSSELRKDIYITVHIIRIGRMGAGEKKNACSVQYRRPFGCAVLSIADLLTGETKDDLILKVYMCNTESEWYQIHENIIKKLNARYNLTGSNAGLAVSLQLLHGDIEQIRREYSSVFSHGVSITRKLGFSNIIMPGEMRNDLYITIERGEFEKGGKSVARNVEVTMFIVDSSGQTLKDFISFGSGEPPASEYHSFVLYHNNSPRWSELLKLPIPVDKFRGAHIRFEFRHCSTKEKGEKKLFGFSFVPLMQEDGRTLPDGTHELIVHKCEENTNLQDTTRYLKLPFSKGIFLGNNNQAMKATKESFCITSFLCSTKLTQNGDMLDLLKWRTHPDKITGCLSKLKEIDGSEIVKFLQDTLDTLFGILDENSQKYGSKVFDSLVHIINLLQDSKFHHFKPVMDTYIESHFAGALAYRDLIKVLKWYVDRITEAERQEHIQEVLKAQEYIFKYIVQSRRLFSLATGGQNEEEFRCCIQELLMSVRFFLSQESKGSGALSQSQAVFLSSFPAVYSELLKLFDVREVANLVQDTLGSLPTILHVDDSLQAIKLQCIGKTVESQLYTNPDSRYILLPVVLHHLHIHLQEQKDLIMCARILSNVFCLIKKNSSEKSVLEEIDVIVASLLDILLRTILEITSRPQPSSSAMRFQFQDVTGEFVACLLSLLRQMTDRHYQQLLDSFNTKEELRDFLLQIFTVFRILIRPEMFPKDWTVMRLVANNVIITTVLYLSDALRKNFLNENFDYKIWDSYFYLAVIFINQLCLQLEMFTPSKKKKVLEKYGDMRVTMGCEIFSMWQNLGEHKLHFIPALIGPFLEVTLIPQPDLRNVMIPIFHDMMDWEQRRSGNFKQVEAKLIDKLDSLMSEGKGDETYRELFNSILLKKIERETWRESGVSLIATVTRLMERLLDYRDCMKMGEVDGKKIGCTVSLLNFYKTELNKEEMYIRYIHKLYDLHLKAQNFTEAAYTLLLYDELLEWSDRPLREFLTYPMQTEWQRKEHLHLTIIQNFDRGKCWENGIILCRKIAEQYESYYDYRNLSKMRMMEASLYDKIMDQQRLEPEFFRVGFYGKKFPFFLRNKEFVCRGHDYERLEAFQQRMLNEFPHAIAMQHANQPDETIFQAEAQYLQIYAVTPIPESQEVLQREGVPDNIKSFYKVNHIWKFRYDRPFHKGTKDKENEFKSLWVERTSLYLVQSLPGISRWFEVEKREVVEMSPLENAIEVLENKNQQLKTLISQCQTRQMQNINPLTMCLNGVIDAAVNGGVSRYQEAFFVKEYILSHPEDGEKIARLRELMLEQAQILEFGLAVHEKFVPQDMRPLHKKLVDQFFVMKSSLGIQEFSACMQASPVHFPNGSPRVCRNSAPASVSPDGTRVIPRRSPLSYPAVNRYSSSSLSSQASAEVSNITGQSESSDEVFNMQPSPSTSSLSSTHSASPNVTSSAPSSARASPLLSDKHKHSRENSCLSPRERPCSAIYPTPVEPSQRMLFNHIGDGALPRSDPNLSAPEKAVNPTPSSWSLDSGKEAKNMSDSGKLISPPVPPRPTQTASPARHTTSVSPSPAGRSPLKGSVQSFTPSPVEYHSPGLISNSPVLSGSYSSGISSLSRCSTSETSGFENQVNEQSAPLPVPVPVPVPSYGGEEPVRKESKTPPPYSVYERTLRRPVPLPHSLSIPVTSEPPALPPKPLAARSSHLENGARRTDPGPRPRPLPRKVSQL

SEQ ID NO: 1037 - DNA, 5892 bp, Homo sapiens
gttattgccagtttccgaggaaccgttccatatggcctgtcattggaaattggagatacagttcagatcctggagaagtgtgatggctggtacagaggatttgccttaaaaaacccaaatatcaagggtatatttccttccagctacgttcacttgaaaaatgcctgtgtaaagaacaaaggacaatttgaaatggttattcccactgaagactctgttatcacagaaatgacatcaacattaagagactggggaaccatgtggaaacaactctatgtgcgtaatgaaggcgatctcttccaccggctgtggcacatcatgaatgaaatcctggacctgaggcggcaggtgctggtgggccacctcacccacgaccggatgaaggacgtgaagcgccacattactgcccggcttgactggggcaatgaacaactgggactggacctggtgcctaggaaagagtacgcaatggtggatccggaagacatcagcattactgagctctaccgattgatggaacatcgacatcggaagaaagacaccccggtgcaggccagcagtcaccacctctttgtccagatgaagagcctcatgtgttccaacctgggagaggagctggaggtcatcttctcactctttgacagtaaagagaaccggccaatcagtgagagatttttcttgaggctgaatagaaacgggcttcccaaagcccctgataaaccggaacgacattgctccctctttgtggatttgggcagcagtgagctaagaaaggacatttatatcaccgtgcacattatccgaatcggtcgaatgggagcaggagaaaaaaagaatgcctgtagtgtccagtaccgacgaccctttggctgtgcagttcttagcatcgctgacctgctaacaggagagacaaaggatgacctcattctgaaagtatacatgtgtaacacagagagtgagtggtaccaaatccatgagaacatcatcaaaaagctgaatgcacgttataacttgactggctccaatgcaggtttagcagtttccttacagctattgcacggagacattgaacaaatcagaagggaatattcatcagtattttctcatggagtatccataacaaggaagctgggattttcaaatattattatgcctggtgaaatgaggaatgatttatatatcactattgaaaggggagaatttgagaaaggagggaagagcgtggccagaaatgtggaagttacgatgttcattgtagacagtagtggccaaaccctgaaggattttatctccttcggctctggggagccaccagccagtgagtaccactcctttgtgctttaccataacaacagtcccaggtggtctgaactgctgaaacttcccattcctgtggataaattccggggtgcacacatccgcttcgagtttcggcattgttccacaaaggagaaaggagagaagaagttgtttgggttttcttttgtccctctgatgcaagaagatggtaggactcttccagatggcactcatgagctcatcgtgcataagtgtgaagaaaacacaaatcttcaggatactacccgctacctcaaacttcccttttccaagggcattttccttgggaataataatcaagccatgaaggccacaaaggagtccttttgtattacatcttttctctgttccacaaaactcacacaaaatggtgatatgcttgatcttttgaaatggagaacccacccagacaagatcactggctgtctctctaaattaaaagaaattgatggctcagagatagtaaagtttctgcaggatacactggataccttatttggaattttagatgaaaattcccaaaaatatgggtctaaagtgtttgattctttggttcacataataaatttgctgcaagatagcaaatttcatcattttaaacctgtaatggacacttacattgagagtcattttgctggggcacttgcatacagagatctcatcaaagtgctcaaatggtacgtggaccggatcacagaagcagagcggcaagagcatatccaggaggtgctgaaggcacaagaatacatttttaagtatatagttcaatctcgaaggctgttttcccttgccactggtgggcaaaacgaagaggagttccgctgctgcattcaggagcttctcatgtcagtccgtttctttctttcgcaagagagcaaagggtctggagcattatctcagtcacaggctgtgtttctgagctctttccctgccgtgtactcagaactgttgaagctctttgatgtccgggaagtagccaacttggtccaggacaccctgggcagtctgccgaccatcctgcatgtggatgattccctgcaggccatcaaactgcagtgcattggcaaaaccgtggaaagccagctttataccaacccagattcccgatacattcttctgcctgtcgtgttacatcacctccacattcacttgcaagaacagaaggacctgatcatgtgtgcacgtatccttagcaacgtattttgtcttatcaagaaaaatagctcagaaaaatctgtgctggaggaaatagatgtgatagtggccagcttgctggatattctgctgaggaccatattggagatcaccagccgacctcagccatccagctcagcaatgcggttccagttccaggatgtcactggggagtttgttgcttgtctcctgtccctattacgacaaatgacagatagacattatcaacagcttcttgatagttttaatacaaaggaagaactaagggatttcctgctgcagatatttactgtgttccgaatattgatacgcccggagatgtttccaaaggactggactgttatgcgcttggttgctaacaatgttattattacaacagttctatacctctcagatgcacttcgtaagaacttcttaaatgaaaactttgattataagatctgggattcctacttttacctcgcagtcatttttataaaccagttgtgtctgcagttggagatgttcacaccttccaagaagaaaaaggtgttagaaaagtatggtgacatgcgggtaacaatgggttgtgaaattttcagcatgtggcaaaacctaggagagcacaagcttcattttatccctgccctgattggccccttcctagaagtgaccttgataccccagccagatcttcggaatgtcatgattccaatttttcatgatatgatggactgggagcagaggcggagtggcaactttaaacaggtggaagccaagctaattgacaaactggatagcctgatgtcagaaggcaaaggtgacgaaacataccgcgagctcttcaacagtataattccactatttggtccctatcctagtctactaaagaaaattgagcgggaaacatggcgggaaagtggcgtttcattaattgctactgtaactcgtctaatggagaggttgttagattacagggactgcatgaaaatgggagaggtagatggcaaaaagattggctgcacagttagccttctgaacttctataagactgaactgaacaaggaggagatgtatatacgctacattcacaaactctatgatctgcatctcaaagcacagaactttacagaagctgcatataccctcctcttatatgacgagctactggaatggtctgatcggcccctcagggagttcctgacctaccccatgcaaacagaatggcagcgcaaagagcacctgcacctcaccatcatccagaactttgacagaggcaaatgttgggagaatggcattatcttgtgccggaagattgcagagcagtatgagagttattatgactacagaaacctgagcaagatgcggatgatggaagcctctttgtatgacaaaattatggaccagcaacgtcttgaaccagagttcttcagagttggattttatggaaaaaaatttccatttttcttaagaaataaggagtttgtgtgtcgagggcatgactacgagaggctggaagccttccaacagagaatgctgaacgagttcccccatgccatcgccatgcagcacgccaaccagcccgatgagaccatcttccaggcagaagctcagtatttgcagatatatgctgtgactcccattccagagagccaggaggtcctgcagagagagggtgttccggacaacatcaaaagcttctataaagtgaatcacatctggaaattccgctatgaccgaccatttcacaaaggcacaaaagataaagagaatgaattcaagagtctctgggtggagagaacgtcattatacttggtgcagagtttgcctggcatctctcgctggtttgaagtggaaaagcgtgaagtggtagaaatgagtcctctggaaaatgcaattgaagtgctagaaaataagaatcagcagctgaagactctgattagtcagtgtcagacaagacagatgcagaatattaatcccctgactatgtgcctgaatggagttatagatgctgcagttaatggtggcgtttccaggtatcaagaggcattctttgtcaaagaatatatcttaagtcaccctgaagatggggagaaaattgcacgattaagagagctgatgcttgagcaggcacagattctggaatttggtttggccgtgcatgagaagtttgtacctcaagatatgagaccccttcacaaaaagctggttgaccaattctttgtgatgaagtcgagcttagggatacaggagttctctgcttgtatgcaagccagtcctgtccattttcctaatggaagccctcgtgtgtgtagaaactcagcacctgcttctgtgagcccagatggtaccagggtaattcctagacgcagcccgttaagttacccagctgtcaaccgatattcttcctcctcactgtcctcacaagcttctgctgaagtaagcaatattacagggcaatcagaaagctctgatgaagtctttaacatgcagccaagtccatctacctcaagcttgagttctactcactcggcttcacctaatgtgacaagttctgctccatcgagtgccagagcttctcctttgttgtctgacaaacacaaacattcccgagaaaactcttgcctgtcaccaagagagagaccatgcagtgccatctatccaacacctgtggagccttcgcagaggatgctgtttaatcatattggagacggggccttgccacgcagtgacccaaatctctctgcacctgaaaaagctgtgaaccccacccctagcagctggagcctggacagtgggaaggaagccaagaacatgtcggatagtgggaaacttatctctccccctgtccctccaagacccacacagactgcttcaccagcaagacacacgacatcagtatccccctcgcctgccgggcgatctccattgaagggctctgtgcagtctttcaccccctctccagtggagtaccactcgccaggactcatctccaactcccctgtcttgtcgggcagctacagcagtgggatttcttctctcagccggtgcagcacgtcggaaacctcaggctttgaaaatcaggtgaatgaacagtcggcccccctgccggtgccagtgccggtgcccgtgccgagctacggcggggaggagccagtgcgcaaggagagcaagactccgcccccgtacagcgtctacgagcggactctgcggcgccccgtcccgctacctcacagcctctccatccccgtcacgtcggagccgcccgcgctgccccccaagcctctggcagcgcgatccagccacctggagaatggggcccggaggactgaccccggcccgcggcccaggcccctgccccgcaaggtctctcagttataa

SEQ ID NO: 1038 - protein, 1963 aa, Homo sapiens
VIASFRGTVPYGLSLEIGDTVQILEKCDGWYRGFALKNPNIKGIFPSSYVHLKNACVKNKGQFEMVIPTEDSVITEMTSTLRDWGTMWKQLYVRNEGDLFHRLWHIMNEILDLRRQVLVGHLTHDRMKDVKRHITARLDWGNEQLGLDLVPRKEYAMVDPEDISITELYRLMEHRHRKKDTPVQASSHHLFVQMKSLMCSNLGEELEVIFSLFDSKENRPISERFFLRLNRNGLPKAPDKPERHCSLFVDLGSSELRKDIYITVHIIRIGRMGAGEKKNACSVQYRRPFGCAVLSIADLLTGETKDDLILKVYMCNTESEWYQIHENIIKKLNARYNLTGSNAGLAVSLQLLHGDIEQIRREYSSVFSHGVSITRKLGFSNIIMPGEMRNDLYITIERGEFEKGGKSVARNVEVTMFIVDSSGQTLKDFISFGSGEPPASEYHSFVLYHNNSPRWSELLKLPIPVDKFRGAHIRFEFRHCSTKEKGEKKLFGFSFVPLMQEDGRTLPDGTHELIVHKCEENTNLQDTTRYLKLPFSKGIFLGNNNQAMKATKESFCITSFLCSTKLTQNGDMLDLLKWRTHPDKITGCLSKLKEIDGSEIVKFLQDTLDTLFGILDENSQKYGSKVFDSLVHIINLLQDSKFHHFKPVMDTYIESHFAGALAYRDLIKVLKWYVDRITEAERQEHIQEVLKAQEYIFKYIVQSRRLFSLATGGQNEEEFRCCIQELLMSVRFFLSQESKGSGALSQSQAVFLSSFPAVYSELLKLFDVREVANLVQDTLGSLPTILHVDDSLQAIKLQCIGKTVESQLYTNPDSRYILLPVVLHHLHIHLQEQKDLIMCARILSNVFCLIKKNSSEKSVLEEIDVIVASLLDILLRTILEITSRPQPSSSAMRFQFQDVTGEFVACLLSLLRQMTDRHYQQLLDSFNTKEELRDFLLQIFTVFRILIRPEMFPKDWTVMRLVANNVIITTVLYLSDALRKNFLNENFDYKIWDSYFYLAVIFINQLCLQLEMFTPSKKKKVLEKYGDMRVTMGCEIFSMWQNLGEHKLHFIPALIGPFLEVTLIPQPDLRNVMIPIFHDMMDWEQRRSGNFKQVEAKLIDKLDSLMSEGKGDETYRELFNSIIPLFGPYPSLLKKIERETWRESGVSLIATVTRLMERLLDYRDCMKMGEVDGKKIGCTVSLLNFYKTELNKEEMYIRYIHKLYDLHLKAQNFTEAAYTLLLYDELLEWSDRPLREFLTYPMQTEWQRKEHLHLTIIQNFDRGKCWENGIILCRKIAEQYESYYDYRNLSKMRMMEASLYDKIMDQQRLEPEFFRVGFYGKKFPFFLRNKEFVCRGHDYERLEAFQQRMLNEFPHAIAMQHANQPDETIFQAEAQYLQIYAVTPIPESQEVLQREGVPDNIKSFYKVNHIWKFRYDRPFHKGTKDKENEFKSLWVERTSLYLVQSLPGISRWFEVEKREVVEMSPLENAIEVLENKNQQLKTLISQCQTRQMQNINPLTMCLNGVIDAAVNGGVSRYQEAFFVKEYILSHPEDGEKIARLRELMLEQAQILEFGLAVHEKFVPQDMRPLHKKLVDQFFVMKSSLGIQEFSACMQASPVHFPNGSPRVCRNSAPASVSPDGTRVIPRRSPLSYPAVNRYSSSSLSSQASAEVSNITGQSESSDEVFNMQPSPSTSSLSSTHSASPNVTSSAPSSARASPLLSDKHKHSRENSCLSPRERPCSAIYPTPVEPSQRMLFNHIGDGALPRSDPNLSAPEKAVNPTPSSWSLDSGKEAKNMSDSGKLISPPVPPRPTQTASPARHTTSVSPSPAGRSPLKGSVQSFTPSPVEYHSPGLISNSPVLSGSYSSGISSLSRCSTSETSGFENQVNEQSAPLPVPVPVPVPSYGGEEPVRKESKTPPPYSVYERTLRRPVPLPHSLSIPVTSEPPALPPKPLAARSSHLENGARRTDPGPRPRPLPRKVSQL

SEQ ID NO: 1039 - DNA, 1529 bp, Homo sapiens
gagagcgcagcgcgcagcccggtgcagccctggctttcccctcgctgcgcgcccgcgccccctttcgcgtccgcaaccagaagcccagtgcggcgccaggagccggacccgcgcccgcaccgctcccgggaccgcgaccccggccgcccagagatgaccgcgaccgaagccctcctgcgcgtcctcttgctcctgctggctttcggccacagcacctatggggctgaatgcttcccggcctgcaacccccaaaatggattctgcgaggatgacaatgtttgcaggtgccagcctggctggcagggtcccctttgtgaccagtgcgtgacctctcccggctgccttcacggactctgtggagaacccgggcagtgcatttgcaccgacggctgggacggggagctctgtgatagagatgttcgggcctgctcctcggccccctgtgccaacaacaggacctgcgtgagcctggacgatggcctctatgaatgctcctgtgcccccgggtactcgggaaaggactgccagaaaaaggacgggccctgtgtgatcaacggctccccctgccagcacggaggcacctgcgtggatgatgagggccgggcctcccatgcctcctgcctgtgcccccctggcttctcaggcaatttctgcgagatcgtggccaacagctgcacccccaacccatgcgagaacgacggcgtctgcactgacattgggggcgacttccgctgccggtgcccagccggcttcatcgacaagacctgcagccgcccggtgaccaactgcgccagcagcccgtgccagaacgggggcacctgcctgcagcacacccaggtgagctacgagtgtctgtgcaagcccgagttcacaggtctcacctgtgtcaagaagcgcgcgctgagcccccagcaggtcacccgtctgcccagcggctatgggctggcctaccgcctgacccctggggtgcacgagctgccggtgcagcagccggagcaccgcatcctgaaggtgtccatgaaagagctcaacaagaaaacccctctcctcaccgagggccaggccatctgcttcaccatcctgggcgtgctcaccagcctggtggtgctgggcactgtgggtatcgtcttcctcaacaagtgcgagacctgggtgtccaacctgcgctacaaccacatgctgcggaagaagaagaacctgctgcttcagtacaacagcggggaggacctggccgtcaacatcatcttccccgagaagatcgacatgaccaccttcagcaaggaggccggcgacgaggagatctaagcagcgttcccacagccccctctagattcttggagttccgcagagcttactatacgcggtctgtcctaatctttgtggtgttcgctatctcttgtgtcaaatctggtgaacgctacgcttacatatattgtctttgtgctgctgtgtgacaaacgcaatgcaaaaacaatcctctttctctctcttaatgcatgatacagaataataataagaatttcatcttt

SEQ ID NO: 1040 - protein, 383 aa, Homo sapiens
MTATEALLRVLLLLLAFGHSTYGAECFPACNPQNGFCEDDNVCRCQPGWQGPLCDQCVTSPGCLHGLCGEPGQCICTDGWDGELCDRDVRACSSAPCANNRTCVSLDDGLYECSCAPGYSGKDCQKKDGPCVINGSPCQHGGTCVDDEGRASHASCLCPPGFSGNFCEIVANSCTPNPCENDGVCTDIGGDFRCRCPAGFIDKTCSRPVTNCASSPCQNGGTCLQHTQVSYECLCKPEFTGLTCVKKRALSPQQVTRLPSGYGLAYRLTPGVHELPVQQPEHRILKVSMKELNKKTPLLTEGQAICFTILGVLTSLVVLGTVGIVFLNKCETWVSNLRYNHMLRKKKNLLLQYNSGEDLAVNIIFPEKIDMTTFSKEAGDEEI

SEQ ID NO: 1041 - DNA, 1053 bp, Homo sapiens
ctttcccctcgctgcgcgcccgcgccccctttcgcgtccgcaaccagaagcccagtgcggcgccaggagccggacccgcgcccgcaccgctcccgggaccgcgaccccggccgcccagagatgaccgcgaccgaagccctcctgcgcgtcctcttgctcctgctggctttcggccacagcacctatggggctgaatgcttcccggcctgcaacccccaaaatggattctgcgaggatgacaatgtttgcaggtgccagcctggctggcagggtcccctttgtgaccagtgcgtgacctctcccggctgccttcacggactctgtggagaacccgggcagtgcatttgcaccgacggctgggacggggagctctgtgatagagatgttcgggcctgctcctcggccccctgtgccaacaacaggacctgcgtgagcctggacgatggcctctatgaatgctcctgtgcccccgggtactcgggaaaggactgccagaaaaaggacgggccctgtgtgatcaacggctccccctgccagcacggaggcacctgcgtggatgatgagggccgggcctcccatgcctcctgcctgtgcccccctggcttctcaggcaatttctgcgagatcgtggccaacagctgcacccccaacccatgcgagaacgacggcgtctgcactgacattgggggcgacttccgctgccggtgcccagccggcttcatcgacaagacctgcagccgcccggtgaccaactgcgccagcagcccgtgccagaacgggggcacctgcctgcagcacacccagggccaggccatctgcttcaccatcctgggcgtgctcaccagcctggtggtgctgggcactgtgggtatcgtcttcctcaacaagtgcgagacctgggtgtccaacctgcgctacaaccacatgctgcggaagaagaagaacctgctgcttcagtacaacagcggggaggacctggccgtcaacatcatcttccccgagaagatcgacatgaccaccttcagcaaggaggccggcgacgaggagatctaa

SEQ ID NO: 1042 - protein, 310 aa, Homo sapiens
MTATEALLRVLLLLLAFGHSTYGAECFPACNPQNGFCEDDNVCRCQPGWQGPLCDQCVTSPGCLHGLCGEPGQCICTDGWDGELCDRDVRACSSAPCANNRTCVSLDDGLYECSCAPGYSGKDCQKKDGPCVINGSPCQHGGTCVDDEGRASHASCLCPPGFSGNFCEIVANSCTPNPCENDGVCTDIGGDFRCRCPAGFIDKTCSRPVTNCASSPCQNGGTCLQHTQGQAICFTILGVLTSLVVLGTVGIVFLNKCETWVSNLRYNHMLRKKKNLLLQYNSGEDLAVNIIFPEKIDMTTFSKEAGDEEI

SEQ ID NO: 1043 - DNA, 3748 bp, Homo sapiens
ggccggggtggggtggggcaggatgctggatggcccactgttctccgaggggcctgacagcccccgggagctccaggatgaggagtctggcagctgcctctgggtgcagaagtccaagctattggtgatagaagtgaagactatttcctgtcattatagtcgccgcgccccttctcgacagcccatggacttccaggccagccactgggctcgcgggttccagaaccgcacgtgtgggccgcgcccgggatccccacagccgccgccccgccggccctgggcctccagggtgctgcaggaggcgaccaactggcgggcggggcccctggccgaggtccgagctcgggagcaagagaaaaggaaagcggcgtcgcaggagcgggaggccaaggagaccgagcgaaaaaggcgcaaggctggtggggcccgacggagccccccgggtcgaccccgcccggagccccgcaacgcccctcgggtggcccagctggcagggctccctgctcccttgcggccggagcgcctggcgcctgtggggcgagcgccccgtccatccgcgcagccgcagagcgacccagggtcggcgtgggcggggccctggggaggtcggcggcccgggcccccaagctacgaggctcacctgctgctgagaggttctgccgggaccgccccacgacgccgctgggaccggccgccaccctacgtggctccaccttcttacgaaggcccccataggaccttggggactaagagaggccccgggaactctcaggtgcccacttcatcagccccagctgcgactccagccaggacagacggagggcgcacaaagaagaggctggatcctcggatctaccgggacgtcctcggggcttggggtctccgacaggggcaaggtctcttggggggatccccaggctgtggagcggccagagcaaggccagagcccggcaagggggtcgtggagaaaagcctggggctggctgctgctgacctgaacagtggtagcgacagccatccccaagccaaagctacagggagcgcaggcaccgagatagctcctgcggggtctgcaactgcggctccctgtgccccgcatcccgctcccagatccaggcaccacctcaagggctcgagggaagggaaagaaggagaacagatctggtttcccaaatgctggattccctcccctaaaaagcagccgccccgccatagccagacactccccagaccctgggctcccggaggcaccggatggagagaatctctgggtcttggagagggggcaggaccggagaccctggagggttggaaggcgacccgccgtgcccacaccttgccccgcagttcccagggcctgtcccgtggggaaggcgtctttgtcattgacgccacgtgcgtagtgatacgatcccaatatgttccaaccccccgaacccagcaggtgcagcttttgccctctggggtgacacgcgtggtgggggattcccccagccaatcgaagcccggcaaggaggagggtgaaggggccacggtctttccttccccttgtcaaaagcggctgtcgagcagtcgccttttacaccagcccggcgggggccgcgggggcgaagctgagggcgggaggccgggggactccacactggaggagcgcactttccgcatcttggggctcccggcccccgaagtaaacctgcgggacgcccccacgcagccaggtagcccagagcaccaagccttaggcccagcagcttcgggagcccagggcagagccgaggggtcggaagtggcggtggtccagcggcgcgccggccggggctgggcgcggaccccagggccctacgccggggccctgcgagaagccgtgtcccgtatccgccgccacacagcccctgactcggacacggacgaagctgaggagctcagcgtccatagcggctcctctgatggaagcgacacagaagccccgggcgcctcctggcggaatgagaggaccctgcccgaggttggaaacagttcgccagaggaagatgggaagacagcggaactgagcgacagtgtcggggagatcctagatgtcataagccaaaccgaggaggtcctcttcggggtgagggacatcagagggacccaacagggaaataggaagaggcagtgagaggccccttcttgtatttgtgtccccaacgcatccatccttgggtccactggtccccattcttccccacagacttcctttgcttctcttttccttgtatctttacccatacctgttctcatccttgaaatataaatgaaaggaagggaagcatatgcccattaatgattttgtttcaggagaggtgagaatgagcagatttaattaatgtctgttatgttcagggcacaagggtgagctcttcgcaggggctgatgcactgggtgtggagctgagcagagaggcctaaccaggatcaggcaggagggcagggatggtggcagccataggagggcagggtagggtagggcctctgaggaggagggaaaaagtgaaggagaggctttggacctggtgacagagtgatcagatgacagaggggttcttgggagaagaggcataggtccagcaacaaccaacaaagcagaaggagggctcaccttggtgtcacaagtcttggatttcaatcccaactctgccactgagttgctggttgactgaggccagtcactttccctctccaggcctccaggcctcctggtatataaaatgatggtattctaaggtccatccttccgtctctgacattttgagatctttggaaaggactctatctcatcctcccctcgacaagccaagaatgagaattgggaataagtgaacagagtttgagggtttctgggcggcctccgtgtcacccaaagtcatgatcaattcaggagactgcccaaggcttgcagaagaggtaagggagtgaggcactcctatcccagtctcccaggtttggttgagggctccccaaggcagggcaagatagcggccctgtcactgaccctggcctgtggtggtctgagctggggagggaaggacaccaatgaatcagcttgggacctctttaggccttccccttttcctccaccccgatgctccttagtgatgctctgaggcgtggccacgatctccctcccaggtggtatcgcccacctgaaaaaatcctgagaatttctcccatcttggcctcttccagaaaccggccaggcaaggaaagaggccggtcaccagaagccagcaggcgtggggtgtgatactctctatagccactacagggcgcgcgcaggtcgcggatctccccagttgctaatcccggctctgccactcaatcctatccctagttcccgagcgcgggtcccccgccttgcagtctccagccgtgcggggccgggagcaggcctccggcctcccagacttctagagcccgccgggcccatctttgtactcatccaccccagccggcttgggactcagacaccgaagtctttttttttttctctccgatccttggacacctcctctgtctgccatttattagccatgtgaacttggccacatcacttcacctccctgagcctcagtttcctcatctgtcaaatgggggtttataaacacctacctcgcagggttgttgtgaggatttaatgcgataatgtatgtaaagcgccttgcacactgcctggcacacagtaggcgctcaataaatctaagcttcccttt

SEQ ID NO: 1044 - protein, 657 aa, Homo sapiens
MDFQASHWARGFQNRTCGPRPGSPQPPPRRPWASRVLQEATNWRAGPLAEVRAREQEKRKAASQEREAKETERKRRKAGGARRSPPGRPRPEPRNAPRVAQLAGLPAPLRPERLAPVGRAPRPSAQPQSDPGSAWAGPWGGRRPGPPSYEAHLLLRGSAGTAPRRRWDRPPPYVAPPSYEGPHRTLGTKRGPGNSQVPTSSAPAATPARTDGGRTKKRLDPRIYRDVLGAWGLRQGQGLLGGSPGCGAARARPEPGKGVVEKSLGLAAADLNSGSDSHPQAKATGSAGTEIAPAGSATAAPCAPHPAPRSRHHLKGSREGKEGEQIWFPKCWIPSPKKQPPRHSQTLPRPWAPGGTGWRESLGLGEGAGPETLEGWKATRRAHTLPRSSQGLSRGEGVFVIDATCVVIRSQYVPTPRTQQVQLLPSGVTRVVGDSPSQSKPGKEEGEGATVFPSPCQKRLSSSRLLHQPGGGRGGEAEGGRPGDSTLEERTFRILGLPAPEVNLRDAPTQPGSPEHQALGPAASGAQGRAEGSEVAVVQRRAGRGWARTPGPYAGALREAVSRIRRHTAPDSDTDEAEELSVHSGSSDGSDTEAPGASWRNERTLPEVGNSSPEEDGKTAELSDSVGEILDVISQTEEVLFGVRDIRGTQQGNRKRQ

SEQ ID NO: 1045 - DNA, 1267 bp, Homo sapiens
gtcgcgcggcccagttcccttttccggtcggcgtggtcttgcgagtggagtgtccgctgtgcccgggcctgcaccatgagcgtcccggccttcatcgacatcagtgaagaagatcaggctgctgagcttcgtgcttatctgaaatctaaaggagctgagatttcagaagagaactcggaaggtggacttcatgttgatttagctcaaattattgaagcctgtgatgtgtgtctgaaggaggatgataaagatgttgaaagtgtgatgaacagtgtggtatccctactcttgatcctggaaccagacaagcaagaagctttgattgaaagcctatgtgaaaagctggtcaaatttcgcgaaggtgaacgcccgtctctgagactgcagttgttaagcaaccttttccacgggatggataagaatactcctgtaagatacacagtgtattgcagccttattaaagtggcagcatcttgtggggccatccagtacatcccaactgagctggatcaagttagaaaatggatttctgactggaatctcaccactgaaaaaaagcacacccttttaagactactttatgaggcacttgtggattgtaagaagagtgatgctgcttcaaaagtcatggtggaattgctcggaagttacacagaggacaatgcttcccaggctcgagttgatgcccacaggtgtattgtacgagcattgaaagatccaaatgcatttctttttgaccaccttcttactttaaaaccagtcaagtttttggaaggcgagcttattcatgatcttttaaccatttttgtgagtgctaaattggcatcatatgtcaagttttatcagaataataaagacttcattgattcacttggcctgttacatgaacagaatatggcaaaaatgagactacttacttttatgggaatggcagtagaaaataaggaaatttcttttgacacaatgcagcaagaacttcagattggagctgatgatgttgaagcatttgttattgacgccgtaagaactaaaatggtctactgcaaaattgatcagacccagagaaaagtagttgtcagtcatagcacacatcggacatttggaaaacagcagtggcaacaactgtatgacacacttaatgcctggaaacaaaatctgaacaaagtgaaaaacagccttttgagtctttctgatacctgagtttttatgcttataatttttgttctttgaaaaaaaagccctaaatcatagtaaaacattataaact

SEQ ID NO: 1046 - protein, 374 aa, Homo sapiens
MSVPAFIDISEEDQAAELRAYLKSKGAEISEENSEGGLHVDLAQIIEACDVCLKEDDKDVESVMNSVVSLLLILEPDKQEALIESLCEKLVKFREGERPSLRLQLLSNLFHGMDKNTPVRYTVYCSLIKVAASCGAIQYIPTELDQVRKWISDWNLTTEKKHTLLRLLYEALVDCKKSDAASKVMVELLGSYTEDNASQARVDAHRCIVRALKDPNAFLFDHLLTLKPVKFLEGELIHDLLTIFVSAKLASYVKFYQNNKDFIDSLGLLHEQNMAKMRLLTFMGMAVENKEISFDTMQQELQIGADDVEAFVIDAVRTKMVYCKIDQTQRKVVVSHSTHRTFGKQQWQQLYDTLNAWKQNLNKVKNSLLSLSDT

SEQ ID NO: 1047 - DNA, 1232 bp, Homo sapiens
gcgtggtcttgcgagtggagtgtccgctgtgcccgggcctgcaccatgagcgtcccggccttcatcgacatcagtgaagaagatcaggctgctgagcttcgtgcttatctgaaatctaaaggagctgagatttcagaagagaactcggaaggtggacttcatgttgatttagctcaaattattgaagcctgtgatgtgtgtctgaaggaggatgataaagatgttgaaagtgtgatgaacagtgtggtatccctactcttgatcctggaaccagacaagcaagaagctttgattgaaagcctatgtgaaaagctggtcaaatttcgcgaaggtgaacgcccgtctctgagactgcagttgttaagcaaccttttccacgggatggataagaatactcctgtaagatacacagtgtattgcagccttattaaagtggcagcatcttgtggggccatccagtacatcccaactgagctggatcaagttagaaaatggatttctgactggaatctcaccactgaaaaaaagcacacccttttaagactactttatgaggcacttgtggattgtaagaagagtgatgctgcttcaaaagtcatggtggaattgctcggaagttacacagaggacaatgcttcccaggctcgagttgatgcccacaggtgtattgtacgagcattgaaagatccaaatgcatttctttttgaccaccttcttactttaaaaccagtcaagtttttggaaggcgagcttattcatgatcttttaaccatttttgtgagtgctaaattggcatcatatgtcaagttttatcagaataataaagacttcattgattcacttggcctgttacatgaacagaatatggcaaaaatgagactacttacttttatgggaatggcagtagaaaataaggaaatttcttttgacacaatgcagcaagaacttcagattggagctgatgatgttgaagcatttgttattgacgccgtaagaactaaaatggtctactgcaaaattgatcagacccagagaaaagtagttgtcagtcatagcacacatcggacatttggaaaacagcagtggcaacaactgtatgacacacttaatgcctggaaacaaaatctgaacaaagtgaaaaacagccttttgagtctttctgatagtttttatgcttataatttttgttctttgaaaaaaaagccctaaatcatagtaaaacattataaact

SEQ ID NO: 1048 - protein, 203 aa, Homo sapiens
MVELLGSYTEDNASQARVDAHRCIVRALKDPNAFLFDHLLTLKPVKFLEGELIHDLLTIFVSAKLASYVKFYQNNKDFIDSLGLLHEQNMAKMRLLTFMGMAVENKEISFDTMQQELQIGADDVEAFVIDAVRTKMVYCKIDQTQRKVVVSHSTHRTFGKQQWQQLYDTLNAWKQNLNKVKNSLLSLSDSFYAYNFCSLKKKP

SEQ ID NO: 1049 - DNA, 3636 bp, Homo sapiens
gcgggagcccgcggcgagcgtagcgcaagtccgctccctaggcatcgctgcgctggcagcgattcgctgtctcttgtgagtcaggggacaacgcttcggggcaactgtgagtgcgcgtgtgggggacctcgattctcttcagatctcgaggattcggtccggggacgtctcctgatcccctactaaagcgcctgctaactttgaaaaggagcactgtgtcctgcaaagtttgacacataaaggataggaaaagagaggagagaaaagcaactgagttgaaggagaaggagctgatgcgggcctcctgatcaattaagaggagagttaaaccgccgagatcccggcgggaccaaggaggtgcggggcaagaaggaacggaagcggtgcgatccacagggctgggttttcttgcaccttgggtcacgcctccttggcgagaaagcgcctcgcatttgattgcttccagttattgcagaacttcctgtcctggtggagaagcgggtctcgcttgggttccgctaatttctgtcctgaggcgtgagactgagttcatagggtcctgggtccccgaaccaggaagggttgagggaacacaatctgcaagcccccgcgacccaagtgaggggccccgtgttggggtcctccctccctttgcattcccacccctccgggctttgcgtcttcctggggaccccctcgccgggagatggccgcgttgatgcggagcaaggattcgtcctgctgcctgctcctactggccgcggtgctgatggtggagagctcacagatcggcagttcgcgggccaaactcaactccatcaagtcctctctgggcggggagacgcctggtcaggccgccaatcgatctgcgggcatgtaccaaggactggcattcggcggcagtaagaagggcaaaaacctggggcaggcctacccttgtagcagtgataaggagtgtgaagttgggaggtattgccacagtccccaccaaggatcatcggcctgcatggtgtgtcggagaaaaaagaagcgctgccaccgagatggcatgtgctgccccagtacccgctgcaataatggcatctgtatcccagttactgaaagcatcttaacccctcacatcccggctctggatggtactcggcacagagatcgaaaccacggtcattactcaaaccatgacttgggatggcagaatctaggaagaccacacactaagatgtcacatataaaagggcatgaaggagacccctgcctacgatcatcagactgcattgaagggttttgctgtgctcgtcatttctggaccaaaatctgcaaaccagtgctccatcagggggaagtctgtaccaaacaacgcaagaagggttctcatgggctggaaattttccagcgttgcgactgtgcgaagggcctgtcttgcaaagtatggaaagatgccacctactcctccaaagccagactccatgtgtgtcagaaaatttgatcaccattgaggaacatcatcaattgcagactgtgaagttgtgtatttaatgcattatagcatggtggaaaataaggttcagatgcagaagaatggctaaaataagaaacgtgataagaatatagatgatcacaaaaagggagaaagaaaacatgaactgaatagattagaatgggtgacaaatgcagtgcagccagtgtttccattatgcaacttgtctatgtaaataatgtacacatttgtggaaaatgctattattaagagaacaagcacacagtggaaattactgatgagtagcatgtgactttccaagagtttaggttgtgctggaggagaggtttccttcagattgctgattgcttatacaaataacctacatgccagatttctattcaacgttagagtttaacaaaatactcctagaataacttgttatacaataggttctaaaaataaaattgctaaacaagaaatgaaaacatggagcattgttaatttacaacagaaaattaccttttgatttgtaacactacttctgctgttcaatcaagagtcttggtagataagaaaaaaatcagtcaatatttccaaataattgcaaaataatggccagttgtttaggaaggcctttaggaagacaaataaataacaaacaaacagccacaaatacttttttttcaaaattttagttttacctgtaattaataagaactgatacaagacaaaaacagttccttcagattctacggaatgacagtatatctctctttatcctatgtgattcctgctctgaatgcattatattttccaaactatacccataaattgtgactagtaaaatacttacacagagcagaattttcacagatggcaaaaaaatttaaagatgtccaatatatgtgggaaaagagctaacagagagatcattatttcttaaagattggccataacctgtattttgatagaattagattggtaaatacatgtattcatacatactctgtggtaatagagacttgagctggatctgtactgcactggagtaagcaagaaaattgggaaaactttttcgtttgttcaggttttggcaacacatagatcatatgtctgaggcacaagttggctgttcatctttgaaaccaggggatgcacagtctaaatgaatatctgcatgggatttgctatcataatatttactatgcagatgaattcagtgtgaggtcctgtgtccgtactatcctcaaattatttattttatagtgctgagatcctcaaataatctcaatttcaggaggtttcacaaaatggactcctgaagtagacagagtagtgaggtttcattgccctctataagcttctgactagccaatggcatcatccaattttcttcccaaacctctgcagcatctgctttattgccaaagggctagtttcggttttctgcagccattgcggttaaaaaatataagtaggataacttgtaaaacctgcatattgctaatctatagacaccacagtttctaaattctttgaaaccactttactactttttttaaacttaactcagttctaaatactttgtctggagcacaaaacaataaaaggttatcttatagtcgtgactttaaacttttgtagaccacaattcactttttagttttcttttacttaaatcccatctgcagtctcaaatttaagttctcccagtagagattgagtttgagcctgtatatctattaaaaatttcaacttcccacatatatttactaagatgattaagacttacattttctgcacaggtctgcaaaaacaaaaattataaactagtccatccaagaaccaaagtttgtataaacaggttgctataagcttggtgaaatgaaaatggaacatttcaatcaaacatttcctatataacaattattatatttacaatttggtttctgcaatatttttcttatgtccacccttttaaaaattattatttgaagtaatttatttacaggaaatgttaatgagatgtattttcttatagagatatttcttacagaaagctttgtagcagaatatatttgcagctattgactttgtaatttaggaaaaatgtataataagataaaatctattaaatttttctcctctaaaaactg

SEQ ID NO: 1050 - protein, 259 aa, Homo sapiens
MAALMRSKDSSCCLLLLAAVLMVESSQIGSSRAKLNSIKSSLGGETPGQAANRSAGMYQGLAFGGSKKGKNLGQAYPCSSDKECEVGRYCHSPHQGSSACMVCRRKKKRCHRDGMCCPSTRCNNGICIPVTESILTPHIPALDGTRHRDRNHGHYSNHDLGWQNLGRPHTKMSHIKGHEGDPCLRSSDCIEGFCCARHFWTKICKPVLHQGEVCTKQRKKGSHGLEIFQRCDCAKGLSCKVWKDATYSSKARLHVCQKI

SEQ ID NO: 1051 - DNA, 2172 bp, Homo sapiens
agcgagcggagcgcgggcggcggcgccgtacctcgggctgcgggagcgcgggcgccctggggtcctcggaatcacaatgaggacctagggcatctgtctgctgacgccccctggcctgcagtgaccatggccccccgcaagaggagccaccatggcctgggcttcctgtgctgcttcgggggcagtgacatccccgaaatcaacctccgggacaaccaccctctgcagttcatggagttctccagccccatcccgaacgcagaggagctcaacatccgctttgcagagctggtggatgaattggatctcactgacaaaaaccgagaggctatgtttgcactgccccctgagaagaaatggcagatctactgcagcaagaagaaggtgccctctctgacccctctggccacatctcagggttcatggcatggggtggctcttgctgccttggcatgctcatgcattcacctgatgtttattacatgccagccctgttctaggtgttggaggaacaacagtgaataaaatagaaaaaggaaattctgctgtcctggagcttacactcaaagaaataggattctctttttcaaaaacgcttaaagcaggacctgctgcatcccaggactggggcttgctgggagacagacaaagaagcagagtctggactctctcgtgcctgctcccaggcatggagggtgggcatcatggaccatacctggagcagctttgctataagaaatcagtttggggggcagggatgtcctcttttggatctttagtctccactctgtcccaggctagggctcacacatctgtccatgttctcctcagcatatcctccctctcttcttgctcattaaaagatgctgttagcctcctgctatggccctccctagaaaggggtatgctgagctccagtggggcttaattggacttgatctcctcccttctgctttcccagcggctgtgcattcttctctctgctgtctccatctccgtgtttcttcagcttgcctctgtctctacgtctctctcttgccccctttctattttagtctgtttcttttgctcctgaattttcttttcatggcctactttcctcctctcccctccaccctcccagttttcagacttgagtcccaagtctaaaacttgttattctgccctcctacattgctttggtgtttggggaccagagcctggctattcccacgcctgaggcttaggctccctccctcctgggaggagacaggaaggtctgggcggagtctgagccatgtatcctttgtgctcctgtgccccctcatagctcttctcttactcttcctgctgaagactttatcccattccgaggtctccacactgagccagactgaccttgtaacattggaggattcaaatatacaccatttcagagttgcaggaacctggaaaaccacacagtgtcgatgcagtctcattctttattctacaaatgaggccaagaaggcctagagaggcaaaactcacccacagcccacccagtccgttatggcaactggctgcccattgctagaacctgagactgctggggaaaatagtgctagaggctgaggacctgtgacaagaggcatgggctgcacacgctatgagccattgtctagtatactcaatgcatgcttattaagcacctgcagaatataacactctgtgtttatgcatctcattgtgagaaaagcaggtctttaaaaagctcaaatcatggaaagaaggaaggaaggaaagaaatttcaggcgtaattaatcatatctcatgattctccattttccaaattgatttactatggagttcccttaagttggtctcttctacagctgctaaaacaaacaaacaaacaaacaaaaaaatggccaggcatggtggctcatgcctgtaatcccagcactttgggaggccgaggtgggcagatcatctgaggttgggagttcgagaccagcctgaccaacatggagaaaccccatctctactaaaaaaatacaaaactagccaggtgtggtggcacatgcctgtaatcccagctactcgggaggctgaggcaggaaaatcacttgaacctgggaggtggagattgtggttagccgagatcatgccattgcactccagcctgggcaacaagagcgaaactccatctc

SEQ ID NO: 1052 - protein, 132 aa, Homo sapiens
MAPRKRSHHGLGFLCCFGGSDIPEINLRDNHPLQFMEFSSPIPNAEELNIRFAELVDELDLTDKNREAMFALPPEKKWQIYCSKKKVPSLTPLATSQGSWHGVALAALACSCIHLMFITCQPCSRCWRNNSE

SEQ ID NO: 1053 - DNA, 6218 bp, Homo sapiens
caggaaaggggtccccggactctggggctctcagcacctgcggtcgcaaaccaacctcatgccctgactttaccaggcgtcgggactctgacttaaccggggaatgagggacttggtctggcggcagatcacaatgaggacctagggcatctgtctgctgacgccccctggcctgcagtgaccatggccccccgcaagaggagccaccatggcctgggcttcctgtgctgcttcgggggcagtgacatccccgaaatcaacctccgggacaaccaccctctgcagttcatggagttctccagccccatcccgaacgcagaggagctcaacatccgctttgcagagctggtggatgaattggatctcactgacaaaaaccgagaggctatgtttgcactgccccctgagaagaaatggcagatctactgcagcaagaagaaggagcaggaggaccccaacaagctggcaaccagctggcctgactattacatcgaccgcatcaattccatggctgcgatgcagagtctgtacgcgtttgatgaggaggagacggagatgaggaaccaagtcgtggaagacctgaagacagccctccggacacagcctatgaggtttgtgacccgcttcattgagctggagggcttgacctgtctgctaaatttcctccggagcatggaccacgccacctgtgagagccgcatccacacctcactcattggctgcatcaaagcattgatgaacaactcccaggggcgggcacatgtgctggcacagcctgaggccattagtaccatagcccagagcctacgcacagagaacagcaagaccaaggtggctgtgctggagatcctgggtgctgtgtgcctcgtgcctggtggccacaagaaggtgctgcaggccatgctgcactaccaggtgtatgcagcagagcgaacccgcttccagaccctgctgaacgagctagaccgaagtctgggccggtaccgggatgaagtgaatctgaaaacagccatcatgtccttcatcaatgctgtcctcaatgctggagctggagaggataatctggagttccgcctacatctacggtatgaattcctgatgctgggtatacagcctgtgattgacaagctccggcaacatgaaaatgccatcctggacaaacatttagacttcttcgagatggtgcggaatgaggatgacctggagctagccaggaggtttgacatggtccacatcgacaccaagagtgcttcccagatgtttgagttgatccacaagaagctgaagtacacggaggcctacccctgcctgctctctgtgctgcaccactgcctgcagatgccctacaaacggaacggtggctacttccagcagtggcagctcctggaccgcatcctccagcagattgtcctccaggatgagcggggtgtggaccctgacctggctcccttggagaacttcaatgtcaagaacatcgtcaacatgctcatcaacgagaatgaagtgaaacagtggcgagaccaggcagagaagttccggaaagaacacatggagcttgtgagccgtctggagaggaaggagcgggaatgcgagacaaagacattggagaaggaagagatgatgcggacgctgaacaaaatgaaggacaagctggcccgggagtcccaggagctgcgccaggctcggggacaagtggcagagctggtagcccagctcagtgaactctcaacaggccctgtatcttccccaccaccccctgggggcccactcaccttgtcttcctcaatgacaaccaatgacctgcctccaccccctcctcctctgccctttgcctgttgtccccctcccccaccaccaccccttcctcccgggggacccccgactcccccaggtgccccaccttgcctcggcatgggcctgcccctccctcaggacccctaccccagcagtgacgtcccactcaggaaaaagcgtgtcccccagccttctcacccactgaagtccttcaactgggtgaagctgaatgaggagcgtgtccctggcaccgtatggaatgagattgatgacatgcaggtatttcggatcctggacctagaggattttgaaaagatgttttcagcctaccagaggcaccagaaagagctgggctccactgaagacatctacctggcttcccgcaaggtcaaagagctgtcggtcattgatggccggagggcccaaaactgcatcatccttctttccaagttgaagctttctaacgaggagatccggcaggccatcttgaagatggatgagcaggaggaccttgctaaggacatgctggagcagctcctcaagttcatcccagagaagagtgacattgacctcctggaggagcacaagcatgaaattgagcggatggcccgtgctgaccgcttcctctatgaaatgagcaggattgaccactaccagcagcgactgcaagccctcttcttcaagaagaaattccaggagcggctggctgaggcaaagcccaaagtggaagccatcctgttggcctcccgggagctggtccgcagcaagcgtcttagacagatgctagaggtcatcctagccataggcaacttcatgaacaaagggcagcgtgggggcgcctacgggttccgggtggccagcctcaacaagatcgctgacaccaagtccagcatcgacagaaacatctctctgctccattacctgatcatgatcctggagaagcattttcctgatattctaaacatgccttcagagctgcaacatcttccagaagctgccaaagtcaacctagcagaactggagaaggaggtgggcaacctcaggaggggcctgagagcggtggaggtggagctggagtatcagaggcgccaggtacgggagcccagtgacaagtttgtccctgtcatgagcgacttcatcacggtgtccagcttcagcttctccgagctggaggaccagctaaatgaggccagggacaagttcgccaaggccttgatgcacttcggggagcatgacagcaagatgcagccagacgaattctttggcatctttgataccttcttgcaggccttctcagaggcccggcaggatctagaggccatgaggaggaggaaggaggaggaggagcggcgggcgcgcatggaagccatgctgaaggagcagagggaacgtgagcggtggcagcggcagcggaaggtcctggctgcaggcagctcgctggaggagggaggagagttcgatgacctggtgtcggccctgcgctctggggaggtcttcgacaaggacttatgcaagctcaagcgcagccgcaagcgatcagggagccaggccctggaagttacccgggagcgggcaataaaccggctaaattattgacctggggaactagccacacaggaggccgggagacagggactggtgagaatggggctgagtggaggaggtggtgatatttaaaccatttggtgcttggtttagagccttgggctgggtcctgggatggggggctgtgtgtggctggaccaggtgtctccccacgcttaccttaaggggctcctcttatctccccttcacatgattccttctgtgccctggccccaggtattattctgaggctgccttggatggcctcaggccaggtaaccccaggctgaaggggccctgctccccatcccctaccatgggcacccatgtgctggcacagaacagttccagatctagactggagaggtccacagccttgtccagagttcctgtgtagcacggggagcaatgatggagggagcccctgagagggaatctggtgagggaatccagactcccttctctcaaggggaggctcaacagaacattgacctgggggcaaactttcctcttgaatgggaacagaggaggcattatatattctagttagatcagctctggtaggttccagagaacagtcaatgttggaaggatgatgcagggaccaaagccatcaggacagagtagcagtgtctgtttcccatgtcacaagtcctctggcctctccctgcatgtcttaagtatctttcccttccttctctaccctcacctccatcctgtctactaatccacagtcctagaagactcaccttgggtttccacagctatggctcactaccaggtgcttgatgaatctggcgaggggctcaagacagacctcatgcatcaccacacctcatgccttttgggcatctcccatgtccccatctcctggacacctggccattgttgtgaagccagacagtgacctcaaatgttgccttggagtcccctacagcccctcagcagagggcagcacttgaatgcttagctccatcccatagttctctacttcatataaattgctcaggccctcccaccccttctctaacactagcttcaaggcagaagccacagcagcctctgtccagcctgcaggtggccacttggaaccatgtgtccactggcgttggggagttggttcctgagaggtctgagggccagagctgccctctacattaacatgctgtctctaagggtggcccctcctctcaggcgttcagatggtgcgaacagcagagcaggcaagggaaactggggagatggggatggaggaggaaggctgatatcctctggggagcacatcacctgaaggtgccaaggaggaaggctgagaggggggccaccccatttctggtacccaatttggttcttcagcccaacttgcaaggggttccttctggtcctcccatccactgccaccttccattttgtccatctcatgctggccttggtggatgggatggctgtatctagacaaaatttttctaaaactccatcaaggctcttattcaataccacgttccgagttggcctttcatcttctttgagactggccctgcctaacctctaccatcaatgagctcttggcccttctgcccttccctgtgtttctcactttccaacctaatccctggctcagggttattgccagtggagactggtgagctgggcctactctcagctgcctatcttctgcctttcacttgcatccaactcctggggctgggaccgtagtagctgcgggggggaagaaacacagggtcggtgagcccagcatgtgcgttggtttgagggggcgggcggtgtgtgtgtgttctggtgggagggatctgagcaagtgcaagcctggctgacacaggtgtgaagaggccatcctggaacccaggtgagggcaagatgaaggcttccaggcagaacagctgcagagagtttggctatatgcatctgcagccccaagagctcccactgcaagacaagtgttggggaagatgggaggttgtgggtgaggcctctaaaggtcctctcccaaactgaccaggctgatgtcaacctaaccccctcaggggcagggaacaggggagggctccacaagcgtgtctggcattcccacccaccatggaagactggatacgcacctggaaacaaaaggactatggaagctgttcaagatacatttgatcttcagaaaagcagaatttggttcaactgttgacagaggacacaaatacgttgttccagagctcagccttctcactctaaaagaaagatatttttctatttattttctacatctggccagtggctctggtgctagatgccactgtagccagatctccaacagtgccttggaccatggactcatactcaactgagtaagaaggggctggtgcccagtcggggtggctgagctggtccttaataggttgtttcttggtcttgctttcttcatgccctccccactgctcctgccacctttagataagtttctctagctaattttgtggccaatgtaaaattcgtcatcaacctaacaaacacaaccttctcagcagcatttctcccctgtgatggaaataaagtgtttagggcagtgggaggagaaaattctccaggtgaatggggaagggtctgttccagcctctccctactcccatcccatttccaccaactggggaactgtgactatctatctcccccgacttctaccagggatgccttcacgccaaggctgttctcaccagctgcctcagatgacaaatgaggctaatggacataatctacagtgtcctttttcacttgcaccttttttataagaatatattgtaatactaaaaaatattaaattcataccatcccta

SEQ ID NO: 1054 - protein, 1068 aa, Homo sapiens
MAPRKRSHHGLGFLCCFGGSDIPEINLRDNHPLQFMEFSSPIPNAEELNIRFAELVDELDLTDKNREAMFALPPEKKWQIYCSKKKEQEDPNKLATSWPDYYIDRINSMAAMQSLYAFDEEETEMRNQVVEDLKTALRTQPMRFVTRFIELEGLTCLLNFLRSMDHATCESRIHTSLIGCIKALMNNSQGRAHVLAQPEAISTIAQSLRTENSKTKVAVLEILGAVCLVPGGHKKVLQAMLHYQVYAAERTRFQTLLNELDRSLGRYRDEVNLKTAIMSFINAVLNAGAGEDNLEFRLHLRYEFLMLGIQPVIDKLRQHENAILDKHLDFFEMVRNEDDLELARRFDMVHIDTKSASQMFELIHKKLKYTEAYPCLLSVLHHCLQMPYKRNGGYFQQWQLLDRILQQIVLQDERGVDPDLAPLENFNVKNIVNMLINENEVKQWRDQAEKFRKEHMELVSRLERKERECETKTLEKEEMMRTLNKMKDKLARESQELRQARGQVAELVAQLSELSTGPVSSPPPPGGPLTLSSSMTTNDLPPPPPPLPFACCPPPPPPPLPPGGPPTPPGAPPCLGMGLPLPQDPYPSSDVPLRKKRVPQPSHPLKSFNWVKLNEERVPGTVWNEIDDMQVFRILDLEDFEKMFSAYQRHQKELGSTEDIYLASRKVKELSVIDGRRAQNCIILLSKLKLSNEEIRQAILKMDEQEDLAKDMLEQLLKFIPEKSDIDLLEEHKHEIERMARADRFLYEMSRIDHYQQRLQALFFKKKFQERLAEAKPKVEAILLASRELVRSKRLRQMLEVILAIGNFMNKGQRGGAYGFRVASLNKIADTKSSIDRNISLLHYLIMILEKHFPDILNMPSELQHLPEAAKVNLAELEKEVGNLRRGLRAVEVELEYQRRQVREPSDKFVPVMSDFITVSSFSFSELEDQLNEARDKFAKALMHFGEHDSKMQPDEFFGIFDTFLQAFSEARQDLEAMRRRKEEEERRARMEAMLKEQRERERWQRQRKVLAAGSSLEEGGEFDDLVSALRSGEVFDKDLCKLKRSRKRSGSQALEVTRERAINRLNY

SEQ ID NO: 1055 - DNA, 6251 bp, Homo sapiens
aggaaaggggtccccggactctggggctctcagcacctgcggtcgcaaaccaacctcatgccctgactttaccaggcgtcgggactctgacttaaccggggaatgagggacttggtctggcggcagatcacaatgaggacctagggcatctgtctgctgacgccccctggcctgcagtgaccatggccccccgcaagaggagccaccatggcctgggcttcctgtgctgcttcgggggcagtgacatccccgaaatcaacctccgggacaaccaccctctgcagttcatggagttctccagccccatcccgaacgcagaggagctcaacatccgctttgcagagctggtggatgaattggatctcactgacaaaaaccgagaggctatgtttgcactgccccctgagaagaaatggcagatctactgcagcaagaagaaggagcaggaggaccccaacaagctggcaaccagctggcctgactattacatcgaccgcatcaattccatggctgcgatgcagagtctgtacgcgtttgatgaggaggagacggagatgaggaaccaagtcgtggaagacctgaagacagccctccggacacagcctatgaggtttgtgacccgcttcattgagctggagggcttgacctgtctgctaaatttcctccggagcatggaccacgccacctgtgagagccgcatccacacctcactcattggctgcatcaaagcattgatgaacaactcccaggggcgggcacatgtgctggcacagcctgaggccattagtaccatagcccagagcctacgcacagagaacagcaagaccaaggtggctgtgctggagatcctgggtgctgtgtgcctcgtgcctggtggccacaagaaggtgctgcaggccatgctgcactaccaggtgtatgcagcagagcgaacccgcttccagaccctgctgaacgagctagaccgaagtctgggccggtaccgggatgaagtgaatctgaaaacagccatcatgtccttcatcaatgctgtcctcaatgctggagctggagaggataatctggagttccgcctacatctacggtatgaattcctgatgctgggtatacagcctgtgattgacaagctccggcaacatgaaaatgccatcctggacaaacatttagacttcttcgagatggtgcggaatgaggatgacctggagctagccaggaggtttgacatggtccacatcgacaccaagagtgcttcccagatgtttgagttgatccacaagaagctgaagtacacggaggcctacccctgcctgctctctgtgctgcaccactgcctgcagatgccctacaaacggaacggtggctacttccagcagtggcagctcctggaccgcatcctccagcagattgtcctccaggatgagcggggtgtggaccctgacctggctcccttggagaacttcaatgtcaagaacatcgtcaacatgctcatcaacgagaatgaagtgaaacagtggcgagaccaggcagagaagttccggaaagaacacatggagcttgtgagccgtctggagaggaaggagcgggaatgcgagacaaagacattggagaaggaagagatgatgcggacgctgaacaaaatgaaggacaagctggcccgggagtcccaggagctgcgccaggctcggggacaagtggcagagctggtagcccagctcagtgaactctcaacaggccctgtatcttccccaccaccccctgggggcccactcaccttgtcttcctcaatgacaaccaatgacctgcctccaccccctcctcctctgccctttgcctgttgtccccctcccccaccaccaccccttcctcccgggggacccccgactcccccaggtgccccaccttgcctcggcatgggcctgcccctccctcaggacccctaccccagcagtgacgtcccactcaggaaaaagcgtgtcccccagccttctcacccactgaagtccttcaactgggtgaagctgaatgaggagcgtgtccctggcaccgtatggaatgagattgatgacatgcaggtatttcggatcctggacctagaggattttgaaaagatgttttcagcctaccagaggcaccaggagctgataactaatccttctcagcagaaagagctgggctccactgaagacatctacctggcttcccgcaaggtcaaagagctgtcggtcattgatggccggagggcccaaaactgcatcatccttctttccaagttgaagctttctaacgaggagatccggcaggccatcttgaagatggatgagcaggaggaccttgctaaggacatgctggagcagctcctcaagttcatcccagagaagagtgacattgacctcctggaggagcacaagcatgaaattgagcggatggcccgtgctgaccgcttcctctatgaaatgagcaggattgaccactaccagcagcgactgcaagccctcttcttcaagaagaaattccaggagcggctggctgaggcaaagcccaaagtggaagccatcctgttggcctcccgggagctggtccgcagcaagcgtcttagacagatgctagaggtcatcctagccataggcaacttcatgaacaaagggcagcgtgggggcgcctacgggttccgggtggccagcctcaacaagatcgctgacaccaagtccagcatcgacagaaacatctctctgctccattacctgatcatgatcctggagaagcattttcctgatattctaaacatgccttcagagctgcaacatcttccagaagctgccaaagtcaacctagcagaactggagaaggaggtgggcaacctcaggaggggcctgagagcggtggaggtggagctggagtatcagaggcgccaggtacgggagcccagtgacaagtttgtccctgtcatgagcgacttcatcacggtgtccagcttcagcttctccgagctggaggaccagctaaatgaggccagggacaagttcgccaaggccttgatgcacttcggggagcatgacagcaagatgcagccagacgaattctttggcatctttgataccttcttgcaggccttctcagaggcccggcaggatctagaggccatgaggaggaggaaggaggaggaggagcggcgggcgcgcatggaagccatgctgaaggagcagagggaacgtgagcggtggcagcggcagcggaaggtcctggctgcaggcagctcgctggaggagggaggagagttcgatgacctggtgtcggccctgcgctctggggaggtcttcgacaaggacttatgcaagctcaagcgcagccgcaagcgatcagggagccaggccctggaagttacccgggagcgggcaataaaccggctaaattattgacctggggaactagccacacaggaggccgggagacagggactggtgagaatggggctgagtggaggaggtggtgatatttaaaccatttggtgcttggtttagagccttgggctgggtcctgggatggggggctgtgtgtggctggaccaggtgtctccccacgcttaccttaaggggctcctcttatctccccttcacatgattccttctgtgccctggccccaggtattattctgaggctgccttggatggcctcaggccaggtaaccccaggctgaaggggccctgctccccatcccctaccatgggcacccatgtgctggcacagaacagttccagatctagactggagaggtccacagccttgtccagagttcctgtgtagcacggggagcaatgatggagggagcccctgagagggaatctggtgagggaatccagactcccttctctcaaggggaggctcaacagaacattgacctgggggcaaactttcctcttgaatgggaacagaggaggcattatatattctagttagatcagctctggtaggttccagagaacagtcaatgttggaaggatgatgcagggaccaaagccatcaggacagagtagcagtgtctgtttcccatgtcacaagtcctctggcctctccctgcatgtcttaagtatctttcccttccttctctaccctcacctccatcctgtctactaatccacagtcctagaagactcaccttgggtttccacagctatggctcactaccaggtgcttgatgaatctggcgaggggctcaagacagacctcatgcatcaccacacctcatgccttttgggcatctcccatgtccccatctcctggacacctggccattgttgtgaagccagacagtgacctcaaatgttgccttggagtcccctacagcccctcagcagagggcagcacttgaatgcttagctccatcccatagttctctacttcatataaattgctcaggccctcccaccccttctctaacactagcttcaaggcagaagccacagcagcctctgtccagcctgcaggtggccacttggaaccatgtgtccactggcgttggggagttggttcctgagaggtctgagggccagagctgccctctacattaacatgctgtctctaagggtggcccctcctctcaggcgttcagatggtgcgaacagcagagcaggcaagggaaactggggagatggggatggaggaggaaggctgatatcctctggggagcacatcacctgaaggtgccaaggaggaaggctgagaggggggccaccccatttctggtacccaatttggttcttcagcccaacttgcaaggggttccttctggtcctcccatccactgccaccttccattttgtccatctcatgctggccttggtggatgggatggctgtatctagacaaaatttttctaaaactccatcaaggctcttattcaataccacgttccgagttggcctttcatcttctttgagactggccctgcctaacctctaccatcaatgagctcttggcccttctgcccttccctgtgtttctcactttccaacctaatccctggctcagggttattgccagtggagactggtgagctgggcctactctcagctgcctatcttctgcctttcacttgcatccaactcctggggctgggaccgtagtagctgcgggggggaagaaacacagggtcggtgagcccagcatgtgcgttggtttgagggggcgggcggtgtgtgtgtgttctggtgggagggatctgagcaagtgcaagcctggctgacacaggtgtgaagaggccatcctggaacccaggtgagggcaagatgaaggcttccaggcagaacagctgcagagagtttggctatatgcatctgcagccccaagagctcccactgcaagacaagtgttggggaagatgggaggttgtgggtgaggcctctaaaggtcctctcccaaactgaccaggctgatgtcaacctaaccccctcaggggcagggaacaggggagggctccacaagcgtgtctggcattcccacccaccatggaagactggatacgcacctggaaacaaaaggactatggaagctgttcaagatacatttgatcttcagaaaagcagaatttggttcaactgttgacagaggacacaaatacgttgttccagagctcagccttctcactctaaaagaaagatatttttctatttattttctacatctggccagtggctctggtgctagatgccactgtagccagatctccaacagtgccttggaccatggactcatactcaactgagtaagaaggggctggtgcccagtcggggtggctgagctggtccttaataggttgtttcttggtcttgctttcttcatgccctccccactgctcctgccacctttagataagtttctctagctaattttgtggccaatgtaaaattcgtcatcaacctaacaaacacaaccttctcagcagcatttctcccctgtgatggaaataaagtgtttagggcagtgggaggagaaaattctccaggtgaatggggaagggtctgttccagcctctccctactcccatcccatttccaccaactggggaactgtgactatctatctcccccgacttctaccagggatgccttcacgccaaggctgttctcaccagctgcctcagatgacaaatgaggctaatggacataatctacagtgtcctttttcacttgcaccttttttataagaatatattgtaatactaaaaaatattaaattcataccatccctacccagtc

SEQ ID NO: 1056 - protein, 1077 aa, Homo sapiens
MAPRKRSHHGLGFLCCFGGSDIPEINLRDNHPLQFMEFSSPIPNAEELNIRFAELVDELDLTDKNREAMFALPPEKKWQIYCSKKKEQEDPNKLATSWPDYYIDRINSMAAMQSLYAFDEEETEMRNQVVEDLKTALRTQPMRFVTRFIELEGLTCLLNFLRSMDHATCESRIHTSLIGCIKALMNNSQGRAHVLAQPEAISTIAQSLRTENSKTKVAVLEILGAVCLVPGGHKKVLQAMLHYQVYAAERTRFQTLLNELDRSLGRYRDEVNLKTAIMSFINAVLNAGAGEDNLEFRLHLRYEFLMLGIQPVIDKLRQHENAILDKHLDFFEMVRNEDDLELARRFDMVHIDTKSASQMFELIHKKLKYTEAYPCLLSVLHHCLQMPYKRNGGYFQQWQLLDRILQQIVLQDERGVDPDLAPLENFNVKNIVNMLINENEVKQWRDQAEKFRKEHMELVSRLERKERECETKTLEKEEMMRTLNKMKDKLARESQELRQARGQVAELVAQLSELSTGPVSSPPPPGGPLTLSSSMTTNDLPPPPPPLPFACCPPPPPPPLPPGGPPTPPGAPPCLGMGLPLPQDPYPSSDVPLRKKRVPQPSHPLKSFNWVKLNEERVPGTVWNEIDDMQVFRILDLEDFEKMFSAYQRHQELITNPSQQKELGSTEDIYLASRKVKELSVIDGRRAQNCIILLSKLKLSNEEIRQAILKMDEQEDLAKDMLEQLLKFIPEKSDIDLLEEHKHEIERMARADRFLYEMSRIDHYQQRLQALFFKKKFQERLAEAKPKVEAILLASRELVRSKRLRQMLEVILAIGNFMNKGQRGGAYGFRVASLNKIADTKSSIDRNISLLHYLIMILEKHFPDILNMPSELQHLPEAAKVNLAELEKEVGNLRRGLRAVEVELEYQRRQVREPSDKFVPVMSDFITVSSFSFSELEDQLNEARDKFAKALMHFGEHDSKMQPDEFFGIFDTFLQAFSEARQDLEAMRRRKEEEERRARMEAMLKEQRERERWQRQRKVLAAGSSLEEGGEFDDLVSALRSGEVFDKDLCKLKRSRKRSGSQALEVTRERAINRLNY

SEQ ID NO: 1057 - DNA, 3734 bp, Homo sapiens
caaatgcgaacttaggctgttacacaactgctggggtctgttctcgccgcccgcccggcagtcaggcagcgtcgccgccgtggtagcagcctcagccgtttctggagtctcgggcccacagtcaccgccgcttacctgcgcctcctcgagcctccggagtccccgtccgcccgcacaggccggttcgccgtctgcgtctcccccacgccgcctcgcctgccgccgcgctcgtccctccgggccgacatgagtggggaccacctccacaacgattcccagatcgaagcggatttccgattgaatgattctcataaacacaaagataaacacaaagatcgagaacaccggcacaaagaacacaagaaggagaaggaccgggaaaagtccaagcatagcaacagtgaacataaagattctgaaaagaaacacaaagagaaggagaagaccaaacacaaagatggaagctcagaaaagcataaagacaaacataaagacagagacaaggaaaaacgaaaagaggaaaaggttcgagcctctggggatgcaaaaataaagaaggagaaggaaaatggcttctctagtccaccacaaattaaagatgaacctgaagatgatggctattttgttcctcctaaagaggatataaagccattaaagagacctcgagatgaggatgatgctgattataaacctaagaaaattaaaacagaagataccaagaaggagaagaaaagaaaactagaagaagaagaggatggtaaattgaaaaaacccaagaataaagataaagataaaaaagttcctgagccagataacaagaaaaagaagccgaagaaagaagaggaacagaagtggaaatggtgggaagaagagcgctatcctgaaggcatcaagtggaaattcctagaacataaaggtccagtatttgccccaccatatgagcctcttccagagaatgtcaagttttattatgatggtaaagtcatgaagctgagccccaaagcagaggaagtagctacgttctttgcaaaaatgctcgaccatgaatatactaccaaggaaatatttaggaaaaatttctttaaagactggagaaaggaaatgactaatgaagagaagaatattatcaccaacctaagcaaatgtgattttacccagatgagccagtatttcaaagcccagacggaagctcggaaacagatgagcaaggaagagaaactgaaaatcaaagaggagaatgaaaaattactgaaagaatatggattctgtattatggataaccacaaagagaggattgctaacttcaagatagagcctcctggacttttccgtggccgcggcaaccaccccaagatgggcatgctgaagagacgaatcatgcccgaggatataatcatcaactgtagcaaagatgccaaggttccttctcctcctccaggacataagtggaaagaagtccggcatgataacaaggttacttggctggtttcctggacagagaacatccaaggttccattaaatacatcatgcttaaccctagttcacgaatcaagggtgagaaggactggcagaaatacgagactgctcggcggctgaaaaaatgtgtggacaagatccggaaccagtatcgagaagactggaagtccaaagagatgaaagtccggcagagagctgtagccctgtacttcatcgacaagcttgctctgagagcaggcaatgaaaaggaggaaggagaaacagcggacactgtgggctgctgctcacttcgtgtggagcacatcaatctacacccagagttggatggtcaggaatatgtggtagagtttgacttcctcgggaaggactccatcagatactataacaaggtccctgttgagaaacgagtttttaagaacctacaactatttatggagaacaagcagcccgaggatgatctttttgatagactcaatactggtattctgaataagcatcttcaggatctcatggagggcttgacagccaaggtattccgtacatacaatgcctccatcacgctacagcagcagctaaaagaactgacagccccggatgagaacatcccagcgaagatcctttcttataaccgtgccaatcgagctgttgcaattctttgtaaccatcagagggcaccaccaaaaacttttgagaagtctatgatgaacttgcaaactaagattgatgccaagaaggaacagctagcagatgcccggagagacctgaaaagtgctaaggctgatgccaaggtcatgaaggatgcaaagacgaagaaggtagtagagtcaaagaagaaggctgttcagagactggaggaacagttgatgaagctggaagttcaagccacagaccgagaggaaaataaacagattgccctgggaacctccaaactcaattatctggaccctaggatcacagtggcttggtgcaagaagtggggtgtcccaattgagaagatttacaacaaaacccagcgggagaagtttgcctgggccattgacatggctgatgaagactatgagttttagccagtctcaagaggcagagttctgtgaagaggaacagtgtggtttgggaaagatggataaactgagcctcacttgccctcgtgcctgggggagagaggcagcaagtcttaacaaaccaacatctttgcgaaaagataaacctggagatattataagggagagctgagccagttgtcctatggacaacttatttaaaaatatttcagatatcaaaattctagctgtatgatttgttttgaattttgtttttattttcaagagggcaagtggatgggaatttgtcagcgttctaccaggcaaattcactgtttcactgaaatgtttggattctcttagctactgtatgcaaagtccgattatattggtgcgtttttacagttagggttttgcaataacttctatattttaatagaaataaattcctaaactcccttccctctctcccatttcaggaatttaaaattaagtagaacaaaaaacccagcgcacctgttagagtcgtcactctctattgtcatggggatcaattttcattaaacttgaagcagtcgtggctttggcagtgttttggttcagacacctgttcacagaaaaagcatgatgggaaaatatttcctgacttgagtgttcctttttaaatgtgaatttttatttctttttaattattttaaaatatttaaacctttttcttgatcttaaagatcgtgtagattggggttggggagggatgaagggcgagtgaatctaaggataatgaaataatcagtgactgaaaccattttcccatcatcctttgttctgagcattcgctgtaccctttaagatatccatctttttctttttaaccctaatctttcacttgaaagattttattgtataaaaagtttcacaggtcaataaacttagaggaaaatgagtatttggtccaaaaaaaggaaaaataatcaagattttagggcttttattttttcttttgtaattgtgtaaaaaatggaaaaaaacataaaaagcagaattttaatgtgaagacattttttgctataatcattagttttagaggcattgttagtttagtgtgtgtgcagagtccatttcccacatctttcctcaagtatcttctatttttatcatgaattcccttttaatcaactgtaggttatttaaaataaattcctacaacttaatggaaa

SEQ ID NO: 1058 - protein, 765 aa, Homo sapiens
MSGDHLHNDSQIEADFRLNDSHKHKDKHKDREHRHKEHKKEKDREKSKHSNSEHKDSEKKHKEKEKTKHKDGSSEKHKDKHKDRDKEKRKEEKVRASGDAKIKKEKENGFSSPPQIKDEPEDDGYFVPPKEDIKPLKRPRDEDDADYKPKKIKTEDTKKEKKRKLEEEEDGKLKKPKNKDKDKKVPEPDNKKKKPKKEEEQKWKWWEEERYPEGIKWKFLEHKGPVFAPPYEPLPENVKFYYDGKVMKLSPKAEEVATFFAKMLDHEYTTKEIFRKNFFKDWRKEMTNEEKNIITNLSKCDFTQMSQYFKAQTEARKQMSKEEKLKIKEENEKLLKEYGFCIMDNHKERIANFKIEPPGLFRGRGNHPKMGMLKRRIMPEDIIINCSKDAKVPSPPPGHKWKEVRHDNKVTWLVSWTENIQGSIKYIMLNPSSRIKGEKDWQKYETARRLKKCVDKIRNQYREDWKSKEMKVRQRAVALYFIDKLALRAGNEKEEGETADTVGCCSLRVEHINLHPELDGQEYVVEFDFLGKDSIRYYNKVPVEKRVFKNLQLFMENKQPEDDLFDRLNTGILNKHLQDLMEGLTAKVFRTYNASITLQQQLKELTAPDENIPAKILSYNRANRAVAILCNHQRAPPKTFEKSMMNLQTKIDAKKEQLADARRDLKSAKADAKVMKDAKTKKVVESKKKAVQRLEEQLMKLEVQATDREENKQIALGTSKLNYLDPRITVAWCKKWGVPIEKIYNKTQREKFAWAIDMADEDYEF

SEQ ID NO: 1059 - DNA, 1903 bp, Homo sapiens
ctttcccggaggctggcagatgcgcgtggtgcggctgctgcggctccgggcggctctgacgctgctcggggaggtcccccgccgcccggcctcccggggtgtcccgggctcgcgcaggacgcagaagggcagtggagccaggtgggagaaggagaagcacgaagacggggtgaagtggagacagctggagcacaagggcccgtacttcgcacccccatacgagccccttcccgacggagtgcgtttcttctatgaaggaaggcctgtgagattgagcgtggcagcggaggaggtcgccactttttatgggaggatgttagatcatgaatacacaacaaaggaggttttccggaagaacttcttcaatgactggcgaaaggaaatggcggtggaagagagggaagtcatcaagagcctggacaagtgtgacttcacggagatccacagatactttgtggacaaggccgcagcccggaaagtcctgagcagggaggagaagcagaagctaaaagaagaggcagaaaaacttcagcaagagttcggctactgtattttagatggtcaccaagaaaaaataggcaacttcaagattgagccgcctggcttgttccgtggccgtggcgaccatcccaagatggggatgctgaagagaaggatcacgccagaggatgtggttatcaactgcagcagggactcgaagatccccgagccgccggcggggcaccagtggaaggaggtgcgctccgataacaccgtcacgtggctggcagcttggaccgagagcgttcagaactccatcaagtacatcatgctgaacccttgctcgaagctgaagggggagacagcttggcagaagtttgaaacagctcgacgcctgcggggatttgtggacgagatccgctcccagtaccgggctgactggaagtctcgggaaatgaagacgagacagcgggcggtggccctgtatttcatcgataagctggcactgagagcaggaaatgagaaggaggacggtgaggcggccgacaccgtgggctgctgttccctccgcgtggagcacgtccagctgcacccggaggccgatggctgccaacacgtggtggaatttgacttcctggggaaggactgcatccgctactacaacagagtgccggtggagaagccggtgtacaagaacttacagctctttatggagaacaaggacccccgggacgacctcttcgacaggctgaccacgaccagcctgaacaagcacctccaggagctgatggacgggctgacggccaaggtgttccggacctacaacgcctccatcactctgcaggagcagctgcgggccctgacgcgcgccgaggacagcatagcagctaagatcttatcctacaaccgagccaaccgagtcgtggccattctctgcaaccatcagcgagcaacccccagtacgttcgagaagtcgatgcagaatctccagacgaagatccaggcaaagaaggagcaggtggctgaggccagggcagagctgaggagggcgagggctgagcacaaagcccaaggggatggcaagtccaggagtgtcctggagaagaagaggcggctcctggagaagctgcaggagcagctggcgcagctgagtgtgcaggccacggacaaggaggagaacaagcaggtggccctgggcacgtccaagctcaactacctggaccccaggatcagcattgcctggtgcaagcggttcagggtgccagtggagaagatctacagcaaaacacagcgggagaggttcgcctgggctctcgccatggcaggagaagactttgaattctaacgacgagccgtgttgaaacttcttttgtatgtgtgtgtgtttttttcactattaaagcagtactggggaattttgtac

SEQ ID NO: 1060 - protein, 601 aa, Homo sapiens
MRVVRLLRLRAALTLLGEVPRRPASRGVPGSRRTQKGSGARWEKEKHEDGVKWRQLEHKGPYFAPPYEPLPDGVRFFYEGRPVRLSVAAEEVATFYGRMLDHEYTTKEVFRKNFFNDWRKEMAVEEREVIKSLDKCDFTEIHRYFVDKAAARKVLSREEKQKLKEEAEKLQQEFGYCILDGHQEKIGNFKIEPPGLFRGRGDHPKMGMLKRRITPEDVVINCSRDSKIPEPPAGHQWKEVRSDNTVTWLAAWTESVQNSIKYIMLNPCSKLKGETAWQKFETARRLRGFVDEIRSQYRADWKSREMKTRQRAVALYFIDKLALRAGNEKEDGEAADTVGCCSLRVEHVQLHPEADGCQHVVEFDFLGKDCIRYYNRVPVEKPVYKNLQLFMENKDPRDDLFDRLTTTSLNKHLQELMDGLTAKVFRTYNASITLQEQLRALTRAEDSIAAKILSYNRANRVVAILCNHQRATPSTFEKSMQNLQTKIQAKKEQVAEARAELRRARAEHKAQGDGKSRSVLEKKRRLLEKLQEQLAQLSVQATDKEENKQVALGTSKLNYLDPRISIAWCKRFRVPVEKIYSKTQRERFAWALAMAGEDFEF

SEQ ID NO: 1061 - DNA, 1204 bp, Homo sapiens
gatctggggtgctgccaggaaaaagcaaattctggaagttaatggttttgagtgatttttaaatccttgctggcggagaggcccgcctctccccggtatcagcgcttcctcattctttgaatccgcggctccgcggtcttcggcgtcagaccagccggaggaagcctgtttgcaatttaagcgggctgtgaacgcccagggccggcgggggcagggccgaggcgggccattttgaataaagaggcgtgccttccaggcaggctctataagtgaccgccgcggcgagcgtgcgcgcgttgcaggtcactgtagcgggacttcttttggttttctttctctttggggcacctctggactcactccccagcatgaaggcgctgagcccggtgcgcggctgctacgaggcggtgtgctgcctgtcggaacgcagtctggccatcgcccggggccgagggaagggcccggcagctgaggagccgctgagcttgctggacgacatgaaccactgctactcccgcctgcgggaactggtacccggagtcccgagaggcactcagcttagccaggtggaaatcctacagcgcgtcatcgactacattctcgacctgcaggtagtcctggccgagccagcccctggaccccctgatggcccccaccttcccatccagacagccgagctcactccggaacttgtcatctccaacgacaaaaggagcttttgccactgactcggccgtgtcctgacacctccagaacgcaggtgctggcgcccgttctgcctgggaccccgggaacctctcctgccggaagccggacggcagggatgggccccaacttcgccctgcccacttgacttcaccaaatcccttcctggagactaaacctggtgctcaggagcgaaggactgtgaacttgtggcctgaagagccagagctagctctggccaccagctgggcgacgtcaccctgctcccaccccacccccaagttctaaggtctcttcagagcgtggaggtgtggaaggagtggctgctctccaaactatgccaaggcggcggcagagctggtcttctggtctccttggagaaaggttctgttgccctgatttatgaactctataatagagtatataggttttgtaccttttttacaggaaggtgactttctgtaacaatgcgatgtatattaaactttttataaaagtt

SEQ ID NO: 1062 - protein, 119 aa, Homo sapiens
MKALSPVRGCYEAVCCLSERSLAIARGRGKGPAAEEPLSLLDDMNHCYSRLRELVPGVPRGTQLSQVEILQRVIDYILDLQVVLAEPAPGPPDGPHLPIQTAELTPELVISNDKRSFCH

SEQ ID NO: 1063 - DNA, 2016 bp, Homo sapiens
tcgctgcgaaggacatttgggctgtgtgtgcgacgcgggtcggaggggcagtcgggggaaccgcgaagaagccgaggagcccggagccccgcgtgacgctcctctctcagtccaaaagcggcttttggttcggcgcagagagacccgggggtctagcttttcctcgaaaagcgccgccctgcccttggccccgagaacagacaaagagcaccgcagggccgatcacgctgggggcgctgaggccggccatggtcatggaagtgggcaccctggacgctggaggcctgcgggcgctgctgggggagcgagcggcgcaatgcctgctgctggactgccgctccttcttcgctttcaacgccggccacatcgccggctctgtcaacgtgcgcttcagcaccatcgtgcggcgccgggccaagggcgccatgggcctggagcacatcgtgcccaacgccgagctccgcggccgcctgctggccggcgcctaccacgccgtggtgttgctggacgagcgcagcgccgccctggacggcgccaagcgcgacggcaccctggccctggcggccggcgcgctctgccgcgaggcgcgcgccgcgcaagtcttcttcctcaaaggaggatacgaagcgttttcggcttcctgcccggagctgtgcagcaaacagtcgacccccatggggctcagccttcccctgagtactagcgtccctgacagcgcggaatctgggtgcagttcctgcagtaccccactctacgatcagggtggcccggtggaaatcctgccctttctgtacctgggcagtgcgtatcacgcttcccgcaaggacatgctggatgccttgggcatcactgccttgatcaacgtctcagccaattgtcccaaccattttgagggtcactaccagtacaagagcatccctgtggaggacaaccacaaggcagacatcagctcctggttcaacgaggccattgacttcatagactccatcaagaatgctggaggaagggtgtttgtccactgccaggcaggcatttcccggtcagccaccatctgccttgcttaccttatgaggactaatcgagtcaagctggacgaggcctttgagtttgtgaagcagaggcgaagcatcatctctcccaacttcagcttcatgggccagctgctgcagtttgagtcccaggtgctggctccgcactgttcggcagaggctgggagccccgccatggctgtgctcgaccgaggcacctccaccaccaccgtgttcaacttccccgtctccatccctgtccactccacgaacagtgcgctgagctaccttcagagccccattacgacctctcccagctgctgaaaggccacgggaggtgaggctcttcacatcccattgggactccatgctccttgagaggagaaatgcaataactctgggaggggctcgagagggctggtccttatttatttaacttcacccgagttcctctgggtttctaagcagttatggtgatgacttagcgtcaagacatttgctgaactcagcacattcgggaccaatatatagtgggtacatcaagtccatctgacaaaatggggcagaagagaaaggactcagtgtgtgatccggtttctttttgctcgcccctgttttttgtagaatctcttcatgcttgacatacctaccagtattattcccgacgacacatatacatatgagaatataccttatttatttttgtgtaggtgtctgccttcacaaatgtcattgtctactcctagaagaaccaaatacctcaatttttgtttttgagtactgtactatcctgtaaatatatcttaagcaggtttgttttcagcactgatggaaaataccagtgttgggttttttttttagttgccaacagttgtatgtttgctgattatttatgacctgaaataatatatttcttcttctaagaagacattttgttacataaggatgacttttttatacaatggaataaattatggcatttctattg

SEQ ID NO: 1064 - protein, 367 aa, Homo sapiens
MVMEVGTLDAGGLRALLGERAAQCLLLDCRSFFAFNAGHIAGSVNVRFSTIVRRRAKGAMGLEHIVPNAELRGRLLAGAYHAVVLLDERSAALDGAKRDGTLALAAGALCREARAAQVFFLKGGYEAFSASCPELCSKQSTPMGLSLPLSTSVPDSAESGCSSCSTPLYDQGGPVEILPFLYLGSAYHASRKDMLDALGITALINVSANCPNHFEGHYQYKSIPVEDNHKADISSWFNEAIDFIDSIKNAGGRVFVHCQAGISRSATICLAYLMRTNRVKLDEAFEFVKQRRSIISPNFSFMGQLLQFESQVLAPHCSAEAGSPAMAVLDRGTSTTTVFNFPVSIPVHSTNSALSYLQSPITTSPSC

SEQ ID NO: 1065 - DNA, 6880 bp, Homo sapiens
ccgcccagccaggtgcaaaatgccgtgtcattgggagactccgcagccggagcattagattacagctcgacggagctcgggaagggcggcgggggtggaagatgagcagaagcccctgttctcggaacgccggctgacaagcggggtgagcgcagccggggcggggacccagcctagcccactggagcagccgggggtggcccgttcccctttaagagcaactgctctaagccaggagccagagattcgagccggcctcgcccagccagccctctccagcgaggggacccacaagcggcgcctcggccctcccgacctttccgagccctctttgcgccctgggcgcacggggccctacacgcgccaagcatgctgagggtcttcatcctctatgccgagaacgtccacacacccgacaccgacatcagcgatgcctactgctccgcggtgtttgcaggggtgaagaagagaaccaaagtcatcaagaacagcgtgaaccctgtatggaatgagggatttgaatgggacctcaagggcatccccctggaccagggctctgagcttcatgtggtggtcaaagaccatgagacgatggggaggaacaggttcctgggggaagccaaggtcccactccgagaggtcctcgccacccctagtctgtccgccagcttcaatgcccccctgctggacaccaagaagcagcccacaggggcctcgctggtcctgcaggtgtcctacacaccgctgcctggagctgtgcccctgttcccgccccctactcctctggagccctccccgactctgcctgacctggatgtagtggcagacacaggaggagaggaagacacagaggaccagggactcactggagatgaggcggagccattcctggatcaaagcggaggcccgggggctcccaccaccccaaggaaactaccttcacgtcctccgccccactaccccgggatcaaaagaaagcgaagtgcgcctacatctagaaagctgctgtcagacaaaccgcaggatttccagatcagggtccaggtgatcgaggggcgccagctgccgggggtgaacatcaagcctgtggtcaaggttaccgctgcagggcagaccaagcggacgcggatccacaagggaaacagcccactcttcaatgagactcttttcttcaacttgtttgactctcctggggagctgtttgatgagcccatctttatcacggtggtagactctcgttctctcaggacagatgctctcctcggggagttccggatggacgtgggcaccatttacagagagccccggcacgcctatctcaggaagtggctgctgctctcagaccctgatgacttctctgctggggccagaggctacctgaaaacaagcctttgtgtgctggggcctggggacgaagcgcctctggagagaaaagacccctctgaagacaaggaggacattgaaagcaacctgctccggcccacaggcgtagccctgcgaggagcccacttctgcctgaaggtcttccgggccgaggacttgccgcagatggacgatgccgtgatggacaacgtgaaacagatctttggcttcgagagtaacaagaagaacttggtggacccctttgtggaggtcagctttgcggggaaaatgctgtgcagcaagatcttggagaagacggccaaccctcagtggaaccagaacatcacactgcctgccatgtttccctccatgtgcgaaaaaatgaggattcgtatcatagactgggaccgcctgactcacaatgacatcgtggctaccacctacctgagtatgtcgaaaatctctgcccctggaggagaaatagaagaggagcctgcaggtgctgtcaagccttcgaaagcctcagacttggatgactacctgggcttcctccccacttttgggccctgctacatcaacctctatggcagtcccagagagttcacaggcttcccagacccctacacagagctcaacacaggcaagggggaaggtgtggcttatcgtggccggcttctgctctccctggagaccaagctggtggagcacagtgaacagaaggtggaggaccttcctgcggatgacatcctccgggtggagaagtaccttaggaggcgcaagtactccctgtttgcggccttctactcagccaccatgctgcaggatgtggatgatgccatccagtttgaggtcagcatcgggaactacgggaacaagttcgacatgacctgcctgccgctggcctccaccactcagtacagccgtgcagtctttgacgggtgccactactactacctaccctggggtaacgtgaaacctgtggtggtgctgtcatcctactgggaggacatcagccatagaatcgagactcagaaccagctgcttgggattgctgaccggctggaagctggcctggagcaggtccacctggccctgaaggcgcagtgctccacggaggacgtggactcgctggtggctcagctgacggatgagctcatcgcaggctgcagccagcctctgggtgacatccatgagacaccctctgccacccacctggaccagtacctgtaccagctgcgcacccatcacctgagccaaatcactgaggctgccctggccctgaagctcggccacagtgagctccctgcagctctggagcaggcggaggactggctcctgcgtctgcgtgccctggcagaggagccccagaacagcctgccggacatcgtcatctggatgctgcagggagacaagcgtgtggcataccagcgggtgcccgcccaccaagtcctcttctcccggcggggtgccaactactgtggcaagaattgtgggaagctacagacaatctttctgaaatatccgatggagaaggtgcctggcgcccggatgccagtgcagatacgggtcaagctgtggtttgggctctcagtggatgagaaggagttcaaccagtttgctgaggggaagctgtctgtctttgctgaaacctatgagaacgagactaagttggcccttgttgggaactggggcacaacgggcctcacctaccccaagttttctgacgtcacgggcaagatcaagctacccaaggacagcttccgcccctcggccggctggacctgggctggagattggttcgtgtgtccggagaagactctgctccatgacatggacgccggtcacctgagcttcgtggaagaggtgtttgagaaccagacccggcttcccggaggccagtggatctacatgagtgacaactacaccgatgtgaacggggagaaggtgcttcccaaggatgacattgagtgcccactgggctggaagtgggaagatgaggaatggtccacagacctcaaccgggctgtcgatgagcaaggctgggagtatagcatcaccatccccccggagcggaagccgaagcactgggtccctgctgagaagatgtactacacacaccgacggcggcgctgggtgcgcctgcgcaggagggatctcagccaaatggaagcactgaaaaggcacaggcaggcggaggcggagggcgagggctgggagtacgcctctctttttggctggaagttccacctcgagtaccgcaagacagatgccttccgccgccgccgctggcgccgtcgcatggagccactggagaagacggggcctgcagctgtgtttgcccttgagggggccctgggcggcgtgatggatgacaagagtgaagattccatgtccgtctccaccttgagcttcggtgtgaacagacccacgatttcctgcatattcgactatgggaaccgctaccatctacgctgctacatgtaccaggcccgggacctggctgcgatggacaaggactctttttctgatccctatgccatcgtctccttcctgcaccagagccagaagacggtggtggtgaagaacacccttaaccccacctgggaccagacgctcatcttctacgagatcgagatctttggcgagccggccacagttgctgagcaaccgcccagcattgtggtggagctgtacgaccatgacacttatggtgcagacgagtttatgggtcgctgcatctgtcaaccgagtctggaacggatgccacggctggcctggttcccactgacgaggggcagccagccgtcgggggagctgctggcctcttttgagctcatccagagagagaagccggccatccaccatattcctggttttgaggtgcaggagacatcaaggatcctggatgagtctgaggacacagacctgccctacccaccaccccagagggaggccaacatctacatggttcctcagaacatcaagccagcgctccagcgtaccgccatcgagatcctggcatggggcctgcggaacatgaagagttaccagctggccaacatctcctcccccagcctcgtggtagagtgtgggggccagacggtgcagtcctgtgtcatcaggaacctccggaagaaccccaactttgacatctgcaccctcttcatggaagtgatgctgcccagggaggagctctactgcccccccatcaccgtcaaggtcatcgataaccgccagtttggccgccggcctgtggtgggccagtgtaccatccgctccctggagagcttcctgtgtgacccctactcggcggagagtccatccccacagggtggcccagacgatgtgagcctactcagtcctggggaagacgtgctcatcgacattgatgacaaggagcccctcatccccatccaggaggaagagttcatcgattggtggagcaaattctttgcctccataggggagagggaaaagtgcggctcctacctggagaaggattttgacaccctgaaggtctatgacacacagctggagaatgtggaggcctttgagggcctgtctgacttttgtaacaccttcaagctgtaccggggcaagacgcaggaggagacagaagatccatctgtgattggtgaatttaagggcctcttcaaaatttatcccctcccagaagacccagccatccccatgcccccaagacagttccaccagctggccgcccagggaccccaggagtgcttggtccgtatctacattgtccgagcatttggcctgcagcccaaggaccccaatggaaagtgtgatccttacatcaagatctccatagggaagaaatcagtgagtgaccaggataactacatcccctgcacgctggagcccgtatttggaaagatgttcgagctgacctgcactctgcctctggagaaggacctaaagatcactctctatgactatgacctcctctccaaggacgaaaagatcggtgagacggtcgtcgacctggagaacaggctgctgtccaagtttggggctcgctgtggactcccacagacctactgtgtctctggaccgaaccagtggcgggaccagctccgcccctcccagctcctccacctcttctgccagcagcatagagtcaaggcacctgtgtaccggacagaccgtgtaatgtttcaggataaagaatattccattgaagagatagaggctggcaggatcccaaacccacacctgggcccagtggaggagcgtctggctctgcatgtgcttcagcagcagggcctggtcccggagcacgtggagtcacggcccctctacagccccctgcagccagacatcgagcaggggaagctgcagatgtgggtcgacctatttccgaaggccctggggcggcctggacctcccttcaacatcaccccacggagagccagaaggtttttcctgcgttgtattatctggaataccagagatgtgatcctggatgacctgagcctcacgggggagaagatgagcgacatttatgtgaaaggttggatgattggctttgaagaacacaagcaaaagacagacgtgcattatcgttccctgggaggtgaaggcaacttcaactggaggttcattttccccttcgactacctgccagctgagcaagtctgtaccattgccaagaaggatgccttctggaggctggacaagactgagagcaaaatcccagcacgagtggtgttccagatctgggacaatgacaagttctcctttgatgattttctgggctccctgcagctcgatctcaaccgcatgcccaagccagccaagacagccaagaagtgctccttggaccagctggatgatgctttccacccagaatggtttgtgtccctttttgagcagaaaacagtgaagggctggtggccctgtgtagcagaagagggtgagaagaaaatactggcgggcaagctggaaatgaccttggagattgtagcagagagtgagcatgaggagcggcctgctggccagggccgggatgagcccaacatgaaccctaagcttgaggacccaaggcgccccgacacctccttcctgtggtttacctccccatacaagaccatgaagttcatcctgtggcggcgtttccggtgggccatcatcctcttcatcatcctcttcatcctgctgctgttcctggccatcttcatctacgccttcccgaactatgctgccatgaagctggtgaagcccttcagctgaggactctcctgccctgtagaaggggccgtggggtcccctccagcatgggactggcctgcctcctccgcccagctcggcgagctcctccagacctcctaggcctgattgtcctgccagggtgggcagacagacagatggaccggcccacactcccagagttgctaacatggagctctgagatcaccccacttccatcatttccttctcccccaacccaacgcttttttggatcagctcagacatatttcagtataaaacagttggaacc

SEQ ID NO: 1066 - protein, 2080 aa, Homo sapiens
MLRVFILYAENVHTPDTDISDAYCSAVFAGVKKRTKVIKNSVNPVWNEGFEWDLKGIPLDQGSELHVVVKDHETMGRNRFLGEAKVPLREVLATPSLSASFNAPLLDTKKQPTGASLVLQVSYTPLPGAVPLFPPPTPLEPSPTLPDLDVVADTGGEEDTEDQGLTGDEAEPFLDQSGGPGAPTTPRKLPSRPPPHYPGIKRKRSAPTSRKLLSDKPQDFQIRVQVIEGRQLPGVNIKPVVKVTAAGQTKRTRIHKGNSPLFNETLFFNLFDSPGELFDEPIFITVVDSRSLRTDALLGEFRMDVGTIYREPRHAYLRKWLLLSDPDDFSAGARGYLKTSLCVLGPGDEAPLERKDPSEDKEDIESNLLRPTGVALRGAHFCLKVFRAEDLPQMDDAVMDNVKQIFGFESNKKNLVDPFVEVSFAGKMLCSKILEKTANPQWNQNITLPAMFPSMCEKMRIRIIDWDRLTHNDIVATTYLSMSKISAPGGEIEEEPAGAVKPSKASDLDDYLGFLPTFGPCYINLYGSPREFTGFPDPYTELNTGKGEGVAYRGRLLLSLETKLVEHSEQKVEDLPADDILRVEKYLRRRKYSLFAAFYSATMLQDVDDAIQFEVSIGNYGNKFDMTCLPLASTTQYSRAVFDGCHYYYLPWGNVKPVVVLSSYWEDISHRIETQNQLLGIADRLEAGLEQVHLALKAQCSTEDVDSLVAQLTDELIAGCSQPLGDIHETPSATHLDQYLYQLRTHHLSQITEAALALKLGHSELPAALEQAEDWLLRLRALAEEPQNSLPDIVIWMLQGDKRVAYQRVPAHQVLFSRRGANYCGKNCGKLQTIFLKYPMEKVPGARMPVQIRVKLWFGLSVDEKEFNQFAEGKLSVFAETYENETKLALVGNWGTTGLTYPKFSDVTGKIKLPKDSFRPSAGWTWAGDWFVCPEKTLLHDMDAGHLSFVEEVFENQTRLPGGQWIYMSDNYTDVNGEKVLPKDDIECPLGWKWEDEEWSTDLNRAVDEQGWEYSITIPPERKPKHWVPAEKMYYTHRRRRWVRLRRRDLSQMEALKRHRQAEAEGEGWEYASLFGWKFHLEYRKTDAFRRRRWRRRMEPLEKTGPAAVFALEGALGGVMDDKSEDSMSVSTLSFGVNRPTISCIFDYGNRYHLRCYMYQARDLAAMDKDSFSDPYAIVSFLHQSQKTVVVKNTLNPTWDQTLIFYEIEIFGEPATVAEQPPSIVVELYDHDTYGADEFMGRCICQPSLERMPRLAWFPLTRGSQPSGELLASFELIQREKPAIHHIPGFEVQETSRILDESEDTDLPYPPPQREANIYMVPQNIKPALQRTAIEILAWGLRNMKSYQLANISSPSLVVECGGQTVQSCVIRNLRKNPNFDICTLFMEVMLPREELYCPPITVKVIDNRQFGRRPVVGQCTIRSLESFLCDPYSAESPSPQGGPDDVSLLSPGEDVLIDIDDKEPLIPIQEEEFIDWWSKFFASIGEREKCGSYLEKDFDTLKVYDTQLENVEAFEGLSDFCNTFKLYRGKTQEETEDPSVIGEFKGLFKIYPLPEDPAIPMPPRQFHQLAAQGPQECLVRIYIVRAFGLQPKDPNGKCDPYIKISIGKKSVSDQDNYIPCTLEPVFGKMFELTCTLPLEKDLKITLYDYDLLSKDEKIGETVVDLENRLLSKFGARCGLPQTYCVSGPNQWRDQLRPSQLLHLFCQQHRVKAPVYRTDRVMFQDKEYSIEEIEAGRIPNPHLGPVEERLALHVLQQQGLVPEHVESRPLYSPLQPDIEQGKLQMWVDLFPKALGRPGPPFNITPRRARRFFLRCIIWNTRDVILDDLSLTGEKMSDIYVKGWMIGFEEHKQKTDVHYRSLGGEGNFNWRFIFPFDYLPAEQVCTIAKKDAFWRLDKTESKIPARVVFQIWDNDKFSFDDFLGSLQLDLNRMPKPAKTAKKCSLDQLDDAFHPEWFVSLFEQKTVKGWWPCVAEEGEKKILAGKLEMTLEIVAESEHEERPAGQGRDEPNMNPKLEDPRRPDTSFLWFTSPYKTMKFILWRRFRWAIILFIILFILLLFLAIFIYAFPNYAAMKLVKPFS

SEQ ID NO: 1067 - DNA, 1640 bp, Homo sapiens
gcggtcgggctcagctcagtgtgtggtgagcggcggcggcgcggccgggccggggagcgggcgcggcccggcggcctcagcatggaggacggcttctccagctacagcagcctgtacgacacgtcctcgctgctccagttctgcaacgatgacagcgcttctgctgcaagtagcatggaggtgacagaccgcattgcttcactggagcagagagtccagatgcaagaagacgacatccagctgctcaaatcagctctagctgatgtggttcggcggctgaacattactgaggaacagcaggccgtgcttaacaggaaaggacctaccaaagcaagaccactgatgcagaccctgcctttaagaaccacggtcaacaatggcactgtgttaccaaagaaacctactggctctctaccatccccctccggggtcaggaaagaaactgctgtgccagcaaccaaaagattaaacagatctgtgagtcttctcaatgcttgcaaactgaatagatcgacaccaagtaacatcaagaggaccagctcttctgaacgagtgtctcctgggggtcgaagggaaagcaatggggattccagaggaaaccggaatcgcacaggctccaccagcagctcttccagtggcaaaaagaacagtgaaagcaaacccaaggagcctgtattcagtgcagaagaaggctatgtaaaaatgtttcttcgtggacgccctgttaccatgtacatgcccaaagatcaagtggattcttacagcttggaagcaaaagtagaacttccaaccaagagactcaagctggaatgggtctatgggtacaggggtcgagactgccgtaacaacctgtacttgcttccgacgggagagaccgtctacttcatcgcatccgtggtggtgttatacaacgtggaggagcaactgcagaggcattacgctggccacaacgatgacgtgaagtgcctagcagttcatcctgatcggatcacgatagcaacaggacaagttgcgggcacatcgaaggatggaaaacaattgcccccacatgtgcgcatctgggattctgtgacattgaatactctccacgtcattggaataggtttttttgaccgagcagtcacctgtattgcattctcaaaatctaatggaggaaccaatctctgtgctgtggatgactccaacgaccatgtgctctctgtatgggactggcagaaagaagaaaaactagcagatgtgaagtgctctaatgaagctgtgtttgctgcggatttccaccccacggacaccaacatcatagttacttgtggaaaatcacatctctacttttggacactagaaggaagctcccttaataagaagcaaggattattcgagaaacaagaaaagccaaagtttgtcctctgtgtgactttctctgaaaacggtgacaccattactggagattcaagtggcaacatcttagtatggggaaaaggtacaaatcgaataagctatgcagttcagggggcccatgagggtggcatttttgcactttgtatgttaagagatggcacactggtgtcgggaggtgggaaagaccgaaagctcatttcttggagcggaaactatcaaaaacttcgtaaaacggaggtaagtca

SEQ ID NO: 1068 - protein, 546 aa, Homo sapiens
AVGLSSVCGERRRRGRAGERARPGGLSMEDGFSSYSSLYDTSSLLQFCNDDSASAASSMEVTDRIASLEQRVQMQEDDIQLLKSALADVVRRLNITEEQQAVLNRKGPTKARPLMQTLPLRTTVNNGTVLPKKPTGSLPSPSGVRKETAVPATKRLNRSVSLLNACKLNRSTPSNIKRTSSSERVSPGGRRESNGDSRGNRNRTGSTSSSSSGKKNSESKPKEPVFSAEEGYVKMFLRGRPVTMYMPKDQVDSYSLEAKVELPTKRLKLEWVYGYRGRDCRNNLYLLPTGETVYFIASVVVLYNVEEQLQRHYAGHNDDVKCLAVHPDRITIATGQVAGTSKDGKQLPPHVRIWDSVTLNTLHVIGIGFFDRAVTCIAFSKSNGGTNLCAVDDSNDHVLSVWDWQKEEKLADVKCSNEAVFAADFHPTDTNIIVTCGKSHLYFWTLEGSSLNKKQGLFEKQEKPKFVLCVTFSENGDTITGDSSGNILVWGKGTNRISYAVQGAHEGGIFALCMLRDGTLVSGGGKDRKLISWSGNYQKLRKTEVS

SEQ ID NO: 1069 - DNA, 3942 bp, Homo sapiens
agctcagtgtgtggtgagcggcggcggcgcggccgggccggggagcgggcgcggcccggcggcctcagcatggaggacggcttctccagctacagcagcctgtacgacacgtcctcgctgctccagttctgcaacgatgacagcgcttctgctgcaagtagcatggaggtgacagaccgcattgcttcactggagcagagagtccagatgcaagaagacgacatccagctgctcaaatcagctctagctgatgtggttcggcggctgaacattactgaggaacagcaggccgtgcttaacaggaaaggacctaccaaagcaagaccactgatgcagaccctgcctttaagaaccacggtcaacaatggcactgtgttaccaaagaaacctactggctctctaccatccccctccggggtcaggaaagaaactgctgtgccagcaaccaaaagtaacatcaagaggaccagctcttctgaacgagtgtctcctgggggtcgaagggaaagcaatggggattccagaggaaaccggaatcgcacaggctccaccagcagctcttccagtggcaaaaagaacagtgaaagcaaacccaaggagcctgtattcagtgcagaagaaggctatgtaaaaatgtttcttcgtggacgccctgttaccatgtacatgcccaaagatcaagtggattcttacagcttggaagcaaaagtagaacttccaaccaagagactcaagctggaatgggtctatgggtacaggggtcgagactgccgtaacaacctgtacttgcttccgacgggagagaccgtctacttcatcgcatccgtggtggtgttatacaacgtggaggagcaactgcagaggcattacgctggccacaacgatgacgtgaagtgcctagcagttcatcctgatcggatcacgatagcaacaggacaagttgcgggcacatcgaaggatggaaaacaattgcccccacatgtgcgcatctgggattctgtgacattgaatactctccacgtcattggaataggtttttttgaccgagcagtcacctgtattgcattctcaaaatctaatggaggaaccaatctctgtgctgtggatgactccaacgaccatgtgctctctgtatgggactggcagaaagaagaaaaactagcagatgtgaagtgctctaatgaagctgtgtttgctgcggatttccaccccacggacaccaacatcatagttacttgtggaaaatcacatctctacttttggacactagaaggaagctcccttaataagaagcaaggattattcgagaaacaagaaaagccaaagtttgtcctctgtgtgactttctctgaaaacggtgacaccattactggagattcaagtggcaacatcttagtatggggaaaaggtacaaatcgaataagctatgcagttcagggggcccatgagggtggcatttttgcactttgtatgttaagagatggcacactggtgtcgggaggtgggaaagaccgaaagctcatttcttggagcggaaactatcaaaaacttcgtaaaacggagattccagaacagtttggtccaatacggacagtggccgaggggaaaggcgatgtgatcttgattggcacaactcgaaactttgtcctgcagggcactctgtcaggggacttcacacccattactcagggtcacactgatgagctctggggactggccatccatgcctcaaaatctcagttcttgacctgtgggcatgacaagcatgccactctctgggacgctgtgggtcaccgtcccgtctgggacaaaataatagaggatccagctcagtcttctggttttcatccttcagggtctgtggttgcagtcggaacactcactgggaggtggtttgtgtttgacacagaaacaaaagacttggtcaccgttcacacagatggaaacgaacagctctctgtaatgcgatactcaccagatgggaatttcttagccataggctcacatgacaactgcatctatatatatggcgttagtgacaacgggaggaagtacacgcgagtgggcaagtgctcgggtcattccagcttcattactcacctggactggtctgtaaactcacagttcctcgtgtcaaattccggagactacgaaatcctctactgggttccctctgcctgtaagcaagtcgtaagtgtggaaactacaagagacattgaatgggctacctatacctgcactttgggattccatgtttttggagtgtggccagaaggctcggacggaaccgacatcaatgccgtctgtcgggcccatgagaagaaactcctgtcaacaggcgacgactttggcaaagtgcacctcttctcatacccctgctcgcagttcagggctccaagccacatctacggcgggcacagcagccatgtcaccaatgtcgatttcctctgtgaagacagccacctcatctccacgggcgggaaagacacaagcatcatgcagtggcgcgtcatttagtacccaccgagagctgtggggagcagcatgggcaaggaagacacagactcgcattacccttggtcactgtgatttctgttttgtttaaaaaattcttacaaacctcaggaaaactgtgccctccgccggctaccttagcttagcgtgtcagcgggcgccacagcggatcagcggttccgtgttcacttttgttgtacaatatatgacacagtgcacattgaataccaacaaggttgcaacgtttacattatagccacatcaacagaagtaactggtatattcttagtaacttttctatgaactcttcaaaaatggtcacagaatgccttttaaaacattgtatataatcttcactgtttcaccatctagcttgctaagtcaaatatttatgatgataatgaggtactgaaccacgatggctgttgaggaattggtcctaaaaggacagatcacttcagaagagtgaataactgatttgcacagctgaatcaggagacacaaagatgagactgtgtttggttacattttccaaagtttcattgcattctcccttggggaggctgtgagagagggcttgtatccctcttgtgctaagcagactctactcctaactgacttcaatatttcagcagggtacacaggcgtttccaagtttcagtgacaccgtcctgcctaaccagatgcggtcagcctcttcacacccacctggcttgcatcccccatcccttgttcacacgccctgattcacggtgagacattttgccaccttcttgtgtatattacttggcatgagatgatattgtacttgtataggattctagcaattcataataaatatgtaagactaggctttactgtcttatgcttatggacattgtatatttgtattttatgaccaagtagaccaagtcagaaagatctctctcgagcgtaccataaacctgcagagagaagtctcgaaaggctccaccaggtaccaagggcagctgcttttcctgtcttttgtgcatgggcgacccattacagtatgagataagattgagttctgatgcgttaaacggaggtggcagaaatttgtcaagaaggccttatccatttcgattgtgtgacagattgaaatttattgtttacattggggaatgtatctcaaatttttaaatagaagagtaataaacagactttaaagcaaatattaagatttttactcattcaaggcaagtaaatgaatggaattatctgagctctatggcactggttgtttagagtgactgatgaagtgcaactttcaaaaacatttttgatgacatcaccagcctactgcagaagtgcagggcaccagtaaacaccatgtattattgaagatgaatctgtttgtatgtatccttgtcaaatatattctataatgaaataaaatctgaaaagtgg

SEQ ID NO: 1070 - protein, 815 aa, Homo sapiens
MEDGFSSYSSLYDTSSLLQFCNDDSASAASSMEVTDRIASLEQRVQMQEDDIQLLKSALADVVRRLNITEEQQAVLNRKGPTKARPLMQTLPLRTTVNNGTVLPKKPTGSLPSPSGVRKETAVPATKSNIKRTSSSERVSPGGRRESNGDSRGNRNRTGSTSSSSSGKKNSESKPKEPVFSAEEGYVKMFLRGRPVTMYMPKDQVDSYSLEAKVELPTKRLKLEWVYGYRGRDCRNNLYLLPTGETVYFIASVVVLYNVEEQLQRHYAGHNDDVKCLAVHPDRITIATGQVAGTSKDGKQLPPHVRIWDSVTLNTLHVIGIGFFDRAVTCIAFSKSNGGTNLCAVDDSNDHVLSVWDWQKEEKLADVKCSNEAVFAADFHPTDTNIIVTCGKSHLYFWTLEGSSLNKKQGLFEKQEKPKFVLCVTFSENGDTITGDSSGNILVWGKGTNRISYAVQGAHEGGIFALCMLRDGTLVSGGGKDRKLISWSGNYQKLRKTEIPEQFGPIRTVAEGKGDVILIGTTRNFVLQGTLSGDFTPITQGHTDELWGLAIHASKSQFLTCGHDKHATLWDAVGHRPVWDKIIEDPAQSSGFHPSGSVVAVGTLTGRWFVFDTETKDLVTVHTDGNEQLSVMRYSPDGNFLAIGSHDNCIYIYGVSDNGRKYTRVGKCSGHSSFITHLDWSVNSQFLVSNSGDYEILYWVPSACKQVVSVETTRDIEWATYTCTLGFHVFGVWPEGSDGTDINAVCRAHEKKLLSTGDDFGKVHLFSYPCSQFRAPSHIYGGHSSHVTNVDFLCEDSHLISTGGKDTSIMQWRVI

SEQ ID NO: 1071 - DNA, 3883 bp, Homo sapiens
gcgcggcccggcggcctcagcatggaggacggcttctccagctacagcagcctgtacgacacgtcctcgctgctccagttctgcaacgatgacagcgcttctgctgcaagtagcatggaggtgacagaccgcattgcttcactggagcagagagtccagatgcaagaagacgacatccagctgctcaaatcagctctagctgatgtggttcggcggctgaacattactgaggaacagcaggccgtgcttaacaggaaaggacctaccaaagcaagaccactgatgcagaccctgcctttaagaaccacggtcaacaatggcactgtgttaccaaagaaacctactggctctctaccatccccctccggggtcaggaaagaaactgctgtgccagcaaccaaaagtaacatcaagaggaccagctcttctgaacgagtgtctcctgggggtcgaagggaaagcaatggggattccagaggaaaccggaatcgcacaggctccaccagcagctcttccagtgaaaaagaacagtgaaagcaaacccaaggagcctgtattcagtgcagaagaaggctatgtaaaaatgtttcttcgtggacgccctgttaccatgtacatgcccaaagatcaagtggattcttacagcttggaagcaaaagtagaacttccaaccaagagactcaagctggaatgggtctatgggtacaggggtcgagactgccgtaacaacctgtacttgcttccgacgggagagaccgtctacttcatcgcatccgtggtggtgttatacaacgtggaggagcaactgcagaggcattacgctggccacaacgatgacgtgaagtgcctagcagttcatcctgatcggatcacgatagcaacaggacaagttgcgggcacatcgaaggatggaaaacaattgcccccacatgtgcgcatctgggattctgtgacattgaatactctccacgtcattggaataggtttttttgaccgagcagtcacctgtattgcattctcaaaatctaatggaggaaccaatctctgtgctgtggatgactccaacgaccatgtgctctctgtatgggactggcagaaagaagaaaaactagcagatgtgaagtgctctaatgaagctgtgtttgctgcggatttccaccccacggacaccaacatcatagttacttgtggaatcacatctctacttttggacactagaaggaagctccctataagaagcaaggattattcgagaaacaagaaaaagtttgtcctctgtgtgactttctctgaaaacggtgacaccattactggagattcaagtggcaacatcttagtatggggaaaaggtacaaatcgaataagctatgcagttcagggggcccatgagggtggcatttttgcactttgtatgttaagagatggcacactggtgtcgggaggtgggaaagaccgaaagctcatttcttggagcggaaactatcaaaaacttcgtaaaacggagattccagaacagtttggtccaatacggacagtggccgaggggaaaggcgatgtgatcttgattggcacaactcgaaactttgtcctgcagggcactctgtcaggggacttcacacccattactcagggtcacactgatgagctctggggactggccatccatgcctcaaaatctcagttcttgacctgtgggcatgacaagcatgccactctctgggacgctgtgggtcaccgtcccgtctgggacaaaataatagaggatccagctcagtcttctggttttcatccttcagggtctgtggttgcagtcggaacactcactgggaggtggtttgtgtttgacacagaaacaaaagacttggtcaccgttcacacagatggaaacgaacagctctctgtaatgcgatactcaccagatgggaatttcttagccataggctcacatgacaactgcatctatatatatggcgttagtgacaacgggaggaagtacacgcgagtgggcaagtgctcgggtcattccagcttcattactcacctggactggtctgtaaactcacagttcctcgtgtcaaattccggagactacgaaatcctctactgggttccctctgcctgtaagcaagtcgtaagtgtggaaactacaagagacattgaatgggctacctatacctgcactttgggattccatgtttttggagtgtggccagaaggctcggacggaaccgacatcaatgccgtctgtcgggcccatgagaagaaactcctgtcaacaggcgacgactttggcaaagtgcacctcttctcatacccctgctcgcagttcagggctccaagccacatctacggcgggcacagcagccatgtcaccaatgtcgatttcctctgtgaagacagccacctcatctccacgggcgggaaagacacaagcatcatgcagtggcgcgtcatttagtacccaccgagagctgtggggagcagcatgggcaaggaagacacagactcgcattacccttggtcactgtgatttctgttttgtttaaaaaattcttacaaacctcaggaaaactgtgccctccgccggctaccttagcttagcgtgtcagcgggcgccacagcggatcagcggttccgtgttcacttttgttgtacaatatatgacacagtgcacattgaataccaacaaggttgcaacgtttacattatagccacatcaacagaagtaactggtatattcttagtaacttttctatgaactcttcaaaaatggtcacagaatgccttttaaaacattgtatataatcttcactgtttcaccatctagcttgctaagtcaaatatttatgatgataatgaggtactgaaccacgatggctgttgaggaattggtcctaaaaggacagatcacttcagaagagtgaataactgatttgcacagctgaatcaggagacacaaagatgagactgtgtttggttacattttccaaagtttcattgcattctcccttggggaggctgtgagagagggcttgtatccctcttgtgctaagcagactctactcctaactgacttcaatatttcagcagggtacacaggcgtttccaagtttcagtgacaccgtcctgcctaaccagatgcggtcagcctcttcacacccacctggcttgcatcccccatcccttgttcacacgccctgattcacggtgagacattttgccaccttcttgtgtatattacttggcatgagatgatattgtacttgtataggattctagcaattcataataaatatgtaagactaggctttactgtcttatgcttatggacattgtatatttgtattttatgaccaagtagaccaagtcagaaagatctctctcgagcgtaccataaacctgcagagagaagtctcgaaaggctccaccaggtaccaagggcagctgcttttcctgtcttttgtgcatgggcgacccattacagtatgagataagattgagttctgatgcgttaaacggaggtggcagaaatttgtcaagaaggccttatccatttcgattgtgtgacagattgaaatttattgtttacattggggaatgtatctcaaatttttaaatagaagagtaataaacagactttaaagcaaatattaagatttttactcattcaaggcaagtaaatgaatggaattatctgagctctatggcactggttgtttagagtgactgatgaagtgcaactttcaaaaacatttttgatgacatcaccagcctactgcagaagtgcagggcaccagtaaacaccatgtattattgaagatgaatctgtttgtatgtatccttgtcaaatatattctataatgaaataaaatctgaaaagtgg

SEQ ID NO: 1072 - protein, 713 aa, Homo sapiens
MALCYQRNLLALYHPPPGSGKKLLCQQPKVTSRGPALLNECLLGVEGKAMGIPEETGIAQAPPAALPVKKNSESKPKEPVFSAEEGYVKMFLRGRPVTMYMPKDQVDSYSLEAKVELPTKRLKLEWVYGYRGRDCRNNLYLLPTGETVYFIASVVVLYNVEEQLQRHYAGHNDDVKCLAVHPDRITIATGQVAGTSKDGKQLPPHVRIWDSVTLNTLHVIGIGFFDRAVTCIAFSKSNGGTNLCAVDDSNDHVLSVWDWQKEEKLADVKCSNEAVFAADFHPTDTNIIVTCGITSLLLDTRRKLPIRSKDYSRNKKKFVLCVTFSENGDTITGDSSGNILVWGKGTNRISYAVQGAHEGGIFALCMLRDGTLVSGGGKDRKLISWSGNYQKLRKTEIPEQFGPIRTVAEGKGDVILIGTTRNFVLQGTLSGDFTPITQGHTDELWGLAIHASKSQFLTCGHDKHATLWDAVGHRPVWDKIIEDPAQSSGFHPSGSVVAVGTLTGRWFVFDTETKDLVTVHTDGNEQLSVMRYSPDGNFLAIGSHDNCIYIYGVSDNGRKYTRVGKCSGHSSFITHLDWSVNSQFLVSNSGDYEILYWVPSACKQVVSVETTRDIEWATYTCTLGFHVFGVWPEGSDGTDINAVCRAHEKKLLSTGDDFGKVHLFSYPCSQFRAPSHIYGGHSSHVTNVDFLCEDSHLISTGGKDTSIMQWRVI

SEQ ID NO: 1073 - DNA, 5731 bp, Homo sapiens
cacacacacacacacacaccacacttgtgctttcaagacatcgaaacggaggctatttccctggggaaagaaatcctgcctggcgagatctccccattggttgtttacccggagaaatctacatgtttaagggggatggtgcatccataatcagtctgtccctataggacttgggtcttggcgacctttttgtgacctctcccgccagaggaggctgctgtcactttaaaaatttaaaagaggagcccgtctggcttccgatcagatcactctgggcggcgggagatagctccctttctccctcgccccgggttctttctggatggccgagcagatcctctttaaagagacagttcatgaaatagaaacccggcggctgagcttggagttgcgaaaggggacgatcccgtgagggtccaggacccgcgaaggcgctgcggaggatctgaaagggggatagagctcccctcgcctccccaggccccccaccttttcaaactctcctcctcctgcttgttttcccccattggaactgggaaggagaagtagaagttttagtgggtttcagataactttcattacacatcgggctgataagagcaagagaaagtgagaaaagagggaggtgatgtgaaccagaaggaatagctccgagctcatttaggaagggggaaaaagccaaaacacaccaaacccgggtcacccagacgaaagaagacttcatttcttgtattaaaaatacactgttggcggacaataaatccgaaacgcgtggtcctggagagcagatcctagagacggacaaagttgtcagagacccatttggaaatcgagacgcgaggcttttaaaaaattattattattatttttaaacatctctaaatgttgctcgggatcgtttgaaaggattttcgtgcaggagcgttgggggctgctgattattttattttgtttattttgattcttctgtgaatgcctattattgctgagttgaggccatagaaatctaaagatcttagacgaattttacaatgtgaagttctgcatagatgccagtcaaccagatgttggaagctggctcaagtacattagattcgctggctgttatgatcagcacaaccttgttgcatgccagataaatgatcagatattctatagagtagttgcagacattgcgccgggagaggagcttctgctgttcatgaagagcgaagactatccccatgaaactatggcgccggatatccacgaagaacggcaatatcgctgcgaagactgtgaccagctctttgaatctaaggctgaactagcagatcaccaaaagtttccatgcagtactcctcactcagcattttcaatggttgaagaggactttcagcaaaaactcgaaagcgagaatgatctccaagagatacacacgatccaggagtgtaaggaatgtgaccaagtttttcctgatttgcaaagcctggagaaacacatgctgtcacatactgaagagagggaatacaagtgtgatcagtgtcccaaggcatttaactggaagtccaatttaattcgccaccagatgtcacatgacagtggaaagcactatgaatgtgaaaactgtgccaaggttttcacggaccctagcaaccttcagcggcacattcgctctcagcatgtcggtgcccgggcccatgcatgcccggagtgtggcaaaacgtttgccacttcgtcgggcctcaaacaacacaagcacatccacagcagtgtgaagccctttatctgtgaggtctgccataaatcctatactcagttttcaaacctttgccgtcataagcgcatgcatgctgattgcagaacccaaatcaagtgcaaagactgtggacaaatgttcagcactacgtcttccttaaataaacacaggaggttttgtgagggcaagaaccattttgcggcaggtggattttttggccaaggcatttcacttcctggaaccccagctatggataaaacgtccatggttaatatgagtcatgccaacccgggccttgctgactattttggcgccaataggcatcctgctggtcttacctttccaacagctcctggattttcttttagcttccctggtctgtttccttccggcttgtaccacaggcctcctttgatacctgctagttctcctgttaaaggactatcaagtactgaacagacaaacaaaagtcaaagtcccctcatgacacatcctcagatactgccagctacacaggatattttgaaggcactatctaaacacccatctgtaggggacaataagccagtggagctccagcccgagaggtcctctgaagagaggccctttgagaaaatcagtgaccagtcagagagtagtgaccttgatgatgtcagtacaccaagtggcagtgacctggaaacaacctcgggctctgatctggaaagtgacattgaaagtgataaagagaaatttaaagaaaatggtaaaatgttcaaagacaaagtaagccctcttcagaatctggcttcaataaataataagaaagaatacagcaatcattccattttctcaccatctttagaggagcagactgcggtgtcaggagctgtgaatgattctataaaggctattgcttctattgctgaaaaatactttggttcaacaggactggtggggctgcaagacaaaaaagttggagctttaccttacccttccatgtttcccctcccattttttccagcattctctcaatcaatgtacccatttcctgatagagacttgagatcgttacctttgaaaatggaaccccaatcaccaggtgaagtaaagaaactgcagaagggcagctctgagtccccctttgatctcaccactaagcgaaaggatgagaagcccttgactccagtcccctccaagcctccagtgacacctgccacaagccaagaccagcccctggatctaagtatgggcagtaggagtagagccagtgggacaaagctgactgagcctcgaaaaaaccacgtgtttgggggaaaaaaaggaagcaacgtcgaatcaagacctgcttcagatggttccttgcagcatgcaagacccactcctttctttatggaccctatttacagagtagagaaaagaaaactaactgacccacttgaagctttaaaagagaaatacttgaggccttctccaggattcttgtttcacccacaaatgtcagctattgaaaacatggcagaaaagctagagagcttcagtgccctgaaacctgaggccagtgagctcttacagtcagtgccctctatgttcaacttcagggcgcctcccaatgccctgccagagaaccttctgcggaagggaaaggagcgctatacctgcagatactgtggcaagatttttccaaggtctgcaaacctaacacggcacttgagaacccacacaggagagcagccttacagatgcaaatactgtgacagatcatttagcatatcttctaacttgcaaaggcatgttcgcaacatccacaataaagagaagccatttaagtgtcacttatgtgataggtgttttggtcaacaaaccaatttagacagacacctaaagaaacatgagaatgggaacatgtccggtacagcaacatcgtcgcctcattctgaactggaaagtacaggtgcgattctggatgacaaagaagatgcttacttcacagaaattcgaaatttcattgggaacagcaaccatggcagccaatctcccaggaatgtggaggagagaatgaatggcagtcattttaaagatgaaaaggctttggtgaccagtcaaaattcagacttgctggatgatgaagaagttgaagatgaggtgttgttagatgaggaggatgaagacaatgatattactggaaaaacaggaaaggaaccagtgacaagtaatttacatgaaggaaaccctgaggatgactatgaagaaaccagtgccctggagatgagttgcaagacatccccagtgaggtataaagaggaagaatataaaagtggactttctgctctagatcatataaggcacttcacagatagcctcaaaatgaggaaaatggaagataatcaatattctgaagctgagctgtcttcttttagtacttcccatgtgccagaggaacttaagcagccgttacacagaaagtccaaatcgcaggcatatgctatgatgctgtcactgtctgacaaggagtccctccattctacatcccacagttcttccaacgtgtggcacagtatggccagggctgcggcggaatccagtgctatccagtccataagccacgtatgacgttatcaaggttgaccagagtgggaccaagtccaacagtagcatggctctttcatataggactatttacaagactgctgagcagaatgccttataaacctgcagggtcactcatctaaagtctagtgaccttaaactgaatgatttaaaaaagaaaagaaagaaaaaagaaactatttattctcgatattttgttttgcacagcaaaggcagctgctgacttctggaagatcaatcaatgcgacttaaagtgattcagtgaaaacaaaaaacttggtgggctgaaggcatcttccagtttaccccaccttagggtatgggtgggtgagaagggcagttgagatggcagcattgatatgaatgaacactccatagaaactgaattctcttttgtacaagatcacctgacatgattgggaacagttgcttttaattacagatttaatttttttcttcgttaaagttttatgtaatttaaccctttgaagacagaagtagttggatgaaatgcacagtcaattattatagaaactgataacagggagtacttgttcccccttttgccttcttaagtacattgtttaaaactagggaaaaagggtatgtgtatattgtaaactatggatgttaacactcaaagaggttaagtcagtgaagtaacctattcatcaccagtaccgctgtaccactaataaattgtttgccaaatccttgtaataacatcttaattttagacaatcatgtcactgtttttaatgtttatttttttgtgtgtgttgcgtgtatcatgtatttatttgttggcaaactattgtttgttgattaaaatagcactgttccagtcagccactactttatgacgtctgaggcacacccctttccgaatttcaaggaccaaggtgacccgacctgtgtatgagagtgccaaatggtgtttggcttttcttaacattcctttttgtttgtttgttttgttttccttcttaatgaactaaatacgaatagatgcaacttagtttttgtaatactgaaatcgattcaattgtataaacgattataatttctttcatggaagcatgattcttctgattaaaaactgtactccatattttatgctggttgtctgcaagcttgtgcgatgttatgttcatgttaatcctatttgtaaaatgaagtgttcccaaccttatgttaaaagagagaagtaaataacagactgtattcagttattttgccctttattgaggaaccagatttgttttctttttgtttgtaatctcattttgaaataatcagcaagttgaggtactttcttcaaatgctttgtacaatataaactgttatgcctttcagtgcattactatgggaggagcaactaaaaaataaagacttacaaaaagg

SEQ ID NO: 1074 - protein, 166 aa, Homo sapiens
ILDEFYNVKFCIDASQPDVGSWLKYIRFAGCYDQHNLVACQINDQIFYRVVADIAPGEELLLFMKSEDYPHETMAPDIHEERQYRCEDCDQLFESKAELADHQKFPCSTPHSAFSMVEEDFQQKLESENDLQEIHTIQECKECDQVFPDLQSLEKHMLSHTEEREY

SEQ ID NO: 1075 - DNA, 3572 bp, Homo sapiens
ccttgccaagtaacagctttgctgtccaacatcgtgtgctgcttcgcgagaaagtcacattcggaccctttggctagattatcttagacgaattttacaatgtgaagttctgcatagatgccagtcaaccagatgttggaagctggctcaagtacattagattcgctggctgttatgatcagcacaaccttgttgcatgccagataaatgatcagatattctatagagtagttgcagacattgcgccgggagaggagcttctgctgttcatgaagagcgaagactatccccatgaaactatggcgccggatatccacgaagaacggcaatatcgctgcgaagactgtgaccagctctttgaatctaaggctgaactagcagatcaccaaaagtttccatgcagtactcctcactcagcattttcaatggttgaagaggactttcagcaaaaactcgaaagcgagaatgatctccaagagatacacacgatccaggagtgtaaggaatgtgaccaagtttttcctgatttgcaaagcctggagaaacacatgctgtcacatactgaagagagggaatacaagtgtgatcagtgtcccaaggcatttaactggaagtccaatttaattcgccaccagatgtcacatgacagtggaaagcactatgaatgtgaaaactgtgccaaggttttcacggaccctagcaaccttcagcggcacattcgctctcagcatgtcggtgcccgggcccatgcatgcccggagtgtggcaaaacgtttgccacttcgtcgggcctcaaacaacacaagcacatccacagcagtgtgaagccctttatctgtgaggtctgccataaatcctatactcagttttcaaacctttgccgtcataagcgcatgcatgctgattgcagaacccaaatcaagtgcaaagactgtggacaaatgttcagcactacgtcttccttaaataaacacaggaggttttgtgagggcaagaaccattttgcggcaggtggattttttggccaaggcatttcacttcctggaaccccagctatggataaaacgtccatggttaatatgagtcatgccaacccgggccttgctgactattttggcgccaataggcatcctgctggtcttacctttccaacagctcctggattttcttttagcttccctggtctgtttccttccggcttgtaccacaggcctcctttgatacctgctagttctcctgttaaaggactatcaagtactgaacagacaaacaaaagtcaaagtcccctcatgacacatcctcagatactgccagctacacaggatattttgaaggcactatctaaacacccatctgtaggggacaataagccagtggagctccagcccgagaggtcctctgaagagaggccctttgagaaaatcagtgaccagtcagagagtagtgaccttgatgatgtcagtacaccaagtggcagtgacctggaaacaacctcgggctctgatctggaaagtgacattgaaagtgataaagagaaatttaaagaaaatggtaaaatgttcaaagacaaagtaagccctcttcagaatctggcttcaataaataataagaaagaatacagcaatcattccattttctcaccatctttagaggagcagactgcggtgtcaggagctgtgaatgattctataaaggctattgcttctattgctgaaaaatactttggttcaacaggactggtggggctgcaagacaaaaaagttggagctttaccttacccttccatgtttcccctcccattttttccagcattctctcaatcaatgtacccatttcctgatagagacttgagatcgttacctttgaaaatggaaccccaatcaccaggtgaagtaaagaaactgcagaagggcagctctgagtccccctttgatctcaccactaagcgaaaggatgagaagcccttgactccagtcccctccaagcctccagtgacacctgccacaagccaagaccagcccctggatctaagtatgggcagtaggagtagagccagtgggacaaagctgactgagcctcgaaaaaaccacgtgtttgggggaaaaaaaggaagcaacgtcgaatcaagacctgcttcagatggttccttgcagcatgcaagacccactcctttctttatggaccctatttacagagtagagaaaagaaaactaactgacccacttgaagctttaaaagagaaatacttgaggccttctccaggattcttgtttcacccacaattccaactgcctgatcagagaacttggatgtcagctattgaaaacatggcagaaaagctagagagcttcagtgccctgaaacctgaggccagtgagctcttacagtcagtgccctctatgttcaacttcagggcgcctcccaatgccctgccagagaaccttctgcggaagggaaaggagcgctatacctgcagatactgtggcaagatttttccaaggtctgcaaacctaacacggcacttgagaacccacacaggagagcagccttacagatgcaaatactgtgacagatcatttagcatatcttctaacttgcaaaggcatgttcgcaacatccacaataaagagaagccatttaagtgtcacttatgtgataggtgttttggtcaacaaaccaatttagacagacacctaaagaaacatgagaatgggaacatgtccggtacagcaacatcgtcgcctcattctgaactggaaagtacaggtgcgattctggatgacaaagaagatgcttacttcacagaaattcgaaatttcattgggaacagcaaccatggcagccaatctcccaggaatgtggaggagagaatgaatggcagtcattttaaagatgaaaaggctttggtgaccagtcaaaattcagacttgctggatgatgaagaagttgaagatgaggtgttgttagatgaggaggatgaagacaatgatattactggaaaaacaggaaaggaaccagtgacaagtaatttacatgaaggaaaccctgaggatgactatgaagaaaccagtgccctggagatgagttgcaagacatccccagtgaggtataaagaggaagaatataaaagtggactttctgctctagatcatataaggcacttcacagatagcctcaaaatgaggaaaatggaagataatcaatattctgaagctgagctgtcttcttttagtacttcccatgtgccagaggaacttaagcagccgttacacagaaagtccaaatcgcaggcatatgctatgatgctgtcactgtctgacaaggagtccctccattctacatcccacagttcttccaacgtgtggcacagtatggccagggctgcggcggaatccagtgctatccagtccataagccacgtatgacgttatcaaggttgaccagagtgggaccaagtccaacagtagcatggctctttcatataggactatttacaagactgctgagcagaatgccttataaacctgcagggtcactcatctaaagtctagtgaccttaaactgaatgattt

SEQ ID NO: 1076 - protein, 1051 aa, Homo sapiens
MKSEDYPHETMAPDIHEERQYRCEDCDQLFESKAELADHQKFPCSTPHSAFSMVEEDFQQKLESENDLQEIHTIQECKECDQVFPDLQSLEKHMLSHTEEREYKCDQCPKAFNWKSNLIRHQMSHDSGKHYECENCAKVFTDPSNLQRHIRSQHVGARAHACPECGKTFATSSGLKQHKHIHSSVKPFICEVCHKSYTQFSNLCRHKRMHADCRTQIKCKDCGQMFSTTSSLNKHRRFCEGKNHFAAGGFFGQGISLPGTPAMDKTSMVNMSHANPGLADYFGANRHPAGLTFPTAPGFSFSFPGLFPSGLYHRPPLIPASSPVKGLSSTEQTNKSQSPLMTHPQILPATQDILKALSKHPSVGDNKPVELQPERSSEERPFEKISDQSESSDLDDVSTPSGSDLETTSGSDLESDIESDKEKFKENGKMFKDKVSPLQNLASINNKKEYSNHSIFSPSLEEQTAVSGAVNDSIKAIASIAEKYFGSTGLVGLQDKKVGALPYPSMFPLPFFPAFSQSMYPFPDRDLRSLPLKMEPQSPGEVKKLQKGSSESPFDLTTKRKDEKPLTPVPSKPPVTPATSQDQPLDLSMGSRSRASGTKLTEPRKNHVFGGKKGSNVESRPASDGSLQHARPTPFFMDPIYRVEKRKLTDPLEALKEKYLRPSPGFLFHPQFQLPDQRTWMSAIENMAEKLESFSALKPEASELLQSVPSMFNFRAPPNALPENLLRKGKERYTCRYCGKIFPRSANLTRHLRTHTGEQPYRCKYCDRSFSISSNLQRHVRNIHNKEKPFKCHLCDRCFGQQTNLDRHLKKHENGNMSGTATSSPHSELESTGAILDDKEDAYFTEIRNFIGNSNHGSQSPRNVEERMNGSHFKDEKALVTSQNSDLLDDEEVEDEVLLDEEDEDNDITGKTGKEPVTSNLHEGNPEDDYEETSALEMSCKTSPVRYKEEEYKSGLSALDHIRHFTDSLKMRKMEDNQYSEAELSSFSTSHVPEELKQPLHRKSKSQAYAMMLSLSDKESLHSTSHSSSNVWHSMARAAAESSAIQSISHV

SEQ ID NO: 1077 - DNA, 352 bp, Homo sapiens
gctgcttatctacgttgctaagccgggcgatttccttgttcctcctgcgaaacggtgcggtctggacacgtctccggggtgggtcgtccggccttcgatcttagacgaattttacaatgtgaagttctgcatagatgccagtcaaccagatgttggaagctggctcaagtacattagattcgctggctgttatgatcagcacaaccttgttgcatgccagataaatgatcagatattctatagagtagttgcagacattgcgccgggagaggagcttctgctgttcatgaagagcgaagactatccccatgaaactatggcgccggatatccacgaagaacggcaatatcgc

SEQ ID NO: 1078 - protein, 117 aa, Homo sapiens
LLIYVAKPGDFLVPPAKRCGLDTSPGWVVRPSILDEFYNVKFCIDASQPDVGSWLKYIRFAGCYDQHNLVACQINDQIFYRVVADIAPGEELLLFMKSEDYPHETMAPDIHEERQYR

SEQ ID NO: 1079 - DNA, 1524 bp, Homo sapiens
ctcactgtcaacaacatcccatcctgaagacttgcttaccacaactgagagtggggagtcagtttgaggcctagcatcacttaaacttcctccaaaggcacaaaagccagaagagaaaaatgaagacgggacattttgaaatagtcaccatgctgctggcaaccatgattctagtggacattttccaggtgaaggctgaagtgttagacatggcagataatgcatttgatgatgaatacctgaaatgtacggacaggatggaaattaaatacgttccccaactgctaaaggaggaaaaagcaagccaccagcaattagatactgtgtgggaaaatgcaaaagccaaatgggcagcccgaaagactcaaatctttctccctatgaattttaaggataaccatggaatagccctgatggcatatatttccgaagctcaagagcaaactcccttttaccatctgttcagtgaagctgtgaagatggctggccaatctcgagaagattatatctatggcttccagttcaaagctttccacttttacctcacaagagccctgcagttgctgagaaaaccttgtgaggccagttccaaaactgtggtatatagaacaagccagggcacttcatttacatttggagggctaaaccaagccaggtttggccattttaccttggcatattcagccaaacctcaggctgctaatgaccagctcactgtgttatccatctacacatgccttggagttgacattgaaaattttcttgataaagaaagtgaaagaattactttaatacctctgaatgaggtttttcaagtgtcacaggagggggctggcaataaccttatccttcaaagcataaacaagacctgcagccattatgagtgtgcatttctaggtggactaaaaaccgaaaactgtattgagaacctagaatattttcaacccatctatgtctacaaccctggtgagaaaaaccagaagcttgaagaccatagtgagaaaaactggaagcttgaagaccatggtgagaaaaaccagaagcttgaagaccatggtgtgaaaatccttgaacccacccaaatacctgaagataaaagtcaaggaaatatcaacaatcctactccaggtccagttcctgttccaggtcccaaaagccatccttctgcatcctcgggcaaactgctgcttccacagtttgggatggtcatcattttaatcagtgtttctgctataaatctctttgttgctctgtagtttgatgcattgtttatctttcttattctttacttgaaataactatagggatccacaggagatcaaaaggaatgatgtattttttacgtgttggccaaagtcactggataaaatgagaattgtatatttgttattcattttgcaaattcagaaagttggtccagatatatgtcacagaacttttcacttgtatactactcttacaatggaaaaaaatcccgaaaactgtatacttctgattaaattcaataaaagattttgattagat

SEQ ID NO: 1080 - protein, 378 aa, Homo sapiens
MKTGHFEIVTMLLATMILVDIFQVKAEVLDMADNAFDDEYLKCTDRMEIKYVPQLLKEEKASHQQLDTVWENAKAKWAARKTQIFLPMNFKDNHGIALMAYISEAQEQTPFYHLFSEAVKMAGQSREDYIYGFQFKAFHFYLTRALQLLRKPCEASSKTVVYRTSQGTSFTFGGLNQARFGHFTLAYSAKPQAANDQLTVLSIYTCLGVDIENFLDKESERITLIPLNEVFQVSQEGAGNNLILQSINKTCSHYECAFLGGLKTENCIENLEYFQPIYVYNPGEKNQKLEDHSEKNWKLEDHGEKNQKLEDHGVKILEPTQIPEDKSQGNINNPTPGPVPVPGPKSHPSASSGKLLLPQFGMVIILISVSAINLFVAL

SEQ ID NO: 1081 - DNA, 1509 bp, Homo sapiens
ctcactgtcaacaacatcccatcctgaagacttgcttaccacaactgagagtggggagtcagtttgaggcctagcatcacttaaacttcctccaaaggcacaaaagccagaagagaaaaatgaagacgggacattttgaaatagtcaccatgctgctggcaaccatgattctagtggacattttccaggtgaaggctgaagtgttagacatggcagataatgcatttgatgatgaatacctgaaatgtacggacaggatggaaattaaatacgttccccaactgctaaaggaggaaaaagcaagccaccagcaattagatactgtgtgggaaaatgcaaaagccaaatgggcagcccgaaagactcaaatctttctccctatgaattttaaggataaccatggaatagccctgatggcatatatttccgaagctcaagagcaaactcccttttaccatctgttcagtgaagctgtgaagatggctggccaatctcgagaagattatatctatggcttccagttcaaagctttccacttttacctcacaagagccctgcagttgctgagaaaaccttgtgaggccagttccaaaactgtggtatatagaacaagccagggcacttcatttacatttggagggctaaaccaagccaggtttggccattttaccttggcatattcagccaaacctcaggctgctaatgaccagctcactgtgttatccatctacacatgccttggagttgacattgaaaattttcttgataaagaaagtgaaagaattactttaatacctctgaatgaggtttttcaagtgtcacaggagggggctggcaataaccttatccttcaaagcataaacaagacctgcagccattatgagtgtgcatttctaggtggactaaaaaccgaaaactgtattgagaacctagaatattttcaacccatctatgtctacaaccctggtgagaaaaaccagaagcttgaagaccatagtgagaaaaactggaagcttgaagaccatggtgagaaaaaccagaagcttgaagaccatggtgtgaaaatccttgaacccacccaaatacctggaatgaaaattccagaaccttttccactacctgaagataaaagtcaaggaaatatcaacaatcctactccaggtccagttcctgttccaggtcccaaaagccatccttctgcatcctcgggcaaactgctgcttccacagtttgggatggtcatcattttaatcagtgtttctgctataaatctctttgttgctctgtagtttgatgcattgtttatctttcttattctttacttgaaataactatagggatccacaggagatcaaaaggaatgatgtattttttacgtgttggccaaagtcactggataaaatgagaattgtatatttgttattcattttgcaaattcagaaagttggtccagatatatgtcacagaacttttcacttgtatactactcttacaatggaaaaaaatccc

SEQ ID NO: 1082 - protein, 389 aa, Homo sapiens
MKTGHFEIVTMLLATMILVDIFQVKAEVLDMADNAFDDEYLKCTDRMEIKYVPQLLKEEKASHQQLDTVWENAKAKWAARKTQIFLPMNFKDNHGIALMAYISEAQEQTPFYHLFSEAVKMAGQSREDYIYGFQFKAFHFYLTRALQLLRKPCEASSKTVVYRTSQGTSFTFGGLNQARFGHFTLAYSAKPQAANDQLTVLSIYTCLGVDIENFLDKESERITLIPLNEVFQVSQEGAGNNLILQSINKTCSHYECAFLGGLKTENCIENLEYFQPIYVYNPGEKNQKLEDHSEKNWKLEDHGEKNQKLEDHGVKILEPTQIPGMKIPEPFPLPEDKSQGNINNPTPGPVPVPGPKSHPSASSGKLLLPQFGMVIILISVSAINLFVAL

SEQ ID NO: 1083 - DNA, 1104 bp, Homo sapiens
atgaagacgggacattttgaaatagtcaccatgctgctggcaaccatgattctagtggacattttccaggtgaaggctgaagtgttagacatggcagataatgcatttgatgatgaatacctgaaatgtacggacaggatggaaattaaatacgttccccaactgctaaaggaggaaaaagcaagccaccagcaattagatactgtgtgggaaaatgcaaaagccaaatgggcagcccgaaagactcaaatctttctccctatgaattttaaggataaccatggaatagccctgatggcatatatttccgaagctcaagagcaaactcccttttaccatctgttcagtgaagctgtgaagatggctggccaatctcgagaagattatatctatggcttccagttcaaagctttccacttttacctcacaagagccctgcagttgctgagaaaaccttgtgaggccagttccaaaactgtggtatatagaacaagccagggcacttcatttacatttggagggctaaaccaagccaggtttggccattttaccttggcatattcagccaaacctcaggctgctaatgaccagctcactgtgttatccatctacacatgccttggagttgacattgaaaattttcttgataaagaaagtgaaagaattactttaatacctctgaatgaggtttttcaagtgtcacaggagggggctggcaataaccttatccttcaaagcataaacaagacctgcagccattatgagtgtgcatttctaggtggactaaaaaccgaaaactgtattgagaacctagaatattttcaacccatctatgtctacaaccctggtgagaaaaaccagaagcttgaagaccatagtgagaaaaactggaagcttgaagaccatggtgagaaaaaccagaagcttgaagaccatggtgtgaaaatccttgaacccacccaaatacctgctccaggtccagttcctgttccaggtcccaaaagccatccttctgcatcctcgggcaaactgctgcttccacagtttgggatggtcatcattttaatcagtgtttctgctataaatctctttgttgctctgtag

SEQ ID NO: 1084 - protein, 367 aa, Homo sapiens
MKTGHFEIVTMLLATMILVDIFQVKAEVLDMADNAFDDEYLKCTDRMEIKYVPQLLKEEKASHQQLDTVWENAKAKWAARKTQIFLPMNFKDNHGIALMAYISEAQEQTPFYHLFSEAVKMAGQSREDYIYGFQFKAFHFYLTRALQLLRKPCEASSKTVVYRTSQGTSFTFGGLNQARFGHFTLAYSAKPQAANDQLTVLSIYTCLGVDIENFLDKESERITLIPLNEVFQVSQEGAGNNLILQSINKTCSHYECAFLGGLKTENCIENLEYFQPIYVYNPGEKNQKLEDHSEKNWKLEDHGEKNQKLEDHGVKILEPTQIPAPGPVPVPGPKSHPSASSGKLLLPQFGMVIILISVSAINLFVAL

SEQ ID NO: 1085 - DNA, 6771 bp, Homo sapiens
ggggggtctgctctgtgcggtgaagcttctcttcttggcacctgcctggcatcggaagagggccccttctccctccctgggcttttatgtggacactgtaatgcctcagttttctttctttctttttgtttttgacacagggtctcactctatcacccaagctggagtgcagtggcaccatcttagctcaccgcagcctcaaactccccagctcgggtgattcttcctgcctcagcctcctgagtagtagcagctgggaccacagacgtctgccaccaagcccagctgcaccgccagttccggggagggccctgggccagcggctgtccgccccccctcctttataaagtcctggcctcgggacagcccgcacagctgcccagcctgcggagacgggacagccctgtcccactcactctttcccctgctgctcctgccggcagctcagctggaaccatgggaggccgcgtctttctcgtctttctcgcattctgtgtctggctgactctgccgggagctgaaacccaggactccaggggctgtgcccggtggtgccctcaggactcctcgtgtgtcaatgccaccgcctgtcgctgcaatccagggttcagctctttttctgagatcatcaccacccccatggagacttgtgacgacatcaacgagtgtgcaacactgtcgaaagtgtcatgcggaaaattctcggactgctggaacacagaggggagctacgactgcgtgtgcagcccaggatatgagcctgtttctggggcaaaaacattcaagaatgagagcgagaacacgtgtcaagatgtggacgaatgtcagcagaacccaaggctctgtaaaagctacggcacctgcgtcaacaccctcggcagctacacgtgccagtgcctgcctggcttcaagctcaaacctgaggacccgaagctctgcacagatgtgaatgaatgcacctccggacaaaacccatgccacagctccacccactgcctcaacaacgtgggcagctatcagtgccgctgccgcccgggctggcaaccgattccggggtcccccaatggcccaaacaataccgtctgtgaagatgtggacgagtgcagctccgggcagcatcagtgtgacagctccaccgtctgcttcaacaccgtgggttcatacagctgccgctgccgcccaggctggaagcccagacacggaatcccgaataaccaaaaggacactgtctgtgaagatatgactttctccacctggaccccgccccctggagtccacagccagacgctttcccgattcttcgacaaagtccaggacctgggcagagactacaagccaggcttggccaataacaccatccagagcatcttacaggcgctggatgagctgctggaggcccctggggacctggagaccctgccccgcttacagcagcactgtgtggccagtcacctgctggatggcctagaggatgtcctcagaggcctgagcaagaacctttccaatgggctgttgaacttcagttatcctgcaggcacagaattgtccctggaggtgcagaagcaagtagacaggagtgtcaccttgagacagaatcaggcagtgatgcagctcgactggaatcaggcacagaaatctggtgacccaggcccttctgtggtgggccttgtctccattccagggatgggcaagttgctggctgaggcccctctggtcctggaacctgagaagcagatgcttctgcatgagacacaccagggcttgctgcaggacggctcccccatcctgctctcagatgtgatctctgcctttctgagcaacaacgacacccaaaacctcagctccccagttaccttcaccttctcccaccgttcagtgatcccgagacagaaggtgctctgtgtcttctgggagcatggccagaatggatgtggtcactgggccaccacaggctgcagcacaataggcaccagagacaccagcaccatctgccgttgcacccacctgagcagctttgccgtcctcatggcccactacgatgtgcaggaggaggatcccgtgctgactgtcatcacctacatggggctgagcgtctctctgctgtgcctcctcctggcggccctcacttttctcctgtgtaaagccatccagaacaccagcacctcactgcatctgcagctctcgctctgcctcttcctggcccacctcctcttcctcgtggcaattgatcaaaccggacacaaggtgctgtgctccatcatcgccggtaccttgcactatctctacctggccaccttgacctggatgctgctggaggccctgtacctcttcctcactgcacggaacctgacggtggtcaactactcaagcatcaacagattcatgaagaagctcatgttccctgtgggctacggagtcccagctgtgacagtggccatttctgcagcctccaggcctcacctttatggaacaccttcccgctgctggctccaaccagaaaagggatttatatggggcttccttggacctgtctgcgccatcttctctgtgaatttagttctctttctggtgactctctggattttgaaaaacagactctcctccctcaatagtgaagtgtccaccctccggaacacaaggatgctggcatttaaagcgacagctcagctgttcatcctgggctgcacgtggtgtctgggcatcttgcaggtgggtccggctgcccgggtcatggcctacctcttcaccatcatcaacagcctgcagggtgtcttcatcttcctggtgtactgcctcctcagccagcaggtccgggagcaatatgggaaatggtccaaagggatcaggaaattgaaaactgagtctgagatgcacacactctccagcagtgctaaggctgacacctccaaacccagcacggttaactagaaaaatcttctgaataagatcttccctctttgcccgtggaaaatctgaacaatctttgagccatctagaggggaaagaaaagactttgttctgtgtgtttcaagaaattcaccatgtcagcaatatgaaggatgttatggaaggcgtgctaggcattcaattcctgcagaaaccggaaatcttccatgccctgcaatgtgctcatcaaactctcagcatatggacggccagctgtggcccatatcttggtcactctgaagcacaatatttatgaagctatagaacgttaagacctctttcacagcctctccttcctacaaagactcctccaaatcttaaaatgaagcaggaaaacgagcctaagaggactttcataccgacaacatctgaaaggactagaatgttcacaccacgatctggatttcttaattttttgtttttgtttttgttgttctctagttctacgggtttgattatttagtcatgtgaaaaatattgattactcacacatagatcaagagagacacggctcctgccttcatggagcttttaggggaaaatgaagtggctcttgcagctagagttgactcagaagccgaaattcctagaaatcaggtttctactgctaggcaattgaagtataaactattttataaacactgtcttctttcgtcttcacaccaacatgcagaaaagtttctaatctcagatcggggatgtgcaacaaattccatttcaaaggaatgacctgcaaaactcctaaatattccaagcaaatgcccttaaccctgtctgttatctgctttccttgaacagaaattctacatgaccataaaacctcgaagatgggtatggcacagttcatgccctgtaatcctagcactttgggagggtgaggcaggaggatggctcaagcccaggagtttgagaccagtgtgggcaacagagtgagaaccatctctacccaaaaaaaaaattaaaaattagccaagcatggtgatgatataggagttaaggagaaatcatttaggcaaatagcaagggtaggaagtcctcagtaaggttttccatttaatgaaaagcagcccccaaaatcattttcttttctaacaaagaacagcctgtaaaatcgagctgcagacatagacaagcaagctggaagcttccacgggtgaatgccggcagctgtgccaataggaaaaagctacctagactaggcatgtccaaaatggcggctccaagttcccttctctttgccagccatgtgtacagtaaaaagcaggcaacatagtgtcagccaaagctcatttgcataataagattagggtggggtggccagctcacataggggtaggccctaggtaaatcagacaccgccttctcaagcctgtctataaaatctggtacactatgacgagggtcagatttcccattcagacgcccctctcccatgcaagagaaagagctgttctcctttctctttcttttgcctattaaacctctgctcctggccaggcacagtggctcacgcctataatcccagcactttgggaggctgaggtggtcagatcacctaaggtcaggagttcaagaccagcctggtcaacatggtgaaatcttgtctctagtaaaaatacaaaaatatatgaaatctcacatagatgataatattaagttccaaaagcaactcaacctggtagattctaattttttttgaggcagggtcttgctttgtcacccatgctggagtacaatggcacaaacactgctcactgcagcctcgacctcccaaggcctaagcaatcctcctgcctcagtccccctccaggtatttgaaactacaggtgtgtaccaccacaccgggctaatttttgtattttttgtagagacgtgggtctcactatgctgcccaggctcaggtcttaatctcctgagctcaggcaatccgcaggcctcagcctccctaagtgcggggattacaggcttgagccactgcacctagcctctatttgttttacaaaagagaaattgagatcctgaatgttaagtgacttgcctgaggccatcccactaacaggagccagggttaggattcaaaccccatccaactggtcccagagctggagcttcttgcactgccctacactacctaccatctccatcctctgggcacctttttataagaaccaaaacattacagagcattgctttgtcaactcagctgggaacatttcccagtgcaactcacatttttcactgctctgtgcctgtccgtataagctcaatgagtattgatttaggggctttggagaactttgaatgctaccccccaagtaaccattgttggcaacctggtacctctacttttagccatttctccttctctataaatagtgcagaagtaacccacttggtaacaggcatccttgccaagcctccaccactaggtcagtgtaagaattaaagaaagaggaaagaaacacaaaaagtggcttgatggttaagacaggtttattttagagaaaacacacctgagaggggctgctggctgaattaggttagagtcttttctacagactaagagtgtttaaggatttagggtgggagagtttcttagaggcttggactgcttctgtgttttttttgttgtgcttatatgggagggagagtggtgtgtttgcttttatacatttttctgcagctgtaggcataccccccaagtctgcttttagcttccctattttagtgcacctggagggaaaggaatgtgcttattaaggcccactgttttactggggcccattgtatgagggtgaagtttggcagttacccaagagacttttcctccaccttcctctgtgcccgagctgttttatctgcattttactgtctgctttttttggctgcttatagtttttaaaaaagtaatttccttaaatccagaaggctaaaaatgaagctgaaacttaaagtggcggtgtttgtccaaaataacggggctcctgctctgccagtcagtaccctcaagtcactcctgatcctcaacctccatgcctaaggctggttcaagagaccacataatatctgccttttattacatacatgatgggtgcatgggattctgcgtgccctttgcttgatatagactgctaaggtgagatggggaatatcagagtcagctgctgcttgaggaagcagaacacacagctggaggcttggaacatgtgggtccctatgagtgtagagcccatatccccatagagtctacctagagcaggggtcgccaaatgttttcttaaagagcctgatagtgtatatgttaggctttgtgagccaggtatttacagcaactcaattctaccactgtggtatgaaaacagctatagacaatcataaatgaatgatcatggctatgttttaataaaactttacagacactgaacttgaacttccattgtgatatgaaaacagctatagacaatcataaatgaatgatcatggctatgttttaataaaactttatggacactgagcttgaacttcatatatcagtcatgtgacacaaaatatcattcttctttttatttgttttcacccatttgaaaaatgtaaaaactattcttagctgtacagaaacagatggtgggtcagatttgactcactgcccatagtttccagaccatgatgttcaggttcatggaagcacttcactctacactaatttattcatccattcatcacatatgtgatgagcacatacagacacacctcagagatattgcaggctccactccagatcaccacaataatgtgaatattgcaataaagcaagtcatacacatt

SEQ ID NO: 1086 - protein, 823 aa, Homo sapiens
MGGRVFLVFLAFCVWLTLPGAETQDSRGCARWCPQDSSCVNATACRCNPGFSSFSEIITTPMETCDDINECATLSKVSCGKFSDCWNTEGSYDCVCSPGYEPVSGAKTFKNESENTCQDVDECQQNPRLCKSYGTCVNTLGSYTCQCLPGFKLKPEDPKLCTDVNECTSGQNPCHSSTHCLNNVGSYQCRCRPGWQPIPGSPNGPNNTVCEDVDECSSGQHQCDSSTVCFNTVGSYSCRCRPGWKPRHGIPNNQKDTVCEDMTFSTWTPPPGVHSQTLSRFFDKVQDLGRDYKPGLANNTIQSILQALDELLEAPGDLETLPRLQQHCVASHLLDGLEDVLRGLSKNLSNGLLNFSYPAGTELSLEVQKQVDRSVTLRQNQAVMQLDWNQAQKSGDPGPSVVGLVSIPGMGKLLAEAPLVLEPEKQMLLHETHQGLLQDGSPILLSDVISAFLSNNDTQNLSSPVTFTFSHRSVIPRQKVLCVFWEHGQNGCGHWATTGCSTIGTRDTSTICRCTHLSSFAVLMAHYDVQEEDPVLTVITYMGLSVSLLCLLLAALTFLLCKAIQNTSTSLHLQLSLCLFLAHLLFLVAIDQTGHKVLCSIIAGTLHYLYLATLTWMLLEALYLFLTARNLTVVNYSSINRFMKKLMFPVGYGVPAVTVAISAASRPHLYGTPSRCWLQPEKGFIWGFLGPVCAIFSVNLVLFLVTLWILKNRLSSLNSEVSTLRNTRMLAFKATAQLFILGCTWCLGILQVGPAARVMAYLFTIINSLQGVFIFLVYCLLSQQVREQYGKWSKGIRKLKTESEMHTLSSSAKADTSKPSTVN

SEQ ID NO: 1087 - DNA, 6492 bp, Homo sapiens
ggggggtctgctctgtgcggtgaagcttctcttcttggcacctgcctggcatcggaagagggccccttctccctccctgggcttttatgtggacactgtaatgcctcagttttctttctttctttttgtttttgacacagggtctcactctatcacccaagctggagtgcagtggcaccatcttagctcaccgcagcctcaaactccccagctcgggtgattcttcctgcctcagcctcctgagtagtagcagctgggaccacagacgtctgccaccaagcccagctgcaccgccagttccggggagggccctgggccagcggctgtccgccccccctcctttataaagtcctggcctcgggacagcccgcacagctgcccagcctgcggagacgggacagccctgtcccactcactctttcccctgctgctcctgccggcagctcagctggaaccatgggaggccgcgtctttctcgtctttctcgcattctgtgtctggctgactctgccgggagctgaaacccaggactccaggggctgtgcccggtggtgccctcaggactcctcgtgtgtcaatgccaccgcctgtcgctgcaatccagggttcagctctttttctgagatcatcaccacccccatggagacttgtgacgacatcaacgagtgtgcaacactgtcgaaagtgtcatgcggaaaattctcggactgctggaacacagaggggagctacgactgcgtgtgcagcccaggatatgagcctgtttctggggcaaaaacattcaagaatgagagcgagaacacgtgtcaagatgtggacgagtgcagctccgggcagcatcagtgtgacagctccaccgtctgcttcaacaccgtgggttcatacagctgccgctgccgcccaggctggaagcccagacacggaatcccgaataaccaaaaggacactgtctgtgaagatatgactttctccacctggaccccgccccctggagtccacagccagacgctttcccgattcttcgacaaagtccaggacctgggcagagactacaagccaggcttggccaataacaccatccagagcatcttacaggcgctggatgagctgctggaggcccctggggacctggagaccctgccccgcttacagcagcactgtgtggccagtcacctgctggatggcctagaggatgtcctcagaggcctgagcaagaacctttccaatgggctgttgaacttcagttatcctgcaggcacagaattgtccctggaggtgcagaagcaagtagacaggagtgtcaccttgagacagaatcaggcagtgatgcagctcgactggaatcaggcacagaaatctggtgacccaggcccttctgtggtgggccttgtctccattccagggatgggcaagttgctggctgaggcccctctggtcctggaacctgagaagcagatgcttctgcatgagacacaccagggcttgctgcaggacggctcccccatcctgctctcagatgtgatctctgcctttctgagcaacaacgacacccaaaacctcagctccccagttaccttcaccttctcccaccgttcagtgatcccgagacagaaggtgctctgtgtcttctgggagcatggccagaatggatgtggtcactgggccaccacaggctgcagcacaataggcaccagagacaccagcaccatctgccgttgcacccacctgagcagctttgccgtcctcatggcccactacgatgtgcaggaggaggatcccgtgctgactgtcatcacctacatggggctgagcgtctctctgctgtgcctcctcctggcggccctcacttttctcctgtgtaaagccatccagaacaccagcacctcactgcatctgcagctctcgctctgcctcttcctggcccacctcctcttcctcgtggcaattgatcaaaccggacacaaggtgctgtgctccatcatcgccggtaccttgcactatctctacctggccaccttgacctggatgctgctggaggccctgtacctcttcctcactgcacggaacctgacggtggtcaactactcaagcatcaacagattcatgaagaagctcatgttccctgtgggctacggagtcccagctgtgacagtggccatttctgcagcctccaggcctcacctttatggaacaccttcccgctgctggctccaaccagaaaagggatttatatggggcttccttggacctgtctgcgccatcttctctgtgaatttagttctctttctggtgactctctggattttgaaaaacagactctcctccctcaatagtgaagtgtccaccctccggaacacaaggatgctggcatttaaagcgacagctcagctgttcatcctgggctgcacgtggtgtctgggcatcttgcaggtgggtccggctgcccgggtcatggcctacctcttcaccatcatcaacagcctgcagggtgtcttcatcttcctggtgtactgcctcctcagccagcaggtccgggagcaatatgggaaatggtccaaagggatcaggaaattgaaaactgagtctgagatgcacacactctccagcagtgctaaggctgacacctccaaacccagcacggttaactagaaaaatcttctgaataagatcttccctctttgcccgtggaaaatctgaacaatctttgagccatctagaggggaaagaaaagactttgttctgtgtgtttcaagaaattcaccatgtcagcaatatgaaggatgttatggaaggcgtgctaggcattcaattcctgcagaaaccggaaatcttccatgccctgcaatgtgctcatcaaactctcagcatatggacggccagctgtggcccatatcttggtcactctgaagcacaatatttatgaagctatagaacgttaagacctctttcacagcctctccttcctacaaagactcctccaaatcttaaaatgaagcaggaaaacgagcctaagaggactttcataccgacaacatctgaaaggactagaatgttcacaccacgatctggatttcttaattttttgtttttgtttttgttgttctctagttctacgggtttgattatttagtcatgtgaaaaatattgattactcacacatagatcaagagagacacggctcctgccttcatggagcttttaggggaaaatgaagtggctcttgcagctagagttgactcagaagccgaaattcctagaaatcaggtttctactgctaggcaattgaagtataaactattttataaacactgtcttctttcgtcttcacaccaacatgcagaaaagtttctaatctcagatcggggatgtgcaacaaattccatttcaaaggaatgacctgcaaaactcctaaatattccaagcaaatgcccttaaccctgtctgttatctgctttccttgaacagaaattctacatgaccataaaacctcgaagatgggtatggcacagttcatgccctgtaatcctagcactttgggagggtgaggcaggaggatggctcaagcccaggagtttgagaccagtgtgggcaacagagtgagaaccatctctacccaaaaaaaaaattaaaaattagccaagcatggtgatgatataggagttaaggagaaatcatttaggcaaatagcaagggtaggaagtcctcagtaaggttttccatttaatgaaaagcagcccccaaaatcattttcttttctaacaaagaacagcctgtaaaatcgagctgcagacatagacaagcaagctggaagcttccacgggtgaatgccggcagctgtgccaataggaaaaagctacctagactaggcatgtccaaaatggcggctccaagttcccttctctttgccagccatgtgtacagtaaaaagcaggcaacatagtgtcagccaaagctcatttgcataataagattagggtggggtggccagctcacataggggtaggccctaggtaaatcagacaccgccttctcaagcctgtctataaaatctggtacactatgacgagggtcagatttcccattcagacgcccctctcccatgcaagagaaagagctgttctcctttctctttcttttgcctattaaacctctgctcctggccaggcacagtggctcacgcctataatcccagcactttgggaggctgaggtggtcagatcacctaaggtcaggagttcaagaccagcctggtcaacatggtgaaatcttgtctctagtaaaaatacaaaaatatatgaaatctcacatagatgataatattaagttccaaaagcaactcaacctggtagattctaattttttttgaggcagggtcttgctttgtcacccatgctggagtacaatggcacaaacactgctcactgcagcctcgacctcccaaggcctaagcaatcctcctgcctcagtccccctccaggtatttgaaactacaggtgtgtaccaccacaccgggctaatttttgtattttttgtagagacgtgggtctcactatgctgcccaggctcaggtcttaatctcctgagctcaggcaatccgcaggcctcagcctccctaagtgcggggattacaggcttgagccactgcacctagcctctatttgttttacaaaagagaaattgagatcctgaatgttaagtgacttgcctgaggccatcccactaacaggagccagggttaggattcaaaccccatccaactggtcccagagctggagcttcttgcactgccctacactacctaccatctccatcctctgggcacctttttataagaaccaaaacattacagagcattgctttgtcaactcagctgggaacatttcccagtgcaactcacatttttcactgctctgtgcctgtccgtataagctcaatgagtattgatttaggggctttggagaactttgaatgctaccccccaagtaaccattgttggcaacctggtacctctacttttagccatttctccttctctataaatagtgcagaagtaacccacttggtaacaggcatccttgccaagcctccaccactaggtcagtgtaagaattaaagaaagaggaaagaaacacaaaaagtggcttgatggttaagacaggtttattttagagaaaacacacctgagaggggctgctggctgaattaggttagagtcttttctacagactaagagtgtttaaggatttagggtgggagagtttcttagaggcttggactgcttctgtgttttttttgttgtgcttatatgggagggagagtggtgtgtttgcttttatacatttttctgcagctgtaggcataccccccaagtctgcttttagcttccctattttagtgcacctggagggaaaggaatgtgcttattaaggcccactgttttactggggcccattgtatgagggtgaagtttggcagttacccaagagacttttcctccaccttcctctgtgcccgagctgttttatctgcattttactgtctgctttttttggctgcttatagtttttaaaaaagtaatttccttaaatccagaaggctaaaaatgaagctgaaacttaaagtggcggtgtttgtccaaaataacggggctcctgctctgccagtcagtaccctcaagtcactcctgatcctcaacctccatgcctaaggctggttcaagagaccacataatatctgccttttattacatacatgatgggtgcatgggattctgcgtgccctttgcttgatatagactgctaaggtgagatggggaatatcagagtcagctgctgcttgaggaagcagaacacacagctggaggcttggaacatgtgggtccctatgagtgtagagcccatatccccatagagtctacctagagcaggggtcgccaaatgttttcttaaagagcctgatagtgtatatgttaggctttgtgagccaggtatttacagcaactcaattctaccactgtggtatgaaaacagctatagacaatcataaatgaatgatcatggctatgttttaataaaactttacagacactgaacttgaacttccattgtgatatgaaaacagctatagacaatcataaatgaatgatcatggctatgttttaataaaactttatggacactgagcttgaacttcatatatcagtcatgtgacacaaaatatcattcttctttttatttgttttcacccatttgaaaaatgtaaaaactattcttagctgtacagaaacagatggtgggtcagatttgactcactgcccatagtttccagaccatgatgttcaggttcatggaagcacttcactctacactaatttattcatccattcatcacatatgtgatgagcacatacagacacacctcagagatattgcaggctccactccagatcaccacaataatgtgaatattgcaataaagcaagtcatacacatt

SEQ ID NO: 1088 - protein, 730 aa, Homo sapiens
MGGRVFLVFLAFCVWLTLPGAETQDSRGCARWCPQDSSCVNATACRCNPGFSSFSEIITTPMETCDDINECATLSKVSCGKFSDCWNTEGSYDCVCSPGYEPVSGAKTFKNESENTCQDVDECSSGQHQCDSSTVCFNTVGSYSCRCRPGWKPRHGIPNNQKDTVCEDMTFSTWTPPPGVHSQTLSRFFDKVQDLGRDYKPGLANNTIQSILQALDELLEAPGDLETLPRLQQHCVASHLLDGLEDVLRGLSKNLSNGLLNFSYPAGTELSLEVQKQVDRSVTLRQNQAVMQLDWNQAQKSGDPGPSVVGLVSIPGMGKLLAEAPLVLEPEKQMLLHETHQGLLQDGSPILLSDVISAFLSNNDTQNLSSPVTFTFSHRSVIPRQKVLCVFWEHGQNGCGHWATTGCSTIGTRDTSTICRCTHLSSFAVLMAHYDVQEEDPVLTVITYMGLSVSLLCLLLAALTFLLCKAIQNTSTSLHLQLSLCLFLAHLLFLVAIDQTGHKVLCSIIAGTLHYLYLATLTWMLLEALYLFLTARNLTVVNYSSINRFMKKLMFPVGYGVPAVTVAISAASRPHLYGTPSRCWLQPEKGFIWGFLGPVCAIFSVNLVLFLVTLWILKNRLSSLNSEVSTLRNTRMLAFKATAQLFILGCTWCLGILQVGPAARVMAYLFTIINSLQGVFIFLVYCLLSQQVREQYGKWSKGIRKLKTESEMHTLSSSAKADTSKPSTVN

SEQ ID NO: 1089 - DNA, 6624 bp, Homo sapiens
ggggggtctgctctgtgcggtgaagcttctcttcttggcacctgcctggcatcggaagagggccccttctccctccctgggcttttatgtggacactgtaatgcctcagttttctttctttctttttgtttttgacacagggtctcactctatcacccaagctggagtgcagtggcaccatcttagctcaccgcagcctcaaactccccagctcgggtgattcttcctgcctcagcctcctgagtagtagcagctgggaccacagacgtctgccaccaagcccagctgcaccgccagttccggggagggccctgggccagcggctgtccgccccccctcctttataaagtcctggcctcgggacagcccgcacagctgcccagcctgcggagacgggacagccctgtcccactcactctttcccctgctgctcctgccggcagctcagctggaaccatgggaggccgcgtctttctcgtctttctcgcattctgtgtctggctgactctgccgggagctgaaacccaggactccaggggctgtgcccggtggtgccctcaggactcctcgtgtgtcaatgccaccgcctgtcgctgcaatccagggttcagctctttttctgagatcatcaccacccccatggagacttgtgacgacatcaacgagtgtgcaacactgtcgaaagtgtcatgcggaaaattctcggactgctggaacacagaggggagctacgactgcgtgtgcagcccaggatatgagcctgtttctggggcaaaaacattcaagaatgagagcgagaacacgtgtcaagatgtggacgaatgtcagcagaacccaaggctctgtaaaagctacggcacctgcgtcaacaccctcggcagctacacgtgccagtgcctgcctggcttcaagctcaaacctgaggacccgaagctctgcacagatgtggacgagtgcagctccgggcagcatcagtgtgacagctccaccgtctgcttcaacaccgtgggttcatacagctgccgctgccgcccaggctggaagcccagacacggaatcccgaataaccaaaaggacactgtctgtgaagatatgactttctccacctggaccccgccccctggagtccacagccagacgctttcccgattcttcgacaaagtccaggacctgggcagagactacaagccaggcttggccaataacaccatccagagcatcttacaggcgctggatgagctgctggaggcccctggggacctggagaccctgccccgcttacagcagcactgtgtggccagtcacctgctggatggcctagaggatgtcctcagaggcctgagcaagaacctttccaatgggctgttgaacttcagttatcctgcaggcacagaattgtccctggaggtgcagaagcaagtagacaggagtgtcaccttgagacagaatcaggcagtgatgcagctcgactggaatcaggcacagaaatctggtgacccaggcccttctgtggtgggccttgtctccattccagggatgggcaagttgctggctgaggcccctctggtcctggaacctgagaagcagatgcttctgcatgagacacaccagggcttgctgcaggacggctcccccatcctgctctcagatgtgatctctgcctttctgagcaacaacgacacccaaaacctcagctccccagttaccttcaccttctcccaccgttcagtgatcccgagacagaaggtgctctgtgtcttctgggagcatggccagaatggatgtggtcactgggccaccacaggctgcagcacaataggcaccagagacaccagcaccatctgccgttgcacccacctgagcagctttgccgtcctcatggcccactacgatgtgcaggaggaggatcccgtgctgactgtcatcacctacatggggctgagcgtctctctgctgtgcctcctcctggcggccctcacttttctcctgtgtaaagccatccagaacaccagcacctcactgcatctgcagctctcgctctgcctcttcctggcccacctcctcttcctcgtggcaattgatcaaaccggacacaaggtgctgtgctccatcatcgccggtaccttgcactatctctacctggccaccttgacctggatgctgctggaggccctgtacctcttcctcactgcacggaacctgacggtggtcaactactcaagcatcaacagattcatgaagaagctcatgttccctgtgggctacggagtcccagctgtgacagtggccatttctgcagcctccaggcctcacctttatggaacaccttcccgctgctggctccaaccagaaaagggatttatatggggcttccttggacctgtctgcgccatcttctctgtgaatttagttctctttctggtgactctctggattttgaaaaacagactctcctccctcaatagtgaagtgtccaccctccggaacacaaggatgctggcatttaaagcgacagctcagctgttcatcctgggctgcacgtggtgtctgggcatcttgcaggtgggtccggctgcccgggtcatggcctacctcttcaccatcatcaacagcctgcagggtgtcttcatcttcctggtgtactgcctcctcagccagcaggtccgggagcaatatgggaaatggtccaaagggatcaggaaattgaaaactgagtctgagatgcacacactctccagcagtgctaaggctgacacctccaaacccagcacggttaactagaaaaatcttctgaataagatcttccctctttgcccgtggaaaatctgaacaatctttgagccatctagaggggaaagaaaagactttgttctgtgtgtttcaagaaattcaccatgtcagcaatatgaaggatgttatggaaggcgtgctaggcattcaattcctgcagaaaccggaaatcttccatgccctgcaatgtgctcatcaaactctcagcatatggacggccagctgtggcccatatcttggtcactctgaagcacaatatttatgaagctatagaacgttaagacctctttcacagcctctccttcctacaaagactcctccaaatcttaaaatgaagcaggaaaacgagcctaagaggactttcataccgacaacatctgaaaggactagaatgttcacaccacgatctggatttcttaattttttgtttttgtttttgttgttctctagttctacgggtttgattatttagtcatgtgaaaaatattgattactcacacatagatcaagagagacacggctcctgccttcatggagcttttaggggaaaatgaagtggctcttgcagctagagttgactcagaagccgaaattcctagaaatcaggtttctactgctaggcaattgaagtataaactattttataaacactgtcttctttcgtcttcacaccaacatgcagaaaagtttctaatctcagatcggggatgtgcaacaaattccatttcaaaggaatgacctgcaaaactcctaaatattccaagcaaatgcccttaaccctgtctgttatctgctttccttgaacagaaattctacatgaccataaaacctcgaagatgggtatggcacagttcatgccctgtaatcctagcactttgggagggtgaggcaggaggatggctcaagcccaggagtttgagaccagtgtgggcaacagagtgagaaccatctctacccaaaaaaaaaattaaaaattagccaagcatggtgatgatataggagttaaggagaaatcatttaggcaaatagcaagggtaggaagtcctcagtaaggttttccatttaatgaaaagcagcccccaaaatcattttcttttctaacaaagaacagcctgtaaaatcgagctgcagacatagacaagcaagctggaagcttccacgggtgaatgccggcagctgtgccaataggaaaaagctacctagactaggcatgtccaaaatggcggctccaagttcccttctctttgccagccatgtgtacagtaaaaagcaggcaacatagtgtcagccaaagctcatttgcataataagattagggtggggtggccagctcacataggggtaggccctaggtaaatcagacaccgccttctcaagcctgtctataaaatctggtacactatgacgagggtcagatttcccattcagacgcccctctcccatgcaagagaaagagctgttctcctttctctttcttttgcctattaaacctctgctcctggccaggcacagtggctcacgcctataatcccagcactttgggaggctgaggtggtcagatcacctaaggtcaggagttcaagaccagcctggtcaacatggtgaaatcttgtctctagtaaaaatacaaaaatatatgaaatctcacatagatgataatattaagttccaaaagcaactcaacctggtagattctaattttttttgaggcagggtcttgctttgtcacccatgctggagtacaatggcacaaacactgctcactgcagcctcgacctcccaaggcctaagcaatcctcctgcctcagtccccctccaggtatttgaaactacaggtgtgtaccaccacaccgggctaatttttgtattttttgtagagacgtgggtctcactatgctgcccaggctcaggtcttaatctcctgagctcaggcaatccgcaggcctcagcctccctaagtgcggggattacaggcttgagccactgcacctagcctctatttgttttacaaaagagaaattgagatcctgaatgttaagtgacttgcctgaggccatcccactaacaggagccagggttaggattcaaaccccatccaactggtcccagagctggagcttcttgcactgccctacactacctaccatctccatcctctgggcacctttttataagaaccaaaacattacagagcattgctttgtcaactcagctgggaacatttcccagtgcaactcacatttttcactgctctgtgcctgtccgtataagctcaatgagtattgatttaggggctttggagaactttgaatgctaccccccaagtaaccattgttggcaacctggtacctctacttttagccatttctccttctctataaatagtgcagaagtaacccacttggtaacaggcatccttgccaagcctccaccactaggtcagtgtaagaattaaagaaagaggaaagaaacacaaaaagtggcttgatggttaagacaggtttattttagagaaaacacacctgagaggggctgctggctgaattaggttagagtcttttctacagactaagagtgtttaaggatttagggtgggagagtttcttagaggcttggactgcttctgtgttttttttgttgtgcttatatgggagggagagtggtgtgtttgcttttatacatttttctgcagctgtaggcataccccccaagtctgcttttagcttccctattttagtgcacctggagggaaaggaatgtgcttattaaggcccactgttttactggggcccattgtatgagggtgaagtttggcagttacccaagagacttttcctccaccttcctctgtgcccgagctgttttatctgcattttactgtctgctttttttggctgcttatagtttttaaaaaagtaatttccttaaatccagaaggctaaaaatgaagctgaaacttaaagtggcggtgtttgtccaaaataacggggctcctgctctgccagtcagtaccctcaagtcactcctgatcctcaacctccatgcctaaggctggttcaagagaccacataatatctgccttttattacatacatgatgggtgcatgggattctgcgtgccctttgcttgatatagactgctaaggtgagatggggaatatcagagtcagctgctgcttgaggaagcagaacacacagctggaggcttggaacatgtgggtccctatgagtgtagagcccatatccccatagagtctacctagagcaggggtcgccaaatgttttcttaaagagcctgatagtgtatatgttaggctttgtgagccaggtatttacagcaactcaattctaccactgtggtatgaaaacagctatagacaatcataaatgaatgatcatggctatgttttaataaaactttacagacactgaacttgaacttccattgtgatatgaaaacagctatagacaatcataaatgaatgatcatggctatgttttaataaaactttatggacactgagcttgaacttcatatatcagtcatgtgacacaaaatatcattcttctttttatttgttttcacccatttgaaaaatgtaaaaactattcttagctgtacagaaacagatggtgggtcagatttgactcactgcccatagtttccagaccatgatgttcaggttcatggaagcacttcactctacactaatttattcatccattcatcacatatgtgatgagcacatacagacacacctcagagatattgcaggctccactccagatcaccacaataatgtgaatattgcaataaagcaagtcatacacatt

SEQ ID NO: 1090 - protein, 774 aa, Homo sapiens
MGGRVFLVFLAFCVWLTLPGAETQDSRGCARWCPQDSSCVNATACRCNPGFSSFSEIITTPMETCDDINECATLSKVSCGKFSDCWNTEGSYDCVCSPGYEPVSGAKTFKNESENTCQDVDECQQNPRLCKSYGTCVNTLGSYTCQCLPGFKLKPEDPKLCTDVDECSSGQHQCDSSTVCFNTVGSYSCRCRPGWKPRHGIPNNQKDTVCEDMTFSTWTPPPGVHSQTLSRFFDKVQDLGRDYKPGLANNTIQSILQALDELLEAPGDLETLPRLQQHCVASHLLDGLEDVLRGLSKNLSNGLLNFSYPAGTELSLEVQKQVDRSVTLRQNQAVMQLDWNQAQKSGDPGPSVVGLVSIPGMGKLLAEAPLVLEPEKQMLLHETHQGLLQDGSPILLSDVISAFLSNNDTQNLSSPVTFTFSHRSVIPRQKVLCVFWEHGQNGCGHWATTGCSTIGTRDTSTICRCTHLSSFAVLMAHYDVQEEDPVLTVITYMGLSVSLLCLLLAALTFLLCKAIQNTSTSLHLQLSLCLFLAHLLFLVAIDQTGHKVLCSIIAGTLHYLYLATLTWMLLEALYLFLTARNLTVVNYSSINRFMKKLMFPVGYGVPAVTVAISAASRPHLYGTPSRCWLQPEKGFIWGFLGPVCAIFSVNLVLFLVTLWILKNRLSSLNSEVSTLRNTRMLAFKATAQLFILGCTWCLGILQVGPAARVMAYLFTIINSLQGVFIFLVYCLLSQQVREQYGKWSKGIRKLKTESEMHTLSSSAKADTSKPSTVN

SEQ ID NO: 1091 - DNA, 6345 bp, Homo sapiens
ggggggtctgctctgtgcggtgaagcttctcttcttggcacctgcctggcatcggaagagggccccttctccctccctgggcttttatgtggacactgtaatgcctcagttttctttctttctttttgtttttgacacagggtctcactctatcacccaagctggagtgcagtggcaccatcttagctcaccgcagcctcaaactccccagctcgggtgattcttcctgcctcagcctcctgagtagtagcagctgggaccacagacgtctgccaccaagcccagctgcaccgccagttccggggagggccctgggccagcggctgtccgccccccctcctttataaagtcctggcctcgggacagcccgcacagctgcccagcctgcggagacgggacagccctgtcccactcactctttcccctgctgctcctgccggcagctcagctggaaccatgggaggccgcgtctttctcgtctttctcgcattctgtgtctggctgactctgccgggagctgaaacccaggactccaggggctgtgcccggtggtgccctcaggactcctcgtgtgtcaatgccaccgcctgtcgctgcaatccagggttcagctctttttctgagatcatcaccacccccatggagacttgtgacgacatcaacgagtgtgcaacactgtcgaaagtgtcatgcggaaaattctcggactgctggaacacagaggggagctacgactgcgtgtgcagcccaggatatgagcctgtttctggggcaaaaacattcaagaatgagagcgagaacacgtgtcaagatatgactttctccacctggaccccgccccctggagtccacagccagacgctttcccgattcttcgacaaagtccaggacctgggcagagactacaagccaggcttggccaataacaccatccagagcatcttacaggcgctggatgagctgctggaggcccctggggacctggagaccctgccccgcttacagcagcactgtgtggccagtcacctgctggatggcctagaggatgtcctcagaggcctgagcaagaacctttccaatgggctgttgaacttcagttatcctgcaggcacagaattgtccctggaggtgcagaagcaagtagacaggagtgtcaccttgagacagaatcaggcagtgatgcagctcgactggaatcaggcacagaaatctggtgacccaggcccttctgtggtgggccttgtctccattccagggatgggcaagttgctggctgaggcccctctggtcctggaacctgagaagcagatgcttctgcatgagacacaccagggcttgctgcaggacggctcccccatcctgctctcagatgtgatctctgcctttctgagcaacaacgacacccaaaacctcagctccccagttaccttcaccttctcccaccgttcagtgatcccgagacagaaggtgctctgtgtcttctgggagcatggccagaatggatgtggtcactgggccaccacaggctgcagcacaataggcaccagagacaccagcaccatctgccgttgcacccacctgagcagctttgccgtcctcatggcccactacgatgtgcaggaggaggatcccgtgctgactgtcatcacctacatggggctgagcgtctctctgctgtgcctcctcctggcggccctcacttttctcctgtgtaaagccatccagaacaccagcacctcactgcatctgcagctctcgctctgcctcttcctggcccacctcctcttcctcgtggcaattgatcaaaccggacacaaggtgctgtgctccatcatcgccggtaccttgcactatctctacctggccaccttgacctggatgctgctggaggccctgtacctcttcctcactgcacggaacctgacggtggtcaactactcaagcatcaacagattcatgaagaagctcatgttccctgtgggctacggagtcccagctgtgacagtggccatttctgcagcctccaggcctcacctttatggaacaccttcccgctgctggctccaaccagaaaagggatttatatggggcttccttggacctgtctgcgccatcttctctgtgaatttagttctctttctggtgactctctggattttgaaaaacagactctcctccctcaatagtgaagtgtccaccctccggaacacaaggatgctggcatttaaagcgacagctcagctgttcatcctgggctgcacgtggtgtctgggcatcttgcaggtgggtccggctgcccgggtcatggcctacctcttcaccatcatcaacagcctgcagggtgtcttcatcttcctggtgtactgcctcctcagccagcaggtccgggagcaatatgggaaatggtccaaagggatcaggaaattgaaaactgagtctgagatgcacacactctccagcagtgctaaggctgacacctccaaacccagcacggttaactagaaaaatcttctgaataagatcttccctctttgcccgtggaaaatctgaacaatctttgagccatctagaggggaaagaaaagactttgttctgtgtgtttcaagaaattcaccatgtcagcaatatgaaggatgttatggaaggcgtgctaggcattcaattcctgcagaaaccggaaatcttccatgccctgcaatgtgctcatcaaactctcagcatatggacggccagctgtggcccatatcttggtcactctgaagcacaatatttatgaagctatagaacgttaagacctctttcacagcctctccttcctacaaagactcctccaaatcttaaaatgaagcaggaaaacgagcctaagaggactttcataccgacaacatctgaaaggactagaatgttcacaccacgatctggatttcttaattttttgtttttgtttttgttgttctctagttctacgggtttgattatttagtcatgtgaaaaatattgattactcacacatagatcaagagagacacggctcctgccttcatggagcttttaggggaaaatgaagtggctcttgcagctagagttgactcagaagccgaaattcctagaaatcaggtttctactgctaggcaattgaagtataaactattttataaacactgtcttctttcgtcttcacaccaacatgcagaaaagtttctaatctcagatcggggatgtgcaacaaattccatttcaaaggaatgacctgcaaaactcctaaatattccaagcaaatgcccttaaccctgtctgttatctgctttccttgaacagaaattctacatgaccataaaacctcgaagatgggtatggcacagttcatgccctgtaatcctagcactttgggagggtgaggcaggaggatggctcaagcccaggagtttgagaccagtgtgggcaacagagtgagaaccatctctacccaaaaaaaaaattaaaaattagccaagcatggtgatgatataggagttaaggagaaatcatttaggcaaatagcaagggtaggaagtcctcagtaaggttttccatttaatgaaaagcagcccccaaaatcattttcttttctaacaaagaacagcctgtaaaatcgagctgcagacatagacaagcaagctggaagcttccacgggtgaatgccggcagctgtgccaataggaaaaagctacctagactaggcatgtccaaaatggcggctccaagttcccttctctttgccagccatgtgtacagtaaaaagcaggcaacatagtgtcagccaaagctcatttgcataataagattagggtggggtggccagctcacataggggtaggccctaggtaaatcagacaccgccttctcaagcctgtctataaaatctggtacactatgacgagggtcagatttcccattcagacgcccctctcccatgcaagagaaagagctgttctcctttctctttcttttgcctattaaacctctgctcctggccaggcacagtggctcacgcctataatcccagcactttgggaggctgaggtggtcagatcacctaaggtcaggagttcaagaccagcctggtcaacatggtgaaatcttgtctctagtaaaaatacaaaaatatatgaaatctcacatagatgataatattaagttccaaaagcaactcaacctggtagattctaattttttttgaggcagggtcttgctttgtcacccatgctggagtacaatggcacaaacactgctcactgcagcctcgacctcccaaggcctaagcaatcctcctgcctcagtccccctccaggtatttgaaactacaggtgtgtaccaccacaccgggctaatttttgtattttttgtagagacgtgggtctcactatgctgcccaggctcaggtcttaatctcctgagctcaggcaatccgcaggcctcagcctccctaagtgcggggattacaggcttgagccactgcacctagcctctatttgttttacaaaagagaaattgagatcctgaatgttaagtgacttgcctgaggccatcccactaacaggagccagggttaggattcaaaccccatccaactggtcccagagctggagcttcttgcactgccctacactacctaccatctccatcctctgggcacctttttataagaaccaaaacattacagagcattgctttgtcaactcagctgggaacatttcccagtgcaactcacatttttcactgctctgtgcctgtccgtataagctcaatgagtattgatttaggggctttggagaactttgaatgctaccccccaagtaaccattgttggcaacctggtacctctacttttagccatttctccttctctataaatagtgcagaagtaacccacttggtaacaggcatccttgccaagcctccaccactaggtcagtgtaagaattaaagaaagaggaaagaaacacaaaaagtggcttgatggttaagacaggtttattttagagaaaacacacctgagaggggctgctggctgaattaggttagagtcttttctacagactaagagtgtttaaggatttagggtgggagagtttcttagaggcttggactgcttctgtgttttttttgttgtgcttatatgggagggagagtggtgtgtttgcttttatacatttttctgcagctgtaggcataccccccaagtctgcttttagcttccctattttagtgcacctggagggaaaggaatgtgcttattaaggcccactgttttactggggcccattgtatgagggtgaagtttggcagttacccaagagacttttcctccaccttcctctgtgcccgagctgttttatctgcattttactgtctgctttttttggctgcttatagtttttaaaaaagtaatttccttaaatccagaaggctaaaaatgaagctgaaacttaaagtggcggtgtttgtccaaaataacggggctcctgctctgccagtcagtaccctcaagtcactcctgatcctcaacctccatgcctaaggctggttcaagagaccacataatatctgccttttattacatacatgatgggtgcatgggattctgcgtgccctttgcttgatatagactgctaaggtgagatggggaatatcagagtcagctgctgcttgaggaagcagaacacacagctggaggcttggaacatgtgggtccctatgagtgtagagcccatatccccatagagtctacctagagcaggggtcgccaaatgttttcttaaagagcctgatagtgtatatgttaggctttgtgagccaggtatttacagcaactcaattctaccactgtggtatgaaaacagctatagacaatcataaatgaatgatcatggctatgttttaataaaactttacagacactgaacttgaacttccattgtgatatgaaaacagctatagacaatcataaatgaatgatcatggctatgttttaataaaactttatggacactgagcttgaacttcatatatcagtcatgtgacacaaaatatcattcttctttttatttgttttcacccatttgaaaaatgtaaaaactattcttagctgtacagaaacagatggtgggtcagatttgactcactgcccatagtttccagaccatgatgttcaggttcatggaagcacttcactctacactaatttattcatccattcatcacatatgtgatgagcacatacagacacacctcagagatattgcaggctccactccagatcaccacaataatgtgaatattgcaataaagcaagtcatacacatt

SEQ ID NO: 1092 - protein, 681 aa, Homo sapiens
MGGRVFLVFLAFCVWLTLPGAETQDSRGCARWCPQDSSCVNATACRCNPGFSSFSEIITTPMETCDDINECATLSKVSCGKFSDCWNTEGSYDCVCSPGYEPVSGAKTFKNESENTCQDMTFSTWTPPPGVHSQTLSRFFDKVQDLGRDYKPGLANNTIQSILQALDELLEAPGDLETLPRLQQHCVASHLLDGLEDVLRGLSKNLSNGLLNFSYPAGTELSLEVQKQVDRSVTLRQNQAVMQLDWNQAQKSGDPGPSVVGLVSIPGMGKLLAEAPLVLEPEKQMLLHETHQGLLQDGSPILLSDVISAFLSNNDTQNLSSPVTFTFSHRSVIPRQKVLCVFWEHGQNGCGHWATTGCSTIGTRDTSTICRCTHLSSFAVLMAHYDVQEEDPVLTVITYMGLSVSLLCLLLAALTFLLCKAIQNTSTSLHLQLSLCLFLAHLLFLVAIDQTGHKVLCSIIAGTLHYLYLATLTWMLLEALYLFLTARNLTVVNYSSINRFMKKLMFPVGYGVPAVTVAISAASRPHLYGTPSRCWLQPEKGFIWGFLGPVCAIFSVNLVLFLVTLWILKNRLSSLNSEVSTLRNTRMLAFKATAQLFILGCTWCLGILQVGPAARVMAYLFTIINSLQGVFIFLVYCLLSQQVREQYGKWSKGIRKLKTESEMHTLSSSAKADTSKPSTVN

SEQ ID NO: 1093 - DNA, 3330 bp, Homo sapiens
ggggggtctgctctgtgcggtgaagcttctcttcttggcacctgcctggcatcggaagagggccccttctccctccctgggcttttatgtggacactgtaatgcctcagttttctttctttctttttgtttttgacacagggtctcactctatcacccaagctggagtgcagtggcaccatcttagctcaccgcagcctcaaactccccagctcgggtgattcttcctgcctcagcctcctgagtagtagcagctgggaccacagacgtctgccaccaagcccagctgcaccgccagttccggggagggccctgggccagcggctgtccgccccccctcctttataaagtcctggcctcgggacagcccgcacagctgcccagcctgcggagacgggacagccctgtcccactcactctttcccctgctgctcctgccggcagctcagctggaaccatgggaggccgcgtctttctcgtctttctcgcattctgtgtctggctgactctgccgggagctgaaacccaggactccaggggctgtgcccggtggtgccctcaggactcctcgtgtgtcaatgccaccgcctgtcgctgcaatccagggttcagctctttttctgagatcatcaccacccccatggagacttgtgacgacatcaacgagtgtgcaacactgtcgaaagtgtcatgcggaaaattctcggactgctggaacacagaggggagctacgactgcgtgtgcagcccaggatatgagcctgtttctggggcaaaaacattcaagaatgagagcgagaacacgtgtcaagatgtggacgaatgtcagcagaacccaaggctctgtaaaagctacggcacctgcgtcaacaccctcggcagctacacgtgccagtgcctgcctggcttcaagctcaaacctgaggacccgaagctctgcacagatgtgaatgaatgcacctccggacaaaacccatgccacagctccacccactgcctcaacaacgtgggcagctatcagtgccgctgccgcccgggctggcaaccgattccggggtcccccaatggcccaaacaataccgtctgtgaaggtcgagagctcagatcccacgttcccagagacccacaaacatctgatcacatgttcaacggcgcccacacaaaccaagcagaatgagcgctggaggcgcccgactgtgtcaggcgttcattcttctgaggctagatgagaaaagagcaagggtcctgcggaaggagctggggtactgaggggggaggctcagggggaccccaggcaacagctgatgactcactgggaggaaggcgtttcaccatattcataacctgctcatctgcacggggcccacctgctgtgcccaggcctctccacgcttccataacccagcgtccacctctccaaggggggcactaatgccgggaggaacgagctgggggcacagacaggagacaggaccctctccaggctgggacaggacctgacccccttcttcctgtcctcagatgtggacgagtgcagctccgggcagcatcagtgtgacagctccaccgtctgcttcaacaccgtgggttcatacagctgccgctgccgcccaggctggaagcccagacacggaatcccgaataaccaaaaggacactgtctgtgaagatatgactttctccacctggaccccgccccctggagtccacagccagacgctttcccgattcttcgacaaagtccaggacctgggcagagactacaagccaggcttggccaataacaccatccagagcatcttacaggcgctggatgagctgctggaggcccctggggacctggagaccctgccccgcttacagcagcactgtgtggccagtcacctgctggatggcctagaggatgtcctcagaggcctgagcaagaacctttccaatgggctgttgaacttcagttatcctgcaggcacagaattgtccctggaggtgcagaagcaagtagacaggagtgtcaccttgagacagaatcaggcagtgatgcagctcgactggaatcaggcacagaaatctggtgacccaggtgctgtgctccatcatcgccggtaccttgcactatctctacctggccaccttgacctggatgctgctggaggccctgtacctcttcctcactgcacggaacctgacggtggtcaactactcaagcatcaacagattcatgaagaagctcatgttccctgtgggctacggagtcccagctgtgacagtggccatttctgcagcctccaggcctcacctttatggaacaccttcccgctgctggctccaaccagaaaagggatttatatggggcttccttggacctgtctgcgccatcttctctgatgctggcatttaaagcgacagctcagctgttcatcctgggctgcacgtggtgtctgggcatcttgcaggtgggtccggctgcccgggtcatggcctacctcttcaccatcatcaacagcctgcagggtgtcttcatcttcctggtgtactgcctcctcagccagcaggtccgggagcaatatgggaaatggtccaaagggatcaggaaattgaaaactgagtctgagatgcacacactctccagcagtgctaaggctgacacctccaaacccagcacggttaactagaaaaatcttctgaataagatcttccctctttgcccgtggaaaatctgaacaatctttgagccatctagaggggaaagaaaagactttgttctgtgtgtttcaagaaattcaccatgtcagcaatatgaaggatgttatggaaggcgtgctaggcattcaattcctgcagaaaccggaaatcttccatgccctgcaatgtgctcatcaaactctcagcatatggacggccagctgtggcccatatcttggtcactctgaagcacaatatttatgaagctatagaacgttaagacctctttcacagcctctccttcctacaaagactcctccaaatcttaaaatgaagcaggaaaacgagcctaagaggactttcataccgacaacatctgaaaggactagaatgttcacaccacgatctggatttcttaattttttgtttttgtttttgttgttctctagttctacgggtttgattatttagtcatgtgaaaaatattgattactcacacatagatcaagagagacacggctcctgccttcatggagcttttaggggaaaatgaagtggctcttgcagctagagttgactcagaagccgaaattcctagaaatcaggtttctactgctaggcaattgaagtataaactattttataaacac

SEQ ID NO: 1094 - protein, 239 aa, Homo sapiens
MGGRVFLVFLAFCVWLTLPGAETQDSRGCARWCPQDSSCVNATACRCNPGFSSFSEIITTPMETCDDINECATLSKVSCGKFSDCWNTEGSYDCVCSPGYEPVSGAKTFKNESENTCQDVDECQQNPRLCKSYGTCVNTLGSYTCQCLPGFKLKPEDPKLCTDVNECTSGQNPCHSSTHCLNNVGSYQCRCRPGWQPIPGSPNGPNNTVCEGRELRSHVPRDPQTSDHMFNGAHTNQAE

SEQ ID NO: 1095 - DNA, 2124 bp, Homo sapiens
agatgcaaagccggtggggacctgccaagaagccagcccacaaggccatggactcctccacgccatcagctggagcagtgggcagccccaggaagggagacgggagcggccaggggaagggcgaggggtcccccgggcgacccccgaggctcaggcgcccggactccagtcctgggcctccgttttccacccttgaacaagcggcttccacctgtgagccagctgcctcctctgaaaatggaagcccctcaactcagagggtgtcgctctgggacgtgggtcaggggccggagcaggcagggagaggtgagaggaaaggctggggaccctcacttctccctgcccaaaccctcgctcgggagcagacggctcctctgcccgcaggcacccctgcctggcagctccctccagcccccgtcgggtccgggacgtcctctgatgggaaggttccaccacatccgtggctgacagagccagcccgtccgaggccggggggcgctcggggtaaacaggaagccccatccctcccgcactctgcttcactccctcctcctgcacctcctgcagcccggctcccgcggccgcgcctggtgcccctctgtctcgcgccacctgagatgcccaggctggcctctgccaggggcttagtctgccctctcctggggcttcagaggccaaaagcaccctggtgaggggtccgggaggcccgggagggcccggggggctctgccaggcccctccacgcctctctgcccagccagcacgctctgggaagcagcccccaggaccggggaggcacaggtggcccccaccacccggaggagcagctcctgcccctgtccgggggatgactgattctcctccgccaggccacccagaggagaaggccaccccgcctggaggcacaggccatgaggggctctcaggaggtgctgctgatgtggcttctggtgttggcagtgggcggcacagagcacgcctaccggcccggccgtagggtgtgtgctgtccgggctcacggggaccctgtctccgagtcgttcgtgcagcgtgtgtaccagcccttcctcaccacctgcgacgggcaccgggcctgcagcacctaccgaaccatctataggaccgcctaccgccgcagccctgggctggcccctgccaggcctcgctacgcgtgctgccccggctggaagaggaccagcgggcttcctggggcctgtggagcagcaatatgccagccgccatgccggaacggagggagctgtgtccagcctggccgctgccgctgccctgcaggatggcggggtgacacttgccagtcagatgtggatgaatgcagtgctaggaggggcggctgtccccagcgctgcgtcaacaccgccggcagttactggtgccagtgttgggaggggcacagcctgtctgcagacggtacactctgtgtgcccaagggagggccccccagggtggcccccaacccgacaggagtggacagtgcaatgaaggaagaagtgcagaggctgcagtccagggtggacctgctggaggagaagctgcagctggtgctggccccactgcacagcctggcctcgcaggcactggagcatgggctcccggaccccggcagcctcctggtgcactccttccagcagctcggccgcatcgactccctgagcgagcagatttccttcctggaggagcagctggggtcctgctcctgcaagaaagactcgtgactgcccagcgccccaggctggactgagcccctcacgccgccctgcagcccccatgcccctgcccaacatgctgggggtccagaaaccacctcggggtgactgagcggaaggccaggcagggccttcctcctcttcctcctccccttcctcgggaggctccccagaccctggcatgggatgggctgggatcttctctgtgaatccacccctggctacccccaccctggctaccccaacggcatcccaaggccaggtgggccctcagctgagggaaggtacgagctccctgctggagcctgggacccatggcacaggccaggcagcccggaggctgggtggggcctcagtgggggctgctgcctgacccccagcacaataaaaatgaaacgtg

SEQ ID NO: 1096 - protein, 273 aa, Homo sapiens
MRGSQEVLLMWLLVLAVGGTEHAYRPGRRVCAVRAHGDPVSESFVQRVYQPFLTTCDGHRACSTYRTIYRTAYRRSPGLAPARPRYACCPGWKRTSGLPGACGAAICQPPCRNGGSCVQPGRCRCPAGWRGDTCQSDVDECSARRGGCPQRCVNTAGSYWCQCWEGHSLSADGTLCVPKGGPPRVAPNPTGVDSAMKEEVQRLQSRVDLLEEKLQLVLAPLHSLASQALEHGLPDPGSLLVHSFQQLGRIDSLSEQISFLEEQLGSCSCKKDS

SEQ ID NO: 1097 - DNA, 1541 bp, Homo sapiens
gagcctccctgcaccaagctggccctgcacggctgcaagggaggctcctgtggacaggccaggcaggtgggcctcaggaggtgcctccaggcggccagtgggcctgaggccccagcaagggctagggtccatctccagtcccaggacacagcagcggccaccatggccacgcctgggctccagcagcatcagcagcccccaggaccggggaggcacaggtggcccccaccacccggaggagcagctcctgcccctgtccgggggatgactgattctcctccgccaggccacccagaggagaaggccaccccgcctggaggcacaggccatgaggggctctcaggaggtgctgctgatgtggcttctggtgttggcagtgggcggcacagagcacgcctaccggcccggccgtagggtgtgtgctgtccgggctcacggggaccctgtctccgagtcgttcgtgcagcgtgtgtaccagcccttcctcaccacctgcgacgggcaccgggcctgcagcacctaccgaaccatctataggaccgcctaccgccgcagccctgggctggcccctgccaggcctcgctacgcgtgctgccccggctggaagaggaccagcgggcttcctggggcctgtggagcagcaatatgccagccgccatgccggaacggagggagctgtgtccagcctggccgctgccgctgccctgcaggatggcggggtgacacttgccagtcagatgtggatgaatgcagtgctaggaggggcggctgtccccagcgctgcgtcaacaccgccggcagttactggtgccagtgttgggaggggcacagcctgtctgcagacggtacactctgtgtgcccaagggagggccccccagggtggcccccaacccgacaggagtggacagtgcaatgaaggaagaagtgcagaggctgcagtccagggtggacctgctggaggagaagctgcagctggtgctggccccactgcacagcctggcctcgcaggcactggagcatgggctcccggaccccggcagcctcctggtgcactccttccagcagctcggccgcatcgactccctgagcgagcagatttccttcctggaggagcagctggggtcctgctcctgcaagaaagactcgtgactgcccagcgccccaggctggactgagcccctcacgccgccctgcagcccccatgcccctgcccaacatgctgggggtccagaaaccacctcggggtgactgagcggaaggccaggcagggccttcctcctcttcctcctccccttcctcgggaggctccccagaccctggcatgggatgggctgggatcttctctgtgaatccacccctggctacccccaccctggctaccccaacggcatcccaaggccaggtgggccctcagctgagggaaggtacgagctccctgctggagcctgggacccatggcacaggccaggcagcccggaggctgggtggggcctcagtgggggctgctgcctgacccccagcacaataaaaatgaaacgtg

SEQ ID NO: 1098 - protein, 273 aa, Homo sapiens; identical to SEQ ID NO: 1096

SEQ ID NO: 1099 - DNA, 3494 bp, Homo sapiens
gacgggaccgcgagcacaggccgctccgcgggcgcttcggatcctcgcgggaccccaccctctcccagcctgcccagcccgctgcagccgccagcgcgccccgtcggcagctctccatctgcacgtctctccgtgaaccccgtgagcggtgtgcagccaccatgttcagctggctgaagcggggcggggcacggggccagcagcccgaggccatccgcacggtgacctcggccctcaaggagctgtaccgcacgaagctgctgccgctggaggagcactaccgctttggggccttccactcgccggccctggaggacgcagacttcgacggcaagcccatggtgctggtggccggccagtacagcacgggcaagaccagcttcatccagtacctgctggagcaggaggtgcccggctcccgcgtggggcctgagcccaccaccgactgctttgtggccgtcatgcacggggacactgagggcaccgtgcccggcaacgccctcgtcgtggacccggacaagcccttccgcaaactcaaccctttcggaaacaccttcctcaacaggttcatgtgtgcccagctccctaatcaggtcctggagagcatcagcatcatcgacaccccgggtatcctgtcgggtgccaagcagagagtgagccgcggctacgacttcccggccgtgctgcgctggttcgcggagcgcgtggacctcatcatcctgctctttgatgcgcacaagctggagatctcggacgagttctcagaggccatcggcgcgttgcggggccatgaggacaagatccgcgtggtgctcaacaaggccgacatggtggagacgcagcagctgatgcgcgtctacggcgcgctcatgtgggcgctgggcaaggtggtgggcacgcccgaggtgctgcgcgtctacatcggctccttctggtcccagcccctcctcgtgcccgacaaccggcgcctcttcgagctggaggagcaggacctcttccgcgacatccagggcctgccccggcacgcagccttgcgcaagctcaacgacctggtgaagagggcccggctggtgcgagttcacgcttacatcatcagctacctgaagaaggagatgccctctgtgtttgggaaggagaacaagaagaagcagctgatcctcaaactgcccgtcatctttgcgaagattcagctggaacatcacatctcccctggggactttcctgattgccagaaaatgcaggagctgctgatggcgcacgacttcaccaagtttcactcgctgaagccgaagctgctagaggcactggacgagatgctgacgcacgacatcgccaagctcatgcccctgctgcggcaggaggagctggagagcaccgaggtgggcgtgcaggggggcgcttttgagggcacccacatgggcccgtttgtggagcggggacctgacgaggccatggaggacggcgaggagggctcggacgacgaggccgagtgggtggtgaccaaggacaagtccaaatacgacgagatcttctacaacctggcgcctgccgacggcaagctgagcggctccaaggccaagacctggatggtggggaccaagctccccaactcagtgctggggcgcatctggaagctcagcgatgtggaccgcgacggcatgctggatgatgaggagttcgcgctggccagccacctcatcgaggccaagctggaaggccacgggctgcccgccaacctgccccgtcgcctggtgccaccctccaagcgacgccacaagggctccgccgagtgagccggcccccctcccatggccctgctgtggctccccagctccagtcggctgcacgcacacccctgctccggctcacacacgccctgcctgccctccctgcccagctgtaaggaccgggggtctccctcctcactaccgccagacaccccggtggaagcatttagaggggaccacgggagggacaaggcttctctgtccgcccttcacacctccagcctcacgttcacttaggcacatcacacacacactggcacacgcaggcatccatccatccgtcattcattcaaatatttattgagcacctactatgtgcccagccctgttctaggcactgggcattaccatagagaacaaaatagacaaatacatctgccctcatggaaggtgacgttcccaggagagggcacctacacagtcacgcaaacacacactaattcctggcagggcccccagcccctcccctggctgagcagccctgtggctgaaatgactagcagataaacagacccccttctgctccgcttcctcctgcccagccaggcaacaccctcaaccggctccatcacatcctcaggtctcgggaccatggggggctcagaggggagacacacctactgcttcctcagatgggcccctccgcagccccttcccttgctcggggaaagcccccaattctgcccacacccatttatttccttccttccttccttcttttctttccttccttccttcttttttgtttttgcccccaattctgcccatacccatttctttctttccttccttccttcttttttgtttttgcccccagttctgtccacaccccttccctttcctgtcctgtcctttctttcttttttgatagaatcttgctctgtcgcccaggctggagtgcagtggtgagatctcagctcactgcaacctccacctcctgggttgaagtgattctcgtgcctcagcctcctgagtagctgggactgcaggcacgcgccaccacgcccagctaatttttgtatttgagtagagacggggtttcaccatgttggccaggctggtctcgaactccgcatctcaggtgatctgctcgccttggcctcccaaagtgatgggattacaggcatgagccaccgtgcccggcttcacacccatttctttaaaaaggatcccgtagcaggcagaaaagccccttccatcctgctcctctgatactgtgcccccttggagatatttccgtcctccacccacgtgtctgtggctggaactgcccagcctgctcctggccccctggaagcctccccacagctggtaatctggacttaaggattgctgggccaccgcctctctgcctaccaccattccatatttaagtggagcccctacgtagaaaggccccggggctttattttagtctccttttcagggatgtcgtgggcgggggagggggttcttggtgctacagccctctccccacccctaaagggacgccgacgctgtttgctgccttcaccacatattagtgcttgaccctggcaggggaccccatggaaaagatggggaagagcaaaatacatggagacgacgcaccctccaggatgctcgctgggattcccacgcccaccactgtcccccaccccatggctgggaggggcctctgaacggaacagtgtccccacagagcgaataaagccaaggcttcttccc

SEQ ID NO: 1100 - protein, 543 aa, Homo sapiens
MFSWLKRGGARGQQPEAIRTVTSALKELYRTKLLPLEEHYRFGAFHSPALEDADFDGKPMVLVAGQYSTGKTSFIQYLLEQEVPGSRVGPEPTTDCFVAVMHGDTEGTVPGNALVVDPDKPFRKLNPFGNTFLNRFMCAQLPNQVLESISIIDTPGILSGAKQRVSRGYDFPAVLRWFAERVDLIILLFDAHKLEISDEFSEAIGALRGHEDKIRVVLNKADMVETQQLMRVYGALMWALGKVVGTPEVLRVYIGSFWSQPLLVPDNRRLFELEEQDLFRDIQGLPRHAALRKLNDLVKRARLVRVHAYIISYLKKEMPSVFGKENKKKQLILKLPVIFAKIQLEHHISPGDFPDCQKMQELLMAHDFTKFHSLKPKLLEALDEMLTHDIAKLMPLLRQEELESTEVGVQGGAFEGTHMGPFVERGPDEAMEDGEEGSDDEAEWVVTKDKSKYDEIFYNLAPADGKLSGSKAKTWMVGTKLPNSVLGRIWKLSDVDRDGMLDDEEFALASHLIEAKLEGHGLPANLPRRLVPPSKRRHKGSAE

SEQ ID NO: 1101 - DNA, 2882 bp, Homo sapiens
cggggagagtcgaacccggagcagggtcccatccgagcgtggactggcggcaggatgttcagctggatggggcggcaggcgggcgggcgcgaacgcgctggcggcgcggacgcggtgcagacggtgacgggcgggctgcgctcgctctacctgcgcaaggtgctgccgctggaggaggcgtaccgcttccacgagttccactcgcctgcgctggaggacgccgacttcgagaacaagcccatgatcctgctggtgggccagtacagcaccggcaagaccaccttcatcagatacctactggagcaggatttcccaggcatgaggattggtccggagcccaccacagactccttcatcgccgtgatgtatggagagactgagggcagcaccccagggaatgctttagtcgtggaccccaaaaagccgtttagaaagctcagtcgctttggaaacgctttcctgaatcgattcatgtgctcacagctccccaatcaggtcctgaagagcatcagcgtcatcgacagccccggcatcctttctggggagaagcagcgcatcagccgaggctatgacttctgccaggtcctgcagtggtttgccgagagggtggacaggatcatcctgctctttgacgctcacaagctggacatctcagatgaattctcagaggccatcaaggccttccggggccaggacgacaagatccgtgtcgtgctgaacaaggccgaccaagtggacacgcagcagctgatgcgggtctacggggccctcatgtggtccctaggcaaggtcatcaacacgcccgaggtactgcgcgtctacattggctccttctgggcgcagcccctgcagaacacggacaaccgccggctcttcgaggctgaggcccaggacctctttagagacatccagagcctcccccagaaggcagcggtgcgcaagctcaacgacctcatcaagcgagcgaggctggccaaggtgcatgcctacatcatcagctacctgaagaaggagatgccaagtgtatttggaaaggaaaacaagaagagagagcttatcagcaggctaccggaaatctacattcagctacagcgagaataccagatttctgcaggggacttccctgaggtcaaggctatgcaggaacagcttgagaactatgacttcaccaaattccactcgctgaagcccaagctgatcgaggcagtggacaacatgctgagcaacaagatctcgcccctcatgaacctcatcagccaggaggagacgagcacgcccacgcagctggtgcagggcggcgccttcgatggcaccaccgagggccccttcaaccagggctacggggagggtgccaaggagggcgccgacgaggaggagtgggtcgtggccaaagacaagcccgtctacgacgagctcttctacactctgtcgcccatcaatggcaagatatcaggtgtcaacgccaagaaggagatggtgacctccaagctgcccaacagcgtcctgggcaagatctggaagctggccgactgcgactgcgacggcatgcttgatgaggaggagttcgcgctggccaagcacctcatcaagatcaagctcgacggctacgagctgcccagcagcctgcccccccacctcgtgcccccctcgcacaggaagtccctgcccaaggccgactgaggggtgggctgcagaacggggtgggaactgggggacctgggcctcaggcctgctccaccactgactcaccgaatgaccttgggcaaggcactgccctctctgtgccttggtttccccatctgtagaatggggagggtggacactggaaactagatgacttctttcacctccaaaattcccttagtttctatgaaaatattgggggtaggggggtggattaggagattgaagggttgagaagaaagagaaattgtccaaagagtcctcagaacctgcctggagaaatgcgcatgggggtgggcctggtaagtcccaggaaccacaggaagtgagctaaggctcacccagagcagctgggtctccaggctgcctgggctttttgtcctcatgaacaactctggagcagctgtctgtccctcagagggcacctggaggcagcaaagattatcttatttattttattttgttttctgctatatttagagtggcaaaaaaatagagcagagggtttctgctgtctccagactgtctaccaaagagaaggcgacagatgcctcctgggtttggaagggggatgcactgtggatctgccatccattctgcagtctccagcagagcaggcagtcaggccccagcgtgcctccatcccagtgccccgatgaccatctggtcagccctcccaacctcccttccagggggcttaccagcaaagccatattcggctaggaatttggaattcacaacctttattaacccctggcaaaacttcccgtttgcatgtcaaatcacattgaagcctgaaaattagcttttcttactggtttttccaataagtaatagcaaagcccacttatcatacttaaactacagtaaagaaaagaggtggttctctgcagtgatcgtttagtgtggccctcaaacattaaatatcccgaggtctccttggtgggtggcaggatttaaattcaatcaaatcctgtcctagtgtgtgcagtgtcttcggccctgtggacacaggtgaatgagggaccagccctgccctgggctgttgagaagagatcagtccacccagagttagacattgtttttgtagaaaacaggcatttattatgtctagggttttgtgttttttttttttccttacaggataaaagcctttatacagaaacaaaatggaacctttcatataaaaccttttcttt

SEQ ID NO: 1102 - protein, 541 aa, Homo sapiens
MFSWMGRQAGGRERAGGADAVQTVTGGLRSLYLRKVLPLEEAYRFHEFHSPALEDADFENKPMILLVGQYSTGKTTFIRYLLEQDFPGMRIGPEPTTDSFIAVMYGETEGSTPGNALVVDPKKPFRKLSRFGNAFLNRFMCSQLPNQVLKSISVIDSPGILSGEKQRISRGYDFCQVLQWFAERVDRIILLFDAHKLDISDEFSEAIKAFRGQDDKIRVVLNKADQVDTQQLMRVYGALMWSLGKVINTPEVLRVYIGSFWAQPLQNTDNRRLFEAEAQDLFRDIQSLPQKAAVRKLNDLIKRARLAKVHAYIISYLKKEMPSVFGKENKKRELISRLPEIYIQLQREYQISAGDFPEVKAMQEQLENYDFTKFHSLKPKLIEAVDNMLSNKISPLMNLISQEETSTPTQLVQGGAFDGTTEGPFNQGYGEGAKEGADEEEWVVAKDKPVYDELFYTLSPINGKISGVNAKKEMVTSKLPNSVLGKIWKLADCDCDGMLDEEEFALAKHLIKIKLDGYELPSSLPPHLVPPSHRKSLPKAD

SEQ ID NO: 1103 - DNA, 3603 bp, Homo sapiens
gtcaggccaggcagccaaggagaagacgtgtggccgggggctatcagaaggaaactgggacggacgggccgggctcgggctgtcctgtggagcagcagcatccccggggccggcagaggcgccagtggctgggcgggatgagtctctgagggccactgtggagcgccccgccatggccccccgcaccctctggagctgctacctctgctgcctgctgacggcagctgcaggggccgccagctaccctcctcgaggtttcagcctctacacaggttccagtggggccctcagccccggggggccccaggcccagattgccccccggccagccagccgccacaggaactggtgtgcctacgtggtgacccggacagtgagctgtgtccttgaggatggagtggagacatatgtcaagtaccagccttgtgcctggggccagccccagtgtccccaaagcatcatgtaccgccgcttcctccgccctcgctaccgtgtggcctacaagacagtgaccgacatggagtggaggtgctgtcagggttatgggggcgatgactgtgctgagagtcccgctccagcgctggggcctgcgtcttccacaccacggcccctggcccagcctgcccgccccaacctctctggctccagtgcaggcagccccctcagtggactggggggagaaggtcctggggagtcagagaaggtgcagcagctggaggaacaggtgcagagcctgaccaaggagctgcaaggcctgcggggcgtcctgcaaggactgagcgggcgcctggcagaggatgtgcagagggctgtggagacggccttcaacgggaggcagcagccagctgacgcggctgcccgccctggggtgcatgaaaccctcaatgagatccagcaccagctgcagctcctggacacccgcgtctccacccacgaccaggagctgggtcacctcaacaaccatcatggcggcagcagcagcagtgggggcagcagggccccagccccagcctcagcccctccgggccccagtgaggagctgctgcggcagctggagcagcggttgcaggagtcctgctccgtgtgcctggccgggctagatggcttccgccggcagcagcaggaggacagggagcggctgcgagcgatggagaagctgctggcctcggtggaggagcggcaacggcacctcgcagggctggcggtgggccgcaggccccctcaggaatgctgctctccagagctgggccggcgactggcagagctggagcgcaggctggatgtcgtggccggctcagtgacagtgctgagtgggcggcgaggcacagagctgggaggagccgcggggcagggaggccaccccccaggctacaccagcttggcctcccgcctgtctcgcctggaggaccgcttcaactccaccctgggcccttcggaggagcaggaggagagctggcctggggctcctggggggctgagccactggctgcctgctgcccggggccgactagagcagttgggggggctgctggccaatgtgagcggggagctgggggggcggttggatctgttggaggagcaggtggcaggggccatgcaggcatgcgggcagctctgctctggggcccctggggagcaggactctcaagtcagcgagatcctcagtgccttggagcgcagggtgctggacagtgaggggcagctgcggctggtgggctccggcctgcacacggtggaagcagcgggggaggcccggcaggccacgctggagggattacaagaggttgtgggccggctccaggatcgtgtggatgcccaggatgagacagctgcagagttcacactacggctgaatctcactgcggcccggctaggccaactggaggggctgctgcaggcccatggggatgagggctgtggggcctgtggcggagtccaagaggaactaggccgccttcgggatggtgtggagcgctgctcctgccccctgttgcctcctcggggtcctggggctggtccaggtgttgggggcccaagccgtgggcccctggacggcttcagcgtgtttgggggcagctcaggctcagccctgcaggccctgcaaggagagctctctgaggttattctcagcttcagctccctcaatgactcactgaatgagctccagaccactgtggagggccagggcgctgatctggctgacctgggggcaaccaaggaccgtatcatttctgagattaacaggctgcagcaggaggccacagagcatgctacagagagtgaagagcgcttccgaggcctagaggagggacaagcacaggccggccagtgccccagcttagaggggcgattgggccgtcttgagggtgtctgtgaacggttggacactgtggctgggggactgcagggcctgcgcgagggcctttccagacacgtggctgggctctgggctgggctccgggaaaccaacaccaccagccagatgcaggcagccctgctggagaagctggtcgggggacaggcgggcctgggcaggcggctgggtgcccttaacagctccctgcagctcctggaggaccgtctgcaccagctcagcctgaaggacctcactgggcctgcaggagaggctgggcccccagggcctcctgggctgcagggacccccaggccctgctggacctccaggatcaccaggcaaggacgggcaagagggccccatcgggccaccaggtcctcaaggtgaacagggagtggagggggcaccagcagcccctgtgccccaagtggcattttcagctgctctgagtttgccccggtctgaaccaggcacggtccccttcgacagagtcctgctcaatgatggaggctattatgatccagagacaggcgtgttcacagcgccactggctggacgctacttgctgagcgcggtgctgactgggcaccggcacgagaaagtggaggccgtgctgtcccgctccaaccagggcgtggcccgcgtagactccggtggctacgagcctgagggcctggagaataagccggtggccgagagccagcccagcccgggcaccctgggcgtcttcagcctcatcctgccgctgcaggccggggacacggtctgcgtcgacctggtcatggggcagctggcgcactcggaggagccgctcaccatcttcagcggggccctgctctatggggacccagagcttgaacacgcgtagactggggtcccgcccgacgtgtctacgtcggctgaagagacagcgggggcggcgggctcctggggtctcgcctgagacggggcacctagccctgggcgagcgccgcacccgggcccgcagcggcaccgcgcccagagcggcctctccccacgcccggggcgcgccggctcagggaggctcggggccgcccatgcagacttttggcctggcgcgatcccccaagaacccctccagggccggcctgcggaggagccgatcctcgcaccctccgctccctccactggccctccaggtcgattccctgggctccaggctcccccgcgcgggcgccgcccaccgccatactaaacgatcgaggaataaagacacttggtttttct

SEQ ID NO: 1104 - protein, 1016 aa, Homo sapiens [sequence omitted]

SEQ ID NO: 1105 - DNA, 3828 bp, Homo sapiens
aagacaacgtcactagcagtttctggagctacttgccaaggctgagtgtgagctgagcctgccccaccaccaagatgatcctgagcttgctgttcagccttgggggccccctgggctgggggctgctgggggcatgggcccaggcttccagtactagcctctctgatctgcagagctccaggacacctggggtctggaaggcagaggctgaggacaccggcaaggaccccgtaggacgtaactggtgcccctacccaatgtccaagctggtcaccttactagctctttgcaaaacagagaaattcctcatccactcgcagcagccgtgtccgcagggagctccagactgccagaaagtcaaagtcatgtaccgcatggcccacaagccagtgtaccaggtcaagcagaaggtgctgacctctttggcctggaggtgctgccctggctacacgggccccaactgcgagcaccacgattccatggcaatccctgagcctgcagatcctggtgacagccaccaggaacctcaggatggaccagtcagcttcaaacctggccaccttgctgcagtgatcaatgaggttgaggtgcaacaggaacagcaggaacatctgctgggagatctccagaatgatgtgcaccgggtggcagacagcctgccaggcctgtggaaagccctgcctggtaacctcacagctgcagtgatggaagcaaatcaaacagggcacgagttccctgatagatccttggagcaggtgctgctaccccacgtggacaccttcctacaagtgcatttcagccccatctggaggagctttaaccaaagcctgcacagccttacccaggccataagaaacctgtctcttgacgtggaggccaaccgccaggccatctccagagtccaggacagtgccgtggccagggctgacttccaggagcttggtgccaaatttgaggccaaggtccaggagaacactcagagagtgggtcagctgcgacaggacgtggaggaccgcctgcacgcccagcactttaccctgcaccgctcgatctcagagctccaagccgatgtggacaccaaattgaagaggctgcacaaggctcaggaggccccagggaccaatggcagtctggtgttggcaacgcctggggctggggcaaggcctgagccggacagcctgcaggccaggctgggccagctgcagaggaacctctcagagctgcacatgaccacggcccgcagggaggaggagttgcagtacaccctggaggacatgagggccaccctgacccggcacgtggatgagatcaaggaactgtactccgaatcggacgagactttcgatcagattagcaaggtggagcggcaggtggaggagctgcaggtgaaccacacggcgctccgtgagctgcgcgtgatcctgatggagaagtctctgatcatggaggagaacaaggaggaggtggagcggcagctcctggagctcaacctcacgctgcagcacctgcagggtggccatgccgacctcatcaagtacgtgaaggactgcaattgccagaagctctatttagacctggacgtcatccgggagggccagagggacgccacgcgtgccctggaggagacccaggtgagcctggacgagcggcggcagctggacggctcctccctgcaggccctgcagaacgccgtggacgccgtgtcgctggccgtggacgcgcacaaagcggagggcgagcgggcgcgggcggccacgtcgcggctccggagccaagtgcaggcgctggatgacgaggtgggcgcgctgaaggcggccgcggccgaggcccgccacgaggtgcgccagctgcacagcgccttcgccgccctgctggaggacgcgctgcggcacgaggcggtgctggccgcgctcttcggggaggaggtgctggaggagatgtctgagcagacgccgggaccgctgcccctgagctacgagcagatccgcgtggccctgcaggacgccgctagcgggctgcaggagcaggcgctcggctgggacgagctggccgcccgagtgacggccctggagcaggcctcggagcccccgcggccggcagagcacctggagcccagccacgacgcgggccgcgaggaggccgccaccaccgccctggccgggctggcgcgggagctccagagcctgagcaacgacgtcaagaatgtcgggcggtgctgcgaggccgaggccggggccggggccgcctccctcaacgcctcccttcacggcctccacaacgcactcttcgccactcagcgcagcttggagcagcaccagcggctcttccacagcctctttgggaacttccaagggctcatggaagccaacgtcagcctggacctggggaagctgcagaccatgctgagcaggaaagggaagaagcagcagaaagacctggaagctccccggaagagggacaagaaggaagcggagcctttggtggacatacgggtcacagggcctgtgccaggtgccttgggcgcggcgctctgggaggcaggatcccctgtggccttctatgccagcttttcagaagggacggctgccctgcagacagtgaagttcaacaccacatacatcaacattggcagcagctacttccctgaacatggctacttccgagcccctgagcgtggtgtctacctgtttgcagtgagcgttgaatttggcccagggccaggcaccgggcagctggtgtttggaggtcaccatcggactccagtctgtaccactgggcaggggagtggaagcacagcaacggtctttgccatggctgagctgcagaagggtgagcgagtatggtttgagttaacccagggatcaataacaaagagaagcctgtcgggcactgcatttgggggcttcctgatgtttaagacctgaaccccagccccaatctgatcagacatcatggactcgcccagctctcctcggcctggggctctggccaaggatgggctggaggtcattcagttggtctgtctcttccctggaaaccttctgcaaagatggtgtggtgtacgtggcttccctgtaaccacatggggcttggccatttctccatgatgagaaggactggaatgcttctccgggcaggacatggtcctaggaagcctgaaccttggcttggcatgccttctcagacagcacggcctgggctccaactcttcaccacaccctgtattctacaacttctttggtgttttgctcctcctgtggttggaaacttctgtacaacactttaaacttttctcttgcttcctcttctcttctcccttatcgtatgatagaaagacattcttccccaggaggaatgtttaaaatggaggcaacattttggccaacattggaaagcactagagggcaatgggattaaaccaacctgcttggtctctattagtcagtaatgaagacgacagcctggccaaccaagggaaaggaaattagtatctttagtttcagtcattccttgtaggatatggtttagctgtgcccccacctaaaatatcatcttgaattgtaatccctataatccccacatcaagggagagatcaggtggaggtaattggatcttgggggcggttcccccatgctgttcttgtgatagttctcacgagatctgatgattttataagtttgatagttcctcctgtgttcattctccttcctgccaccttgtgaagatgccttggttcctcttcactgtctgccatgattgtaagtttcctgaggcctccccagccatgtggaacagtgagtcaattaaacctctttcctttataaatt

SEQ ID NO: 1106 - protein, 949 aa, Homo sapiens
MILSLLFSLGGPLGWGLLGAWAQASSTSLSDLQSSRTPGVWKAEAEDTGKDPVGRNWCPYPMSKLVTLLALCKTEKFLIHSQQPCPQGAPDCQKVKVMYRMAHKPVYQVKQKVLTSLAWRCCPGYTGPNCEHHDSMAIPEPADPGDSHQEPQDGPVSFKPGHLAAVINEVEVQQEQQEHLLGDLQNDVHRVADSLPGLWKALPGNLTAAVMEANQTGHEFPDRSLEQVLLPHVDTFLQVHFSPIWRSFNQSLHSLTQAIRNLSLDVEANRQAISRVQDSAVARADFQELGAKFEAKVQENTQRVGQLRQDVEDRLHAQHFTLHRSISELQADVDTKLKRLHKAQEAPGTNGSLVLATPGAGARPEPDSLQARLGQLQRNLSELHMTTARREEELQYTLEDMRATLTRHVDEIKELYSESDETFDQISKVERQVEELQVNHTALRELRVILMEKSLIMEENKEEVERQLLELNLTLQHLQGGHADLIKYVKDCNCQKLYLDLDVIREGQRDATRALEETQVSLDERRQLDGSSLQALQNAVDAVSLAVDAHKAEGERARAATSRLRSQVQALDDEVGALKAAAAEARHEVRQLHSAFAALLEDALRHEAVLAALFGEEVLEEMSEQTPGPLPLSYEQIRVALQDAASGLQEQALGWDELAARVTALEQASEPPRPAEHLEPSHDAGREEAATTALAGLARELQSLSNDVKNVGRCCEAEAGAGAASLNASLHGLHNALFATQRSLEQHQRLFHSLFGNFQGLMEANVSLDLGKLQTMLSRKGKKQQKDLEAPRKRDKKEAEPLVDIRVTGPVPGALGAALWEAGSPVAFYASFSEGTAALQTVKFNTTYINIGSSYFPEHGYFRAPERGVYLFAVSVEFGPGPGTGQLVFGGHHRTPVCTTGQGSGSTATVFAMAELQKGERVWFELTQGSITKRSLSGTAFGGFLMFKT

SEQ ID NO: 1107 - DNA, 4103 bp, Homo sapiens
ctaggctctgaaactgcggagcggccaccggacgccttctggagcaggtagcagcatgcagccgcctccaagtctgtgcggacgcgccctggttgcgctggttcttgcctgcggcctgtcgcggatctggggagaggagagaggcttcccgcctgacagggccactccgcttttgcaaaccgcagagataatgacgccacccactaagaccttatggcccaagggttccaacgccagtctggcgcggtcgttggcacctgcggaggtgcctaaaggagacaggacggcaggatctccgccacgcaccatctcccctcccccgtgccaaggacccatcgagatcaaggagactttcaaatacatcaacacggttgtgtcctgccttgtgttcgtgctggggatcatcgggaactccacacttctgagaattatctacaagaacaagtgcatgcgaaacggtcccaatatcttgatcgccagcttggctctgggagacctgctgcacatcgtcattgacatccctatcaatgtctacaagctgctggcagaggactggccatttggagctgagatgtgtaagctggtgcctttcatacagaaagcctctgtgggaatcactgtgctgagtctatgtgctctgagtattgacagatatcgagctgttgcttcttggagtagaattaaaggaattggggttccaaaatggacagcagtagaaattgttttgatttgggtggtctctgtggttctggctgtccctgaagccataggttttgatataattacgatggactacaaaggaagttatctgcgaatctgcttgcttcatcccgttcagaagacagctttcatgcagttttacaagacagcaaaagattggtggctattcagtttctatttctgcttgccattggccatcactgcatttttttatacactaatgacctgtgaaatgttgagaaagaaaagtggcatgcagattgctttaaatgatcacctaaagcagagacgggaagtggccaaaaccgtcttttgcctggtccttgtctttgccctctgctggcttccccttcacctcagcaggattctgaagctcactctttataatcagaatgatcccaatagatgtgaacttttgagctttctgttggtattggactatattggtatcaacatggcttcactgaattcctgcattaacccaattgctctgtatttggtgagcaaaagattcaaaaactgctttaagtcatgcttatgctgctggtgccagtcatttgaagaaaaacagtccttggaggaaaagcagtcgtgcttaaagttcaaagctaatgatcacggatatgacaacttccgttccagtaataaatacagctcatcttgaaagaagaactattcactgtatttcattttctttatattggaccgaagtcattaaaacaaaatgaaacatttgccaaaacaaaacaaaaaactatgtatttgcacagcacactattaaaatattaagtgtaattattttaacactcacagctacatatgacattttatgagctgtttacggcatggaaagaaaatcagtgggaattaagaaagcctcgtcgtgaaagcacttaattttttacagttagcacttcaacatagctcttaacaacttccaggatattcacacaacacttaggcttaaaaatgagctcactcagaatttctattctttctaaaaagagatttatttttaaatcaatgggactctgatataaaggaagaataagtcactgtaaaacagaacttttaaatgaagcttaaattactcaatttaaaattttaaaatcctttaaaacaacttttcaattaatattatcacactattatcagattgtaattagatgcaaatgagagagcagtttagttgttgcatttttcggacactggaaacatttaaatgatcaggagggagtaacagaaagagcaaggctgtttttgaaaatcattacactttcactagaagcccaaacctcagcattctgcaatatgtaaccaacatgtcacaaacaagcagcatgtaacagactggcacatgtgccagctgaatttaaaatataatacttttaaaaagaaaattattacatcctttacattcagttaagatcaaacctcacaaagagaaatagaatgtttgaaaggctatcccaaaagacttttttgaatctgtcattcacataccctgtgaagacaatactatctacaattttttcaggattattaaaatcttcttctttcactatcgtagcttaaactctgtttggttttgtcatctgtaaatacttacctacatacactgcatgtagatgattaaatgagggcaggccctgtgctcatagctttacgatggagagatgccagtgacctcataataaagactgtgaactgcctggtgcagtgtccacatgacaaaggggcaggtagcaccctctctcacccatgctgtggttaaaatggtttctagcatatgtataatgctatagttaaaatactatttttcaaaatcatacagattagtacatttaacagctacctgtaaagcttattactaatttttgtattatttttgtaaatagccaatagaaaagtttgcttgacatggtgcttttctttcatctagaggcaaaactgctttttgagaccgtaagaacctcttagctttgtgcgttcctgcctaatttttatatcttctaagcaaagtgccttaggatagcttgggatgagatgtgtgtgaaagtatgtacaagagaaaacggaagagagaggaaatgaggtggggttggaggaaacccatggggacagattcccattcttagcctaacgttcgtcattgcctcgtcacatcaatgcaaaaggtcctgattttgttccagcaaaacacagtgcaatgttctcagagtgactttcgaaataaattgggcccaagagctttaactcggtcttaaaatatgcccaaatttttactttgtttttcttttaataggctgggccacatgttggaaataagctagtaatgttgttttctgtcaatattgaatgtgatggtacagtaaaccaaaacccaacaatgtggccagaaagaaagagcaataataattaattcacacaccatatggattctatttataaatcacccacaaacttgttctttaatttcatcccaatcactttttcagaggcctgttatcatagaagtcattttagactctcaattttaaattaattttgaatcactaatattttcacagtttattaatatatttaatttctatttaaattttagattatttttattaccatgtactgaatttttacatcctgataccttttccttctccatgtcagtatcatgttctctaattatcttgccaaattttgaaactacacacaaaaagcatacttgcattatttataataaaattgcattcagtggctttttaaaaaaatgtttgattcaaaactttaacatactgataagtaagaaacaattataatttctttacatactcaaaaccaagatagaaaaaggtgctatcgttcaacttcaaaacatgtttcctagtattaaggactttaatatagcaacagacaaaattattgttaacatggatgttacagctcaaaagatttataaaagattttaacctattttctcccttattatccactgctaatgtggatgtatgttcaaacaccttttagtattgatagcttacatatggccaaaggaatacagtttatagcaaaacatgggtatgctgtagctaactttataaaagtgtaatataacaatgtaaaaaattatatatctgggaggattttttggttgcctaaagtggctatagttactgattttttattatgtaagcaaaaccaataaaaatttaagtttttttaacaactaccttatttttcactgtacagacactaattcattaaatactaattgattgtttaaaagaaatataaatgtgacaagtggacattatttatgttaaatatacaattatcaagcaagtatgaagttattcaattaaaatgccacatttctggtctctggg

SEQ ID NO: 1108 - protein, 442 aa, Homo sapiens
MQPPPSLCGRALVALVLACGLSRIWGEERGFPPDRATPLLQTAEIMTPPTKTLWPKGSNASLARSLAPAEVPKGDRTAGSPPRTISPPPCQGPIEIKETFKYINTVVSCLVFVLGIIGNSTLLRIIYKNKCMRNGPNILIASLALGDLLHIVIDIPINVYKLLAEDWPFGAEMCKLVPFIQKASVGITVLSLCALSIDRYRAVASWSRIKGIGVPKWTAVEIVLIWVVSVVLAVPEAIGFDIITMDYKGSYLRICLLHPVQKTAFMQFYKTAKDWWLFSFYFCLPLAITAFFYTLMTCEMLRKKSGMQIALNDHLKQRREVAKTVFCLVLVFALCWLPLHLSRILKLTLYNQNDPNRCELLSFLLVLDYIGINMASLNSCINPIALYLVSKRFKNCFKSCLCCWCQSFEEKQSLEEKQSCLKFKANDHGYDNFRSSNKYSSS

SEQ ID NO: 1109 - DNA, 1743 bp, Homo sapiens
aaacagccttttgggacctgtccccggacgaggactgcccccctccctcgggcaactactactgatgctgtccaggcatcgcccaaggggaaaggttgcagcggggtcggaaggcgcgggaggagtctggcggtgattgatgggaagggatgaatgaataaaagtacttgtctgatggcagcagagaccccgagcaaacggtggaggctacactgtctggcattctcgcagcgtttcgtcagagccggacccgcctgcagctcaagggaggcgtgctcctctcccagagcaggctggaacccagctgggttccgcctcccgggaaggtggtctccattcgtcgctctgcatctggtttgtcagatccgagaggctctgaaactgcggccaccggactctggagcaggtagcagcatgcagccgcctccaagtctgtgcggacgcgccctggttgcgctggttcttgcctgcggcctgtcgcggatctggggagaggagagaggcttcccgcctgacagggccactccgcttttgcaaaccgcagagataatgacgccacccactaagaccttatggcccaagggttccaacgccagtctggcgcggtcgttggcacctgcggaggtgcctaaaggagacaggacggcaggatctccgccacgcaccatctcccctcccccgtgccaaggacccatcgagatcaaggagactttcaaatacatcaacacggttgtgtcctgccttgtgttcgtgctggggatcatcgggaactccacacttctgagaattatctacaagaacaagtgcatgcgaaacggtcccaatatcttgatcgccagcttggctctgggagacctgctgcacatcgtcattgacatccctatcaatgtctacaagctgctggcagaggactggccatttggagctgagatgtgtaagctggtgcctttcatacagaaagcctctgtgggaatcactgtgctgagtctatgtgctctgagtattgacagatatcgagctgttgcttcttggagtagaattaaaggaattggggttccaaaatggacagcagtagaaattgttttgatttgggtggtctctgtggttctggctgtccctgaagccataggttttgatataattacgatggactacaaaggaagttatctgcgaatctgcttgcttcatcccgttcagaagacagctttcatgcagttttacaagacagcaaaagattggtggctattcagtttctatttctgcttgccattggccatcactgcatttttttatacactaatgacctgtgaaatgttgagaaagaaaagtggcatgcagattgctttaaatgatcacctaaagcagagacgggaagtggccaaaaccgtcttttgcctggtccttgtctttgccctctgctggcttccccttcacctcagcaggattctgaagctcactctttataatcagaatgatcccaatagatgtgaacttttgagctttctgttggtattggactatattggtatcaacatggcttcactgaattcctgcattaacccaattgctctgtatttggtgagcaaaagattcaaaaactgctttaagtcatgcttatgctgctggtgccagtcatttgaagaaaaacagtccttggaggaaaagcagtcgtgcttaaagttcaaagctaatgatcacggatatgacaacttccgttccagtaataaatacagctcatcttga

SEQ ID NO: 1110 - protein, 529 aa, Homo sapiens
MNKSTCLMAAETPSKRWRLHCLAFSQRFVRAGPACSSREACSSPRAGWNPAGFRLPGRWSPFVALHLVCQIREALKLRPPDSGAGSSMQPPPSLCGRALVALVLACGLSRIWGEERGFPPDRATPLLQTAEIMTPPTKTLWPKGSNASLARSLAPAEVPKGDRTAGSPPRTISPPPCQGPIEIKETFKYINTVVSCLVFVLGIIGNSTLLRIIYKNKCMRNGPNILIASLALGDLLHIVIDIPINVYKLLAEDWPFGAEMCKLVPFIQKASVGITVLSLCALSIDRYRAVASWSRIKGIGVPKWTAVEIVLIWVVSVVLAVPEAIGFDIITMDYKGSYLRICLLHPVQKTAFMQFYKTAKDWWLFSFYFCLPLAITAFFYTLMTCEMLRKKSGMQIALNDHLKQRREVAKTVFCLVLVFALCWLPLHLSRILKLTLYNQNDPNRCELLSFLLVLDYIGINMASLNSCINPIALYLVSKRFKNCFKSCLCCWCQSFEEKQSLEEKQSCLKFKANDHGYDNFRSSNKYSSS

SEQ ID NO: 1111 - DNA, 3945 bp, Homo sapiens
attaaggactcggggcaggaggggcagaagttgcgcgcaggccggcgggcgggagcggacaccgaggccggcgtgcaggcgtgcgggtgtgcgggagccgggctcggggggatcggaccgagagcgagaagcgcggcatggagctccaggcagcccgcgcctgcttcgccctgctgtggggctgtgcgctggccgcggccgcggcggcgcagggcaaggaagtggtactgctggactttgctgcagctggaggggagctcggctggctcacacacccgtatggcaaagggtgggacctgatgcagaacatcatgaatgacatgccgatctacatgtactccgtgtgcaacgtgatgtctggcgaccaggacaactggctccgcaccaactgggtgtaccgaggagaggctgagcgtatcttcattgagctcaagtttactgtacgtgactgcaacagcttccctggtggcgccagctcctgcaaggagactttcaacctctactatgccgagtcggacctggactacggcaccaacttccagaagcgcctgttcaccaagattgacaccattgcgcccgatgagatcaccgtcagcagcgacttcgaggcacgccacgtgaagctgaacgtggaggagcgctccgtggggccgctcacccgcaaaggcttctacctggccttccaggatatcggtgcctgtgtggcgctgctctccgtccgtgtctactacaagaagtgccccgagctgctgcagggcctggcccacttccctgagaccatcgccggctctgatgcaccttccctggccactgtggccggcacctgtgtggaccatgccgtggtgccaccggggggtgaagagccccgtatgcactgtgcagtggatggcgagtggctggtgcccattgggcagtgcctgtgccaggcaggctacgagaaggtggaggatgcctgccaggcctgctcgcctggattttttaagtttgaggcatctgagagcccctgcttggagtgccctgagcacacgctgccatcccctgagggtgccacctcctgcgagtgtgaggaaggcttcttccgggcacctcaggacccagcgtcgatgccttgcacacgacccccctccgccccacactacctcacagccgtgggcatgggtgccaaggtggagctgcgctggacgccccctcaggacagcgggggccgcgaggacattgtctacagcgtcacctgcgaacagtgctggcccgagtctggggaatgcgggccgtgtgaggccagtgtgcgctactcggagcctcctcacggactgacccgcaccagtgtgacagtgagcgacctggagccccacatgaactacaccttcaccgtggaggcccgcaatggcgtctcaggcctggtaaccagccgcagcttccgtactgccagtgtcagcatcaaccagacagagccccccaaggtgaggctggagggccgcagcaccacctcgcttagcgtctcctggagcatccccccgccgcagcagagccgagtgtggaagtacgaggtcacttaccgcaagaagggagactccaacagctacaatgtgcgccgcaccgagggtttctccgtgaccctggacgacctggccccagacaccacctacctggtccaggtgcaggcactgacgcaggagggccagggggccggcagcaaggtgcacgaattccagacgctgtccccggagggatctggcaacttggcggtgattggcggcgtggctgtcggtgtggtcctgcttctggtgctggcaggagttggcttctttatccaccgcaggaggaagaaccagcgtgcccgccagtccccggaggacgtttacttctccaagtcagaacaactgaagcccctgaagacatacgtggacccccacacatatgaggaccccaaccaggctgtgttgaagttcactaccgagatccatccatcctgtgtcactcggcagaaggtgatcggagcaggagagtttggggaggtgtacaagggcatgctgaagacatcctcggggaagaaggaggtgccggtggccatcaagacgctgaaagccggctacacagagaagcagcgagtggacttcctcggcgaggccggcatcatgggccagttcagccaccacaacatcatccgcctagagggcgtcatctccaaatacaagcccatgatgatcatcactgagtacatggagaatggggccctggacaagttccttcgggagaaggatggcgagttcagcgtgctgcagctggtgggcatgctgcggggcatcgcagctggcatgaagtacctggccaacatgaactatgtgcaccgtgacctggctgcccgcaacatcctcgtcaacagcaacctggtctgcaaggtgtctgactttggcctgtcccgcgtgctggaggacgaccccgaggccacctacaccaccagtggcggcaagatccccatccgctggaccgccccggaggccatttcctaccggaagttcacctctgccagcgacgtgtggagctttggcattgtcatgtgggaggtgatgacctatggcgagcggccctactgggagttgtccaaccacgaggtgatgaaagccatcaatgatggcttccggctccccacacccatggactgcccctccgccatctaccagctcatgatgcagtgctggcagcaggagcgtgcccgccgccccaagttcgctgacatcgtcagcatcctggacaagctcattcgtgcccctgactccctcaagaccctggctgactttgacccccgcgtgtctatccggctccccagcacgagcggctcggagggggtgcccttccgcacggtgtccgagtggctggagtccatcaagatgcagcagtatacggagcacttcatggcggccggctacactgccatcgagaaggtggtgcagatgaccaacgacgacatcaagaggattggggtgcggctgcccggccaccagaagcgcatcgcctacagcctgctgggactcaaggaccaggtgaacactgtggggatccccatctgagcctcgacagggcctggagccccatcggccaagaatacttgaagaaacagagtggcctccctgctgtgccatgctgggccactggggactttatttatttctagttctttcctccccctgcaacttccgctgaggggtctcggatgacaccctggcctgaactgaggagatgaccagggatgctgggctgggccctctttccctgcgagacgcacacagctgagcacttagcaggcaccgccacgtcccagcatccctggagcaggagccccgccacagccttcggacagacatatgggatattcccaagccgaccttccctccgccttctcccacatgaggccatctcaggagatggagggcttggcccagcgccaagtaaacagggtacctcaagccccatttcctcacactaagagggcagactgtgaacttgactgggtgagacccaaagcggtccctgtccctctagtgccttctttagaccctcgggccccatcctcatccctgactggccaaacccttgctttcctgggcctttgcaagatgcttggttgtgttgaggtttttaaatatatattttgtactttgtggagagaatgtgtgtgtgtggcagggggccccgccagggctggggacagagggtgtcaaacattcgtgagctggggactcagggaccggtgctgcaggagtgtcctgcccatgccccagtcggccccatctctcatccttttggataagtttctattctgtcagtgttaaagattttgttttgttggacatttttttcgaatcttaatttattattttttttatatttattgttagaaaatgacttatttctgctctggaataaagttgcagatgattcaaaccg

SEQ ID NO: 1112 - protein, 976 aa, Homo sapiens
MELQAARACFALLWGCALAAAAAAQGKEVVLLDFAAAGGELGWLTHPYGKGWDLMQNIMNDMPIYMYSVCNVMSGDQDNWLRTNWVYRGEAERIFIELKFTVRDCNSFPGGASSCKETFNLYYAESDLDYGTNFQKRLFTKIDTIAPDEITVSSDFEARHVKLNVEERSVGPLTRKGFYLAFQDIGACVALLSVRVYYKKCPELLQGLAHFPETIAGSDAPSLATVAGTCVDHAVVPPGGEEPRMHCAVDGEWLVPIGQCLCQAGYEKVEDACQACSPGFFKFEASESPCLECPEHTLPSPEGATSCECEEGFFRAPQDPASMPCTRPPSAPHYLTAVGMGAKVELRWTPPQDSGGREDIVYSVTCEQCWPESGECGPCEASVRYSEPPHGLTRTSVTVSDLEPHMNYTFTVEARNGVSGLVTSRSFRTASVSINQTEPPKVRLEGRSTTSLSVSWSIPPPQQSRVWKYEVTYRKKGDSNSYNVRRTEGFSVTLDDLAPDTTYLVQVQALTQEGQGAGSKVHEFQTLSPEGSGNLAVIGGVAVGVVLLLVLAGVGFFIHRRRKNQRARQSPEDVYFSKSEQLKPLKTYVDPHTYEDPNQAVLKFTTEIHPSCVTRQKVIGAGEFGEVYKGMLKTSSGKKEVPVAIKTLKAGYTEKQRVDFLGEAGIMGQFSHHNIIRLEGVISKYKPMMIITEYMENGALDKFLREKDGEFSVLQLVGMLRGIAAGMKYLANMNYVHRDLAARNILVNSNLVCKVSDFGLSRVLEDDPEATYTTSGGKIPIRWTAPEAISYRKFTSASDVWSFGIVMWEVMTYGERPYWELSNHEVMKAINDGFRLPTPMDCPSAIYQLMMQCWQQERARRPKFADIVSILDKLIRAPDSLKTLADFDPRVSIRLPSTSGSEGVPFRTVSEWLESIKMQQYTEHFMAAGYTAIEKVVQMTNDDIKRIGVRLPGHQKRIAYSLLGLKDQVNTVGIPI

SEQ ID NO: 1113 - DNA, 3945 bp, Homo sapiens
attaaggactcggggcaggaggggcagaagttgcgcgcaggccggcgggcgggagcggacaccgaggccggcgtgcaggcgtgcgggtgtgcgggagccgggctcggggggatcggaccgagagcgagaagcgcggcatggagctccaggcagcccgcgcctgcttcgccctgctgtggggctgtgcgctggccgcggccgcggcggcgcagggcaaggaagtggtactgctggactttgctgcagctggaggggagctcggctggctcacacacccgtatggcaaagggtgggacctgatgcagaacatcatgaatgacatgccgatctacatgtactccgtgtgcaacgtgatgtctggcgaccaggacaactggctccgcaccaactgggtgtaccgaggagaggctgagcgtatcttcattgagctcaagtttactgtacgtgactgcaacagcttccctggtggcgccagctcctgcaaggagactttcaacctctactatgccgagtcggacctggactacggcaccaacttccagaagcgcctgttcaccaagattgacaccattgcgcccgatgagatcaccgtcagcagcgacttcgaggcacgccacgtgaagctgaacgtggaggagcgctccgtggggccgctcacccgcaaaggcttctacctggccttccaggatatcggtgcctgtgtggcgctgctctccgtccgtgtctactacaagaagtgccccgagctgctgcagggcctggcccacttccctgagaccatcgccggctctgatgcaccttccctggccactgtggccggcacctgtgtggaccatgccgtggtgccaccggggggtgaagagccccgtatgcactgtgcagtggatggcgagtggctggtgcccattgggcagtgcctgtgccaggcaggctacgagaaggtggaggatgcctgccaggcctgctcgcctggattttttaagtttgaggcatctgagagcccctgcttggagtgccctgagcacacgctgccatcccctgagggtgccacctcctgcgagtgtgaggaaggcttcttccgggcacctcaggacccagcgtcgatgccttgcacacgacccccctccgccccacactacctcacagccgtgggcatgggtgccaaggtggagctgcgctggacgccccctcaggacagcgggggccgcgaggacattgtctacagcgtcacctgcgaacagtgctggcccgagtctggggaatgcgggccgtgtgaggccagtgtgcgctactcggagcctcctcacggactgacccgcaccagtgtgacagtgagcgacctggagccccacatgaactacaccttcaccgtggaggcccgcaatggcgtctcaggcctggtaaccagccgcagcttccgtactgccagtgtcagcatcaaccagacagagccccccaaggtgaggctggagggccgcagcaccacctcgcttagcgtctcctggagcatccccccgccgcagcagagccgagtgtggaagtacgaggtcacttaccgcaagaagggagactccaacagctacaatgtgcgccgcaccgagggtttctccgtgaccctggacgacctggccccagacaccacctacctggtccaggtgcaggcactgacgcaggagggccagggggccggcagcaaggtgcacgaattccagacgctgtccccggagggatctggcaacttggcggtgattggcggcgtggctgtcggtgtggtcctgcttctggtgctggcaggagttggcttctttatccaccgcaggaggaagaaccagcgtgcccgccagtccccggaggacgtttacttctccaagtcagaacaactgaagcccctgaagacatacgtggacccccacacatatgaggaccccaaccaggctgtgttgaagttcactaccgagatccatccatcctgtgtcactcggcagaaggtgatcggagcaggtgagtttggggaggtgtacaagggcatgctgaagacatcctcggggaagaaggaggtgccggtggccatcaagacgctgaaagccggctacacagagaagcagcgagtggacttcctcggcgaggccggcatcatgggccagttcagccaccacaacatcatccgcctagagggcgtcatctccaaatacaagcccatgatgatcatcactgagtacatggagaatggggccctggacaagttccttcgggagaaggatggcgagttcagcgtgctgcagctggtgggcatgctgcggggcatcgcagctggcatgaagtacctggccaacatgaactatgtgcaccgtgacctggctgcccgcaacatcctcgtcaacagcaacctggtctgcaaggtgtctgactttggcctgtcccgcgtgctggaggacgaccccgaggccacctacaccaccagtggcggcaagatccccatccgctggaccgccccggaggccatttcctaccggaagttcacctctgccagcgacgtgtggagctttggcattgtcatgtgggaggtgatgacctatggcgagcggccctactgggagttgtccaaccacgaggtgatgaaagccatcaatgatggcttccggctccccacacccatggactgcccctccgccatctaccagctcatgatgcagtgctggcagcaggagcgtgcccgccgccccaagttcgctgacatcgtcagcatcctggacaagctcattcgtgcccctgactccctcaagaccctggctgactttgacccccgcgtgtctatccggctccccagcacgagcggctcggagggggtgcccttccgcacggtgtccgagtggctggagtccatcaagatgcagcagtatacggagcacttcatggcggccggctacactgccatcgagaaggtggtgcagatgaccaacgacgacatcaagaggattggggtgcggctgcccggccaccagaagcgcatcgcctacagcctgctgggactcaaggaccaggtgaacactgtggggatccccatctgagcctcgacagggcctggagccccatcggccaagaatacttgaagaaacagagtggcctccctgctgtgccatgctgggccactggggactttatttatttctagttctttcctccccctgcaacttccgctgaggggtctcggatgacaccctggcctgaactgaggagatgaccagggatgctgggctgggccctctttccctgcgagacgcacacagctgagcacttagcaggcaccgccacgtcccagcatccctggagcaggagccccgccacagccttcggacagacatatgggatattcccaagccgaccttccctccgccttctcccacatgaggccatctcaggagatggagggcttggcccagcgccaagtaaacagggtacctcaagccccatttcctcacactaagagggcagactgtgaacttgactgggtgagacccaaagcggtccctgtccctctagtgccttctttagaccctcgggccccatcctcatccctgactggccaaacccttgctttcctgggcctttgcaagatgcttggttgtgttgaggtttttaaatatatattttgtactttgtggagagaatgtgtgtgtgtggcagggggccccgccagggctggggacagagggtgtcaaacattcgtgagctggggactcagggaccggtgctgcaggagtgtcctgcccatgccccagtcggccccatctctcatccttttggataagtttctattctgtcagtgttaaagattttgttttgttggacatttttttcgaatcttaatttattattttttttatatttattgttagaaaatgacttatttctgctctggaataaagttgcagatgattcaaaccg

SEQ ID NO: 1114 - protein, 976 aa, Homo sapiens; identical to SEQ ID NO: 1112

SEQ ID NO: 1115 - DNA, 3335 bp, Homo sapiens
gagtagacagcacagcggcagcggagggagtctatgcgagctggacagcagtgggaggtttgtgaggctcgcactggccgcagaccctcgggctcgatcgcccgggagccaggactcggcgacgcgaggctgccgggctacccggccgaggcttcgggggcgcaaactaatgggactggctcgctcggcagcatctccccgctcttctaagtacactgagcagggcccgcgctgaagtagaagctgtccgggggcgcgtagcccggagtcccagtgtggcccggaggaacggagcccgtgccagggcggcccagtcgggagcccggggaccgagcttgtgctgtggggaaacccccacttcttccaagggacagcgatcccgggacggtcgaggcgtcggggcggtcaccgagacctctgcgggaagaccccgtcggggagagggcgcgcagccccgaagcgtctcgggaagtcgagcggaatcgggcgggatcacccgggggcgcagagcccccgtcgcgcctcgtgcggcagcggagagcccaggagaacgagccctcgggggccgaagcccatgcccgggttgggggcggctgcccagtgagtcctcctggccggccgggcggagaagagcgacaccgaagccggcgggaggggagcacttcaaggccggcggctgcggaggatgggcgcctgagcggctccgagcgcagcgcggcagaggaaggcgaggcgagctttggtgaggaggcgccaagggatcccgaagtgcagtctgcccccgggaagatggctcggcctgggcagcgttggctcggcaagtggcttgtggcgatggtcgtgtgggcgctgtgccggctcgccacaccgctggccaagaacctggagcccgtatcctggagctccctcaaccccaagttcctgagtgggaagggcttggtgatctatccgaaaattggagacaagctggacatcatctgcccccgagcagaagcagggcggccctatgagtactacaagctgtacctggtgcggcctgagcaggcagctgcctgtagcacagttctcgaccccaacgtgttggtcacctgcaataggccagagcaggaaatacgctttaccatcaagttccaggagttcagccccaactacatgggcctggagttcaagaagcaccatgattactacattacctcaacatccaatggaagcctggaggggctggaaaaccgggagggcggtgtgtgccgcacacgcaccatgaagatcatcatgaaggttgggcaagatcccaatgctgtgacgcctgagcagctgactaccagcaggcccagcaaggaggcagacaacactgtcaagatggccacacaggcccctggtagtcggggctccctgggtgactctgatggcaagcatgagactgtgaaccaggaagagaagagtggcccaggtgcaagtgggggcagcagcggggaccctgatggcttcttcaactccaaggtggcattgttcgcggctgtcggtgccggttgcgtcatcttcctgctcatcatcatcttcctgacggtcctactactgaagctacgcaagcggcaccgcaagcacacacagcagcgggcggctgccctctcgctcagtaccctggccagtcccaaggggggcagtggcacagcgggcaccgagcccagcgacatcatcattcccttacggactacagagaacaactactgcccccactatgagaaggtgagtggggactacgggcaccctgtctacatcgtccaagagatgccgccccagagcccggcgaacatctactacaaggtctgagtgcccggcacggcctcaggcccccgagggacagtcggcctggaccggacctctcctttcgcccccacaccccctccccttgccagctgtgcccacctttgtatttagttttgtagtttcttggcttttataatccccctttttccctgccccctgggcttcggaggggggtgcttgtgcccctaacccccatgctcttgtgccttccccctctggccaggcctctgggctccgtgggggcgccccttcttggaaggcagggctggacactgatggacagcaggcagggagacagtcccctggccctgcccctccctcgccccccttgccaccttcccaggactgcttgtccgctatcatcactgtttttaatgcttttgtgttcattttttagctgtcaactcattttcatctgttttttgaagaaaaatggaaaaatgtaaaaggcagcccctccccaggctttgtgagcctggcccaagccagtacaagagggcctggggcacgatgtggtcagccaggaagcataggatgccatttcttttatagattccttggtatttctggtggggtaaggggcaggccagggctgttcacgcccatgagggaagaggaaagtgccactgggcaaggtgtcccaccctcccctcctgaccctcctacgaggcttatcctggcaatggggtagtcactgccacccttccacacacacacacacacacacacacacaaaaaaaaatcccttccttgtgggattcttgggcatctcctgcctccctcactctcacggtaattaatgtcttaattggctgttgcctggggaacaggagagctgctgcaggcagatgacctcatggggggtggagggaggtgaggtgcccaggtggctatttgccctgcagagctgggagtttcacccccaccccccaccctgttctctccttacctttggcatcctttggcctggtggggaaacagaggcccagggtggagacctaagcgggtataagaccaggtggcctgctccttttctgggccctagcacaggtgggtaacccccacccaacccagctcctgctgctgtcccagtcttgggctggggcctggaaagaggaagaggctgcctggggctgggccagcccgctgtgcactttgaccccagttccttgccagcacggctgctaacagactgccacttgagtgcgccttgcaggcactcccagagcagccatggaaggagctggccctcacaccatccacctccacactgcctcctggccagctgcccaccccagtgccaggtgggagagggagcagaacagccagccccttccaggtggcagtcggaagggtttttgtttttgtttctgttgccatttgtgtaaatactagtctttttggaaaaaaaataatgtaaagatgttttgtataaactctgaattattttcttgttgcttttttcttagaaaaaaatgagaactaaaaaaaaaaaattaaccacatgg

SEQ ID NO: 1116 - protein, 346 aa, Homo sapiens
MARPGQRWLGKWLVAMVVWALCRLATPLAKNLEPVSWSSLNPKFLSGKGLVIYPKIGDKLDIICPRAEAGRPYEYYKLYLVRPEQAAACSTVLDPNVLVTCNRPEQEIRFTIKFQEFSPNYMGLEFKKHHDYYITSTSNGSLEGLENREGGVCRTRTMKIIMKVGQDPNAVTPEQLTTSRPSKEADNTVKMATQAPGSRGSLGDSDGKHETVNQEEKSGPGASGGSSGDPDGFFNSKVALFAAVGAGCVIFLLIIIFLTVLLLKLRKRHRKHTQQRAAALSLSTLASPKGGSGTAGTEPSDIIIPLRTTENNYCPHYEKVSGDYGHPVYIVQEMPPQSPANIYYKV

SEQ ID NO: 1117 - DNA, 816 bp, Homo sapiens
gaaggaggcccagacagtgagggcaggagggagagaagagacgcagaaggagagcgagcgagagagaaagggttctggattggaggggagagcaagggagggaggaaggcggtgagagaggcgggggcctcgggagggtgaaaggagggaggagaagggcggggcacggaggcccgagcgagggacaagactccgactccagctctgacttttttcgcggctctcggcttccactgcagccatgtcactcctcttgctggtggtctcagcccttcacatcctcattcttatactgcttttcgtggccactttggacaagtcctggtggactctccctgggaaagagtccctgaatctctggtacgactgcacgtggaacaacgacaccaaaacatgggcctgcagtaatgtcagcgagaatggctggctgaaggcggtgcaggtcctcatggtgctctccctcattctctgctgtctctccttcatcctgttcatgttccagctctacaccatgcgacgaggaggtctcttctatgccaccggcctctgccagctttgcaccagcgtggcggtgtttactggcgccttgatctatgccattcacgccgaggagatcctggagaagcacccgcgagggggcagcttcggatactgcttcgccctggcctgggtggccttccccctcgccctggtcagcggcatcatctacatccacctacggaagcgggagtgagcgccccgcctcgctcggctgcccccgccccttcccggcccccctcgccgcgcgtcctccaaaaaataaaaccttaaccgcgg

SEQ ID NO: 1118 - protein, 163 aa, Homo sapiens
MSLLLLVVSALHILILILLFVATLDKSWWTLPGKESLNLWYDCTWNNDTKTWACSNVSENGWLKAVQVLMVLSLILCCLSFILFMFQLYTMRRGGLFYATGLCQLCTSVAVFTGALIYAIHAEEILEKHPRGGSFGYCFALAWVAFPLALVSGIIYIHLRKRE

SEQ ID NO: 1119 - DNA, 3212 bp, Homo sapiens
atggccacaccggcggtaccagtaagtgctcctccggccacgccaaccccagtcccggcggcggccccagcctcagttccagcgccaacgccagcaccggctgcggctccggttcccgctgcggctccagcctcatcctcagaccctgcggcagcagcggctgcaactgcggctcctggccagaccccggcctcagcgcaagctccagcgcagaccccagcgcccgctctgcctggtcctgctcttccagggcccttccccggcggccgcgtggtcaggctgcacccagtcattttggcctccattgtggacagctacgagagacgcaacgagggtgctgcccgagttatcgggaccctgttgggaactgtcgacaaacactcagtggaggtcaccaattgcttttcagtgccgcacaatgagtcagaagatgaagtggctgttgacatggaatttgctaagaatatgtatgaactgcataaaaaagtttctccaaatgagctcatcctgggctggtacgctacgggccatgacatcacagagcactctgtgctgatccacgagtactacagccgagaggcccccaaccccatccacctcactgtggacacaagtctccagaacggccgcatgagcatcaaagcctacgtcagcactttaatgggagtccctgggaggaccatgggagtgatgttcacgcctctgacagtgaaatacgcgtactacgacactgaacgcatcggagttgacctgatcatgaagacctgctttagccccaacagagtgattggactctcaagtgacttgcagcaagtaggaggggcatcagctcgcatccaggatgccctgagtacagtgttgcaatatgcagaggatgtactgtctggaaaggtgtcagctgacaatactgtgggccgcttcctgatgagcctggttaaccaagtaccgaaaatagttcccgatgactttgagaccatgctcaacagcaacatcaatgaccttttgatggtgacctacctggccaacctcacacagtcacagattgcactcaatgaaaaacttgtaaacctgtgaatggaccccaagcagtacacttgctggtctaggtattaaccccaggactcagaagtgaaggagaaatgggttttttgtggtcttgagtcacactgagatagtcagttgtgtgtgactctaataaacggagcctaccttttgtaaattaatttcatcttatgtgagtttattgccgggtggaagggaggaaaatgttttagatcacacagaaactaggaagtgaatattgtaggtagagaagttggttatgtgtttggcatgttactgttttaccaaactgttcttttggttttcaatatggaaaggtgtccattggcaaaacaaccttttcttgaggattcatgtgatttctacaggaaatgaaaataagaatccatggagaaaaaatagctaagaaaattggatgcttaatctgaactaaaagagtagagtgtgtagtcactatcttaaaatacattaatagtaagatggagctctttgccactttggttcggggaggcagaattaagatctgtgggttaaagattaaagaggtttccccaaaacttcagaaaattcttaggtgctatctgtaactcgaggatagagccttgagttatactgaggtctgccagtggctcaatttaagcaaagactagatggcatttcccagaggccttgtaggctagagtacttgcctgtgtaacttcagacatccatttcctctggtatcctggagttccgcctcgccactgtgtgtcttagaaataagtcattattcaagaactcaggaaattatacgttggagtgaaaaggtgagtgaaggcaatggggaatcaaaaaggcctggatcctagttctgaggtatgtgtagccttaggaaagataaattataagagtcataagatatggatcataaacatacatagtccattagggtattatgaggattccatgaattaataaatgtcaggttaatcaacacttgtggagaatatcacctggtatgtagtaagcacagataagtggtagatactatgatgcctaaaggtgaatagtttgaaagtaataagcaacatgaaccccagcctggaactcagttctgagatatgtacctcaggaaatataagttatgggagtcataaagtgtggatagtaatgatagataatttcttacaggtagggaaatgtaaacagatcttatcggcaaaatgataatgacaggccaaattgttaaaggtaggttaaaagtagacagcatggtgggaaggttaatcagagtcaaaatgtttcagtgttcttacatttttgggagtagccagttaatatcaacttagtctttttaagtatgcatgataaaattccgaggttaattgctagaagtatatataatctctcaatgaatagtgatgagagatggtgggataatagggaagaaacaaaattttaaatttgagaaataagcatagaaaaggtggataaaacaaaagatggcaaaacaagtccaaatagatcagtaattacaataaatgtataagtattaaactagcccaaggaaaaattgaatattaaaacaaaccccaatcatatgctgtttacaggagacacatctaaaacaaggacataaagttgtcctgcagctgtgagtaacaatataggtgaatgttaataataatgttgaatgaaaaaagctggtgtcagaagacatgtacattatgatactccagaagttcaaaaacaagtgaaacttgtttagacatgcggttggctgtctgtatatgtgggttccacatctatggactcaaccaactacaggttgaaaatattgagggggaaaattgtgtctggactaaacctgtacagacatttttccttgtcatttttccctaaacaatacaaagtattagatggtgtttatactgtattcggtattataagtaatctagagatgacttaaaagtatatgagaaggtatgcacaggttatatccaaatacttcatattagggacttgagcatcagaggatttttatatccaaggaaggttctggaaccaatcctccacggatactaaacggtgactgtgtgtgtatatatatatgtatagtctgttctcattatctatagtagttatgttttataaagtcaccatgaacactg

SEQ ID NO: 1120 - protein, 357 aa, Homo sapiens
MATPAVPVSAPPATPTPVPAAAPASVPAPTPAPAAAPVPAAAPASSSDPAAAAAATAAPGQTPASAQAPAQTPAPALPGPALPGPFPGGRVVRLHPVILASIVDSYERRNEGAARVIGTLLGTVDKHSVEVTNCFSVPHNESEDEVAVDMEFAKNMYELHKKVSPNELILGWYATGHDITEHSVLIHEYYSREAPNPIHLTVDTSLQNGRMSIKAYVSTLMGVPGRTMGVMFTPLTVKYAYYDTERIGVDLIMKTCFSPNRVIGLSSDLQQVGGASARIQDALSTVLQYAEDVLSGKVSADNTVGRFLMSLVNQVPKIVPDDFETMLNSNINDLLMVTYLANLTQSQIALNEKLVNL

SEQ ID NO: 1121 - DNA, 2849 bp, Homo sapiens
gtagtggccacagccttacaggcaggcaggggtggttggtgtcaacaggggggccaacagggtaccagagccaagaccctcggcctcctcccccgccgccttcctgcagatctgcttggctttgaggaagagtggcagtactgcctcactgcataagggatgggatcagagaacagtgctttaaagagctatacactgagagaaccaccatttaccttaccctctggacttgctgtttatcccgctgtactgcaagatggcaaatttgcttcagtttttgtgtataagagagaaaatgaagacaaggttaataaagctgccaagcatttgaagacacttcgtcacccttgcttgctaagatttttatcttgtactgtggaagcggatggcattcatcttgtcactgagcgagtacagcccctggaagtggctttggaaacattgtcttctgcagaggtctgtgctgggatctatgacatattgctggctcttatcttccttcatgacagaggacacctaacacacaataatgtctgtttatcatctgtgtttgtgagtgaagatggacactggaagctaggaggaatggaaactgtttgtaaagtttctcaggccacaccagagtttctgaggagtattcagtcaataagagacccagcatctatccctcctgaagagatgtctccagaattcacaactctcccagagtgtcatggacatgcccgggatgccttttcatttggaacattggtggaaagtttgctcacaatcttaaatgaacaggtttcagcggatgttctctccagctttcaacagaccttgcactcaactttgctgaatcccattccaaaatgtcggccagcgctctgcaccttactatctcatgacttcttcagaaatgattttctggaagttgtgaatttcttgaaaagtttaacattgaagagtgaagaggagaaaacggaattctttaaatttctgctggacagagtcagctgcttgtcagaggaattgatagcttcaaggttggtgcctcttctgcttaatcagttggtgtttgcagagccagtggctgttaagagttttcttccttatctgcttggccccaaaaaagatcatgcgcagggagaaactccttgcttgctctcaccagccctgttccagtcacgggtgatccccgtgcttctccagttgtttgaagttcatgaagagcatgtgcggatggtgctgctgtctcacatcgaggcctacgtggagcacttcactcaggagcagctgaagaaagtcatcttgccacaggttttgctgggcctgcgtgatactagcgattccattgtggcaattactctgcatagcctagcagtgctggtctctctgcttggaccagaggtggttgtgggaggagaacgaaccaagatcttcaaacgcactgccccaagttttactaaaaatactgacctttctctagaaggcgatccattttctcagcctattaaatttcccataaatggactctcagatgtaaaaaatacttcggaggacagtgaaaacttcccatcaagttctaaaaagtctgaggagtggcctgactggagtgaacctgaggagcctgaaaatcaaactgtcaacatacagatttggcctagagaaccttgtgatgatgtcaagtcccagtgcactaccttggatgtggaagagtcatcttgggatgactgcgagcccagcagcttagatactaaagtaaacccaggaggtggaatcactgctacaaaacctgttacctcaggggagcagaagcctattcctgctttgctttcactcactgaagagtctatgccttggaaatcaagcttaccccaaaagattagccttgtacaaaggggggatgacgcagaccaaatcgagccgccaaaagtgtcatcacaagaaaggccccttaaggttccatcagaacttggtttaggagaggaattcaccattcaagtaaaaaagaagccagtaaaagatcctgagatggattggtttgctgatatgatcccagaaattaagccttctgctgcttttcttatattacctgaactgaggacagaaatggtcccaaaaaaggatgatgtctccccagtgatgcagttttcctcaaaatttgctgcagcagaaattactgagggagaggctgaaggctgggaagaagaaggggagctgaactgggaagataataactggtgacaatagatgtgagttaaactttaggaaaaaggattccctttttttaaaaaaaatcaatacctcaaaagcaggctttgggacaagaaaaccccaaagtggcctgcttttcccatcccaggagctcattatccagtctgtgccaactgaagtaggagactgactgtgagtgctggctaaaagccctgggtggtgaggctcacagtactggtttccaggaggaagagcctttgtgcatttgactgaggccagtttctatgaagagcaagtagctgaggagaggtcgaatttactgctttttccaggacaattctggaagtaaagaaaatgtaattcaagctggttagcttaattttgtgccattctttaacataagagtaagctctattatgaaatacaactttaaaaaattttagctataaattatataaatgattttaaattgctgaggtttccttaggcagcttatttatttgtttacagttagactatctgagtaaatggttctttgtggacctaggcagttcctgactgttccacatgtagtacattgtaccaaagttcttaataagaatattccccacaatcctgttctctaaatgtcaaataaagattattttcactag

SEQ ID NO: 1122 - protein, 688 aa, Homo sapiens
MGSENSALKSYTLREPPFTLPSGLAVYPAVLQDGKFASVFVYKRENEDKVNKAAKHLKTLRHPCLLRFLSCTVEADGIHLVTERVQPLEVALETLSSAEVCAGIYDILLALIFLHDRGHLTHNNVCLSSVFVSEDGHWKLGGMETVCKVSQATPEFLRSIQSIRDPASIPPEEMSPEFTTLPECHGHARDAFSFGTLVESLLTILNEQVSADVLSSFQQTLHSTLLNPIPKCRPALCTLLSHDFFRNDFLEVVNFLKSLTLKSEEEKTEFFKFLLDRVSCLSEELIASRLVPLLLNQLVFAEPVAVKSFLPYLLGPKKDHAQGETPCLLSPALFQSRVIPVLLQLFEVHEEHVRMVLLSHIEAYVEHFTQEQLKKVILPQVLLGLRDTSDSIVAITLHSLAVLVSLLGPEVVVGGERTKIFKRTAPSFTKNTDLSLEGDPFSQPIKFPINGLSDVKNTSEDSENFPSSSKKSEEWPDWSEPEEPENQTVNIQIWPREPCDDVKSQCTTLDVEESSWDDCEPSSLDTKVNPGGGITATKPVTSGEQKPIPALLSLTEESMPWKSSLPQKISLVQRGDDADQIEPPKVSSQERPLKVPSELGLGEEFTIQVKKKPVKDPEMDWFADMIPEIKPSAAFLILPELRTEMVPKKDDVSPVMQFSSKFAAAEITEGEAEGWEEEGELNWEDNNW

SEQ ID NO: 1123 - DNA, 2794 bp, Homo sapiens
agatctgcttggctttgaggaagagtggcagtactgcctcactgcataagggatgggatcagagaacagtgctttaaagagctatacactgagagaaccaccatttaccttaccctctggacttgctgtttatcccgctgtactgcaagatggcaaatttgcttcagtttttgtgtataagagagaaaatgaagacaaggttaataaagctgccaagcatttgaagacacttcgtcacccttgcttgctaagatttttatcttgtactgtggaagcggatggcattcatcttgtcactgagcgagtacagcccctggaagtggctttggaaacattgtcttctgcagaggtctgtgctgggatctatgacatattgctggctcttatcttccttcatgacagaggacacctaacacacaataatgtctgtttatcatctgtgtttgtgagtgaagatggacactggaagctaggaggaatggaaactgtttgtaaagtttctcaggccacaccagagtttctgaggagtattcagtcaataagagacccagcatctatccctcctgaagagatgtctccagaattcacaactctcccagagtgtcatggacatgcccgggatgccttttcatttggaacattggtggaaagtttgctcacaatcttaaatgaacaggtttcagcggatgttctctccagctttcaacagaccttgcactcaactttgctgaatcccattccaaaatgtcggccagcgctctgcaccttactatctcatgacttcttcagaaatgattttctggaagttgtgaatttcttgaaaagtttaacattgaagagtgaagaggagaaaacggaattctttaaatttctgctggacagagtcagctgcttgtcagaggaattgatagcttcaaggttggtgcctcttctgcttaatcagttggtgtttgcagagccagtggctgttaagagttttcttccttatctgcttggccccaaaaaagatcatgcgcagggagaaactccttgcttgctctcaccagccctgttccagtcacgggtgatccccgtgcttctccagttgtttgaagttcatgaagagcatgtgcggatggtgctgctgtctcacatcgaggcctacgtggagcacttcactcaggagcagctgaagaaagtcatcttgccacaggttttgctgggcctgcgtgatactagcgattccattgtggcaattactctgcatagcctagcagtgctggtctctctgcttggaccagaggtggttgtgggaggagaacgaaccaagatcttcaaacgcactgccccaagttttactaaaaatactgacctttctctagaagattctcctatgtgtgtcgtctgcagccatcacagtcagatctcgccaatcttggagaaccccttctctagcatattccctaaatgtttcttttctggcagcacgcccatcaacagcaagaagcacatacagcgagattactacaatactcttttacagacaggcgatccattttctcagcctattaaatttcccataaatggactctcagatgtaaaaaatacttcggaggacagtgaaaacttcccatcaagttctaaaaagtctgaggagtggcctgactggagtgaacctgaggagcctgaaaatcaaactgtcaacatacagatttggcctagagaaccttgtgatgatgtcaagtcccagtgcactaccttggatgtggaagagtcatcttgggatgactgcgagcccagcagcttagatactaaagtaaacccaggaggtggaatcactgctacaaaacctgttacctcaggggagcagaagcctattcctgctttgctttcactcactgaagagtctatgccttggaaatcaagcttaccccaaaagattagccttgtacaaaggggggatgacgcagaccaaatcgagccgccaaaagtgtcatcacaagaaaggccccttaaggttccatcagaacttggtttaggagaggaattcaccattcaagtaaaaaagaagccagtaaaagatcctgagatggattggtttgctgatatgatcccagaaattaagccttctgctgcttttcttatattacctgaactgaggacagaaatggtcccaaaaaaggatgatgtctccccagtgatgcagttttcctcaaaatttgctgcagcagaaattactgagggagaggctgaaggctgggaagaagaaggggagctgaactgggaagataataactggtgacaatagatgtgagttaaactttaggaaaaaggattccctttttttaaaaaaaatcaatacctcaaaagcaggctttgggacaagaaaaccccaaagtggcctgcttttcccatcccaggagctcattatccagtctgtgccaactgaagtaggagactgactgtgagtgctggctaaaagccctgggtggtgaggctcacagtactggtttccaggaggaagagcctttgtgcatttgactgaggccagtttctatgaagagcaagtagctgaggagaggtcgaatttactgctttttccaggacaattctggaagtaaagaaaatgtaattcaagctggttagcttaattttgtgccattctttaacataagagtaagctctattatgaaatacaactttaaaaaattttagctataaattatataaatgattttaaattgctgaggtttccttaggcagcttatttatttgtttacagttagactatctgagtaaatggttctttgtggac

SEQ ID NO: 1124 - protein, 742 aa, Homo sapiens
MGSENSALKSYTLREPPFTLPSGLAVYPAVLQDGKFASVFVYKRENEDKVNKAAKHLKTLRHPCLLRFLSCTVEADGIHLVTERVQPLEVALETLSSAEVCAGIYDILLALIFLHDRGHLTHNNVCLSSVFVSEDGHWKLGGMETVCKVSQATPEFLRSIQSIRDPASIPPEEMSPEFTTLPECHGHARDAFSFGTLVESLLTILNEQVSADVLSSFQQTLHSTLLNPIPKCRPALCTLLSHDFFRNDFLEVVNFLKSLTLKSEEEKTEFFKFLLDRVSCLSEELIASRLVPLLLNQLVFAEPVAVKSFLPYLLGPKKDHAQGETPCLLSPALFQSRVIPVLLQLFEVHEEHVRMVLLSHIEAYVEHFTQEQLKKVILPQVLLGLRDTSDSIVAITLHSLAVLVSLLGPEVVVGGERTKIFKRTAPSFTKNTDLSLEDSPMCVVCSHHSQISPILENPFSSIFPKCFFSGSTPINSKKHIQRDYYNTLLQTGDPFSQPIKFPINGLSDVKNTSEDSENFPSSSKKSEEWPDWSEPEEPENQTVNIQIWPREPCDDVKSQCTTLDVEESSWDDCEPSSLDTKVNPGGGITATKPVTSGEQKPIPALLSLTEESMPWKSSLPQKISLVQRGDDADQIEPPKVSSQERPLKVPSELGLGEEFTIQVKKKPVKDPEMDWFADMIPEIKPSAAFLILPELRTEMVPKKDDVSPVMQFSSKFAAAEITEGEAEGWEEEGELNWEDNNW

SEQ ID NO: 1125 - DNA, 636 bp, Homo sapiens
acagcaccctcctgaaaactgcagcttccttctcaccttgaagaataatcctagaaaactcacaaaatgtgtgatgcttttgtaggtacctggaaacttgtctccagtgaaaactttgatgattatatgaaagaagtaggagtgggctttgccaccaggaaagtggctggcatggccaaacctaacatgatcatcagtgtgaatggggatgtgatcaccattaaatctgaaagtacctttaaaaatactgagatttccttcatactgggccaggaatttgacgaagtcactgcagatgacaggaaagtcaagagcaccataaccttagatgggggtgtcctggtacatgtgcagaaatgggatggaaaatcaaccaccataaagagaaaacgagaggatgataaactggtggtggaatgcgtcatgaaaggcgtcacttccacgagagtttatgagagagcataagccaagggacgttgacctggactgaagttcgcattgaactctacaacattctgtgggatatattgttcaaaaagatattgttgttttccatgatttagcaagcaactaattttctcccaagctgattttattcaatatggttacgttggttaaataaactttttttagatt

SEQ ID NO: 1126 - protein, 132 aa, Homo sapiens
MCDAFVGTWKLVSSENFDDYMKEVGVGFATRKVAGMAKPNMIISVNGDVITIKSESTFKNTEISFILGQEFDEVTADDRKVKSTITLDGGVLVHVQKWDGKSTTIKRKREDDKLVVECVMKGVTSTRVYERA

SEQ ID NO: 1127 - DNA, 3817 bp, Homo sapiens
cgcggagctacagtgtgctttgagtagaagctgcactggggccgggactcggaggcgcgctgcgtgagccggccgcagagccatggcgggcggggaagaccgcggggacggagagccggtatcagtggtgaccgtgagggtgcagtacctggaagacaccgaccccttcgcatgtgccaactttccggagccgcgccgggcccccacctgcagcctggacggggcgctgcccttgggcgcgcagatacccgcggtgcaccgcctgctgggagcgccgctcaagttggaggattgtgctctgcaagtgtctccctccggatactacctggacaccgagctgtccctggaagagcagcgggagatgctggagggcttctatgaagagatcagcaaagggcggaagcccacgctgatccttcggacccagctctctgtgagggtcaacgctatcttggaaaagctgtatagctccagtggtcctgagctccgccgctccctcttctcactgaagcagatcttccaggaggacaaagacctggtgcctgaatttgtgcattcagaggggctgagctgcctgatccgtgtgggtgctgctgccgaccacaactaccagagctacatccttagagcgctcggccagctgatgctctttgtggatggaatgctgggggtggtggcccacagtgacactattcagtggctgtacacattgtgtgccagcctgtcccgcttggtggtgaagacagccctgaagctgctgttggtgtttgtagaatactccgaaaacaacgcaccgctgttcatccgtgcagtgaactctgtggccagcaccaccggtgctcctccctgggccaatctggtgtccatcctggaggagaagaatggcgctgaccctgagttgttggtgtacacggtcaccctcatcaacaagacgctggcggcgctcccggaccaggactccttctacgatgtgacggatgcactggagcagcagggcatggaagcgctggtccagcgccacctgggcactgcgggcactgacgtcgacctgcgcacgcagcttgtgctctacgagaacgccctgaaattggaggatggagacatcgaagaagccccaggcgctggtgggcggcgggaacgacgaaagccttcttctgaggagggcaagaggagccgccgttctctggaaggcgggggctgccccgcgcgtgccccggaacctggccccacaggccccgcctcaccggtaggccccacctcttccaccggccccgccctgctgacaggccccgcctccagccctgtgggccctccctccggtctccaagcttcagtgaacctttttcctaccatctctgtggcaccctcagctgacacctccagcgagaggagcatctacaaagcccggttcctggagaatgtggcggcagcagaaacagagaagcaggttgcgctggcccagggccgggcagagacacttgccggggccatgcccaatgaggcgggtggacacccagatgcccggcaactctgggactccccagagacagcccctgcagccagaacaccccagagccctgccccctgtgtcctgctccgggcccagcgaagccttgcaccagagcccaaggagccactgataccagcaagccccaaggctgagcccatctgggagctccctacccgtgcacccaggctctctattggggacctggacttttcagatctaggggaggatgaagaccaggacatgctgaatgtagagtctgtggaggctgggaaagacatcccagctccctcacccccactgcccctgctctcgggagtacccccccctcccccacttccacctcccccacccatcaaaggccccttcccaccacctccacctctacctctggctgcccctcttccccattcagtgcctgacagctcagccctccccactaagaggaagacagtaaaacttttctggcgtgagctgaagctggctgggggccatggagtctctgcaagccgctttgggccctgcgccaccctctgggcttcactggaccctgtctcagtggacacggcccgactggaacacctctttgagtctcgtgccaaagaggtgctgccctccaagaaagctggagagggccgccggacaatgaccacagtgctggaccccaagcgcagcaacgccatcaacatcggcctaaccacactgccacctgtgcatgtcattaaggctgctctgctcaactttgatgagtttgctgtcagcaaggatggcattgagaagctactgaccatgatgcccacggaggaagagcggcagaagattgaggaagcccagctggccaaccctgacatacccctgggcccagccgagaacttcctgatgactcttgcctccattggcggcctcgctgctcgtctacaactctgggccttcaagctggactatgacagcatggagcgggaaattgctgagccactgtttgacctgaaagtgggtatggaacagctggtacagaatgccaccttccgctgcatcctggctaccctcctagcggtgggcaacttcctcaatggctcccagagcagcggctttgagctgagctacctggagaaggtgtcagaggtgaaggacacggtgcgtcgacagtcactgctacaccatctctgctccctagtgctccagacccggcctgagtcctctgacctctattcagaaatccctgccctgacccgctgtgccaaggtggactttgaacagctgactgagaacctggggcagctggagcgccggagccgggcagccgaggagagcctgcggagcttggccaagcatgagctggccccagccctgcgtgcccgcctcacccacttcctggaccagtgtgcccgccgtgttgccatgctaaggatagtgcaccgccgtgtctgcaataggttccatgccttcctgctctacctgggctacaccccgcaggcggcccgtgaagtgcgcatcatgcagttctgccacacgctgcgggaatttgcgcttgagtatcggacttgccgggaacgagtgctacagcagcagcagaagcaggccacataccgtgagcgcaacaagacccggggacgcatgatcaccgagacagagaagttctcaggtgtggctggggaagcccccagcaacccctctgtcccagtagcagtgagcagcgggccaggccggggagatgctgacagtcatgctagtatgaagagtctgctgaccagcaggcctgaggacaccacacacaatcgccgcagcagaggcatggtccagagcagctccccaatcatgcccacagtggggccctccactgcatccccagaagaacccccaggctccagtttacccagtgatacatcagatgagatcatggaccttctggtgcagtcagtgaccaagagcagtcctcgtgccttagctgctagggaacgcaagcgttcccgcggcaaccgcaagtctttgagaaggacgttgaagagtgggctcggagatgacctggtgcaggcactgggactaagcaagggtcctggcctggaggtgtgaaggtgctgtatcccggaaatctatctggaccctggactgcagtgcaggagatgacagagtgaggagggcccagagcagaattctggccccagaactctgtgcccaggagccatgccttgagcagtattagccgtgtgtgtatgcatgtgagtgtgtgtgtatgtgtgtgtgtgcatgcatatgcatgtgcatgtgtgtgagctccttgaacgcacggagcaaaataaaattttcttagct

SEQ ID NO: 1128 - protein, 1164 aa, Homo sapiens
MAGGEDRGDGEPVSVVTVRVQYLEDTDPFACANFPEPRRAPTCSLDGALPLGAQIPAVHRLLGAPLKLEDCALQVSPSGYYLDTELSLEEQREMLEGFYEEISKGRKPTLILRTQLSVRVNAILEKLYSSSGPELRRSLFSLKQIFQEDKDLVPEFVHSEGLSCLIRVGAAADHNYQSYILRALGQLMLFVDGMLGVVAHSDTIQWLYTLCASLSRLVVKTALKLLLVFVEYSENNAPLFIRAVNSVASTTGAPPWANLVSILEEKNGADPELLVYTVTLINKTLAALPDQDSFYDVTDALEQQGMEALVQRHLGTAGTDVDLRTQLVLYENALKLEDGDIEEAPGAGGRRERRKPSSEEGKRSRRSLEGGGCPARAPEPGPTGPASPVGPTSSTGPALLTGPASSPVGPPSGLQASVNLFPTISVAPSADTSSERSIYKARFLENVAAAETEKQVALAQGRAETLAGAMPNEAGGHPDARQLWDSPETAPAARTPQSPAPCVLLRAQRSLAPEPKEPLIPASPKAEPIWELPTRAPRLSIGDLDFSDLGEDEDQDMLNVESVEAGKDIPAPSPPLPLLSGVPPPPPLPPPPPIKGPFPPPPPLPLAAPLPHSVPDSSALPTKRKTVKLFWRELKLAGGHGVSASRFGPCATLWASLDPVSVDTARLEHLFESRAKEVLPSKKAGEGRRTMTTVLDPKRSNAINIGLTTLPPVHVIKAALLNFDEFAVSKDGIEKLLTMMPTEEERQKIEEAQLANPDIPLGPAENFLMTLASIGGLAARLQLWAFKLDYDSMEREIAEPLFDLKVGMEQLVQNATFRCILATLLAVGNFLNGSQSSGFELSYLEKVSEVKDTVRRQSLLHHLCSLVLQTRPESSDLYSEIPALTRCAKVDFEQLTENLGQLERRSRAAEESLRSLAKHELAPALRARLTHFLDQCARRVAMLRIVHRRVCNRFHAFLLYLGYTPQAAREVRIMQFCHTLREFALEYRTCRERVLQQQQKQATYRERNKTRGRMITETEKFSGVAGEAPSNPSVPVAVSSGPGRGDADSHASMKSLLTSRPEDTTHNRRSRGMVQSSSPIMPTVGPSTASPEEPPGSSLPSDTSDEIMDLLVQSVTKSSPRALAARERKRSRGNRKSLRRTLKSGLGDDLVQALGLSKGPGLEV

SEQ ID NO: 1129 - DNA, 1337 bp, Homo sapiens
gcaggacaacgcctgccacgcgtcggaactcggccgcgggacatccacggggcgcgagtgacacgcgggagggagagcagtgttctgctggagccgatgccaaaaaccatgcatttcttattcagattcattgttttcttttatctgtggggcctttttactgctcagagacaaaagaaagaggagagcaccgaagaagtgaaaatagaagttttgcatcgtccagaaaactgctctaagacaagcaagaagggagacctactaaatgcccattatgacggctacctggctaaagacggctcgaaattctactgcagccggacacaaaatgaaggccaccccaaatggtttgttcttggtgttgggcaagtcataaaaggcctagacattgctatgacagatatgtgccctggagaaaagcgaaaagtagttatacccccttcatttgcatacggaaaggaaggctatgtacttgaagaagtctttcttctgcaaaatatccttgtctcatgtcacagaacaaccctgcatgtcttgaaatgcatgttgttagtgaataacaatacatgcgcagaaggcaagattccaccggatgctacattgatttttgagattgaactttatgctgtgaccaaaggaccacggagcattgagacatttaaacaaatagacatggacaatgacaggcagctctctaaagccgagataaacctctacttgcaaagggaatttgaaaaagatgagaagccacgtgacaagtcatatcaggatgcagttttagaagatatttttaagaagaatgaccatgatggtgatggcttcatttctcccaaggaatacaatgtataccaacacgatgaactatagcatatttgtatttctactttttttttttagctatttactgtactttatgtataaaacaaagtcacttttctccaagttgtatttgctatttttcccctatgagaagatattttgatctccccaatacattgattttggtataataaatgtgaggctgttttgcaaacttaacttgcaggaatggtatgactgtgtttcctactgctttattctgtaaacaagaattgtagcaccatgaaacagacctctgggtcccagtgggcattttttcccctttcaggatgtaggaggacatgtatagtatgtcaaaaactgcaagcttttcccaactttaaccttaccagcatgttaatatccagtttttttatagtttaaaagttaaagtgcctcatattttgaaaatatccattaaggacccaggaattagcatttcacttgtttatacatttttataacattatgaagacgat

SEQ ID NO: 1130 - protein, 256 aa, Homo sapiens
MPKTMHFLFRFIVFFYLWGLFTAQRQKKEESTEEVKIEVLHRPENCSKTSKKGDLLNAHYDGYLAKDGSKFYCSRTQNEGHPKWFVLGVGQVIKGLDIAMTDMCPGEKRKVVIPPSFAYGKEGYVLEEVFLLQNILVSCHRTTLHVLKCMLLVNNNTCAEGKIPPDATLIFEIELYAVTKGPRSIETFKQIDMDNDRQLSKAEINLYLQREFEKDEKPRDKSYQDAVLEDIFKKNDHDGDGFISPKEYNVYQHDEL

SEQ ID NO: 1131 - DNA, 1235 bp, Homo sapiens
gcaggacaacgcctgccacgcgtcggaactcggccgcgggacatccacggggcgcgagtgacacgcgggagggagagcagtgttctgctggagccgatgccaaaaaccatgcatttcttattcagattcattgttttcttttatctgtggggcctttttactgctcagagacaaaagaaagaggagagcaccgaagaagtgaaaatagaagttttgcatcgtccagaaaactgctctaagacaagcaagaagggagacctactaaatgcccattatgacggctacctggctaaagacggctcgaaattctactgcagccggacacaaaatgaaggccaccccaaatggtttgttcttggtgttgggcaagtcataaaaggcctagacattgctatgacagatatgtgccctggagaaaagcgaaaagtagttatacccccttcatttgcatacggaaaggaaggctatgcagaaggcaagattccaccggatgctacattgatttttgagattgaactttatgctgtgaccaaaggaccacggagcattgagacatttaaacaaatagacatggacaatgacaggcagctctctaaagccgagataaacctctacttgcaaagggaatttgaaaaagatgagaagccacgtgacaagtcatatcaggatgcagttttagaagatatttttaagaagaatgaccatgatggtgatggcttcatttctcccaaggaatacaatgtataccaacacgatgaactatagcatatttgtatttctactttttttttttagctatttactgtactttatgtataaaacaaagtcacttttctccaagttgtatttgctatttttcccctatgagaagatattttgatctccccaatacattgattttggtataataaatgtgaggctgttttgcaaacttaacttgcaggaatggtatgactgtgtttcctactgctttattctgtaaacaagaattgtagcaccatgaaacagacctctgggtcccagtgggcattttttcccctttcaggatgtaggaggacatgtatagtatgtcaaaaactgcaagcttttcccaactttaaccttaccagcatgttaatatccagtttttttatagtttaaaagttaaagtgcctcatattttgaaaatatccattaaggacccaggaattagcatttcacttgtttatacatttttataacattatgaagacgat

SEQ ID NO: 1132 - protein, 222 aa, Homo sapiens
MPKTMHFLFRFIVFFYLWGLFTAQRQKKEESTEEVKIEVLHRPENCSKTSKKGDLLNAHYDGYLAKDGSKFYCSRTQNEGHPKWFVLGVGQVIKGLDIAMTDMCPGEKRKVVIPPSFAYGKEGYAEGKIPPDATLIFEIELYAVTKGPRSIETFKQIDMDNDRQLSKAEINLYLQREFEKDEKPRDKSYQDAVLEDIFKKNDHDGDGFISPKEYNVYQHDEL

SEQ ID NO: 1133 - DNA, 5350 bp, Homo sapiens
cgcctgggcgcggcggagggcggggagccgggcaggtcgcgcctgcgggcggcagccgaccgccgggagctgttctgatttccgacgcgcacgctaggggcccggagcagcccccggccccggcgcgccgccgacatgggcaacgcagggagcatggattcgcagcagaccgatttcagggcgcacaacgtgcctttgaagctgccgatgccagagccaggtgaactggaggagcgatttgccatcgtgctgaatgctatgaacctacctcctgacaaagccaggttactgcggcagtatgataatgagaaaaaatgggaactgatttgtgatcaggaacgattccaggtgaagaatcctccccatacatacattcaaaagctcaaaggctatctggatccagctgtaaccaggaagaaattcagacggcgtgttcaagaatctacacaagtgctaagagaactggaaatttctttgagaactaaccacattggatgggtcagagaatttctgaatgaagaaaacaaaggtcttgatgttctagtggaatatctctcatttgcacagtacgcggtaacttttgactttgaaagtgtggagagtactgtggagagctcggtggacaaatcaaagccctggagtaggtccatcgaggacctgcacagagggagcaacctgccctcacctgtgggcaacagtgtctcccgctctggaagacattctgcactgcgatataatacattgccaagcagaagaactctgaaaaattcaagattagtgagtaagaaagatgatgtgcatgtctgtatcatgtgtttacgtgccatcatgaattatcagtatggtttcaacatggtcatgtctcatccacacgctgtcaatgagattgcactaagcctgaacaacaagaatcccagaacaaaagcccttgtcttagaactgttggcagccgtttgtcttgtcagaggcgggcatgaaatcattttatcagcatttgataactttaaagaggtttgtggagaaaaacagcgctttgagaagttgatggaacatttcaggaatgaagacaataacatagattttatggtggcttctatgcagtttattaatattgtagtccattcagtagaagatatgaatttcagagttcacctgcagtatgaatttaccaaattaggcctggacgaatacttggacaagctgaaacacactgagagtgacaagcttcaagtccagatccaggcttacctggacaatgtttttgatgtaggagctctactggaagatgctgaaactaagaatgctgccttggagagggtggaagaactggaagaaaacatttctcatttatctgaaaaactgcaagacacagagaatgaagccatgtccaagattgtggaactggaaaagcaactcatgcagaggaacaaggagctggatgtcgttcgggaaatctacaaagatgcaaatactcaagttcacacattaagaaaaatggtcaaagaaaaagaagaagcaattcaaagacagtctaccctggaaaaaaagattcatgagctagagaaacaagggaccattaaaattcagaagaaaggggatggggatatcgccatactgccagttgtggcttctggcacattgtccatggggtcagaagtggtagcaggtaactctgtgggacccacaatgggggccgcttcctcaggacccttgccccctcctccaccaccactgcctccctcatcagacacacctgaaacagtgcaaaatggtccagtaacaccacctatgccaccgccgccgccgccccctcctccacctcctcctcccccaccgccccctccgcctcctcctctcccaggccctgcagctgagactgtaccagctcctcccttagcacctccccttccctctgcacctccgctgcctggaacatcttcacccacagtggttttcaactcaggattagcagctgtgaaaattaagaagccaatcaagacgaagttcagaatgccagtgtttaactgggttgctctgaagcccaatcagatcaatggcacagtcttcaatgaaattgatgatgagcgaattctggaggatttaaatgtggatgaatttgaggaaatattcaagacaaaagcccaaggacctgccattgatctttcttcaagcaaacagaagataccacagaagggatcaaacaaagtgacattactagaagcaaacagggccaaaaatcttgccataactttaaggaaagctggaaagactgctgatgaaatatgtaaagctattcatgtatttgacttgaagacactgcctgtggactttgtggaatgcttgatgcggttcctaccaactgagaatgaagtgaaagtgcttcggctctacgagcgggaaaggaagcctctggaaaacttgtcagatgaagatcggttcatgatgcagtttagtaaaatcgagaggctcatgcagaagatgaccatcatggccttcattgggaactttgctgaaagcattcagatgctgactcctcaactacatgcgattatagcagcatctgtctctataaagtcgtcccaaaaactcaagaaaattctggaggcaagtgcaatcatcttagcccttggaaactacatgaatagcagtaaaagaggagcagtttatggatttaaacttcagagtttagatctgctcttagatacaaagtcaacagacagaaagcaaacactgttgcactatatatccaatgtggtgaaagaaaaatatcaccaagtgtccctgttttataatgagcttcattatgtggaaaaagctgctgcagtctcccttgagaatgttttgctggatgtcaaggagctccagaggggaatggacttgaccaagagagagtacaccatgcatgaccataacacgctgctgaaggagttcatcctcaacaatgaggggaagctgaagaagctgcaggatgatgccaagatcgcacaggatgcctttgatgatgttgtgaagtattttggagaaaaccccaagacaacaccaccctctgtcttctttcctgtctttgtccggtttgtgaaagcatataagcaagcagaagaggaaaatgagctgaggaaaaagcaggaacaagctctcatggaaaaactcctagagcaagaagctctgatggagcagcaggatccaaagtctccttctcataaatcaaagaggcagcagcaagagttaattgcagaattaagaagacgacaagttaaagataacagacatgtatatgagggaaaagatggtgccattgaagatattatcacagatcttagaaaccaaccatacagacgagccgatgcggtgaggagaagcgtcaggcggcgctttgatgatcagaacttgcgttctgttaatggtgccgaaataacaatgtgaacctgagactggcctgcatgaatacagggtgtgcgtgaatgaaactgcccacatgaactttatgtgctacgatttaactgcagccttgaacacacacaaaaatattcttaagggctcagatttagcaaacacggaagaattttaaaatgagctctcctttcaacccttgttaacaagtgcctaaaaatggaagtacctgttcagattaatcaaagcaataggatttgatttgattaggtatctttttacaccagtatgttatttttaaccaaaatgtaaagttcttattaaactcattacctgccattgtgattgtcccatcatggcccacctggtttcctgatgttgtaaataacatcaatgcatctgctgtgggtcctttgctgagatgtcttcgaaggaattttgttttagccatatccatcaactttgtattttacttgcaatttggaagaaggaaagtcacatgatgaaactccttttgtctataaccaggccctggcaaagtgcaaacaggatgcaactgcagtggcacaaaggtcactcaatcctttgtttccagtttcacattctactacttctgcgctagagaacgatgctctgtgagaggcattcactagtatgaatgtggggatatagtgtataagacttatttgcagtactgtgttcttcagctagaggcagctttttaaataatgcaagtgtatttattagcattaaaattaacatctcagtaatcagcattagcatttctgaggaccattattaattctgagaacagaaattggtgccttgcaaggaagtttactagctctatcaacaagcattcaaggttacatctgctagcagagtagtgttaggaacctggccttactctcctctgacaatcgcaattttttcttattttttataaattcaagaagatacacttggcatcgtgtatcgaggctaagtttttcatgcatttcccagactacttatggagaattgcagtttaagttgctgaaaagtattaacatggtattaagcttaaataatacgtaatgggactagatggcccactaagccactgttattttccttcctctctggcagggcacttgatccattccaaagtcaaaaactggactgaagctaaatttgtacttttcataatatacattctgcttctggcttatcttcttggtacatcaatatattaattgtaaagtttattgtatagtatttaaccgctgaagttcctattttatgttgtgcttatgtgaaccccttggtgaaggtcccttttccttggatgtgtagttatatgatctttttaaatgtacagatattttgctataaaatcggtgcagttttttatggtttttacacttctctttaattcccacctaagcctctgggtaatattgtaaatattgttttaaaatgcatcagcctatgctatacaatctgaatgttattttaacttatagttttttttaatatatatatttaactataaggacagtttagggaacaagttacctaccacatttcactttagtgtacctatttacagaaagattaaactgccacctgcgggcacattcccataaatgtgtactttactttaaaaagaacatgccacgattttgtctttctgtggactcaacattcacttcgattaaaaatagcaatttgaccaagttggacttccactacaaagcagctgttttccaaagttcaatgctgacatatatgtatattaaaataattgcctatttattaatctacaaatagacaacgttggcatgttcttttctgtttgtctattaatgggcctgcttcttagcaatattagaatgttttataaaagcaattcatgttacttttctggtcttttcatggcatatgagcaaataataaactatttacactactattctgt

SEQ ID NO: 1134 - protein, 1004 aa, Homo sapiens
FPTRTLGARSSPRPRRAADMGNAGSMDSQQTDFRAHNVPLKLPMPEPGELEERFAIVLNAMNLPPDKARLLRQYDNEKKWELICDQERFQVKNPPHTYIQKLKGYLDPAVTRKKFRRRVQESTQVLRELEISLRTNHIGWVREFLNEENKGLDVLVEYLSFAQYAVTFDFESVESTVESSVDKSKPWSRSIEDLHRGSNLPSPVGNSVSRSGRHSALRYNTLPSRRTLKNSRLVSKKDDVHVCIMCLRAIMNYQYGFNMVMSHPHAVNEIALSLNNKNPRTKALVLELLAAVCLVRGGHEIILSAFDNFKEVCGEKQRFEKLMEHFRNEDNNIDFMVASMQFINIVVHSVEDMNFRVHLQYEFTKLGLDEYLDKLKHTESDKLQVQIQAYLDNVFDVGALLEDAETKNAALERVEELEENISHLSEKLQDTENEAMSKIVELEKQLMQRNKELDVVREIYKDANTQVHTLRKMVKEKEEAIQRQSTLEKKIHELEKQGTIKIQKKGDGDIAILPVVASGTLSMGSEVVAGNSVGPTMGAASSGPLPPPPPPLPPSSDTPETVQNGPVTPPMPPPPPPPPPPPPPPPPPPPPPLPGPAAETVPAPPLAPPLPSAPPLPGTSSPTVVFNSGLAAVKIKKPIKTKFRMPVFNWVALKPNQINGTVFNEIDDERILEDLNVDEFEEIFKTKAQGPAIDLSSSKQKIPQKGSNKVTLLEANRAKNLAITLRKAGKTADEICKAIHVFDLKTLPVDFVECLMRFLPTENEVKVLRLYERERKPLENLSDEDRFMMQFSKIERLMQKMTIMAFIGNFAESIQMLTPQLHAIIAASVSIKSSQKLKKILEASAIILALGNYMNSSKRGAVYGFKLQSLDLLLDTKSTDRKQTLLHYISNVVKEKYHQVSLFYNELHYVEKAAAVSLENVLLDVKELQRGMDLTKREYTMHDHNTLLKEFILNNEGKLKKLQDDAKIAQDAFDDVVKYFGENPKTTPPSVFFPVFVRFVKAYK

SEQ ID NO: 1135 - DNA, 3599 bp, Homo sapiens
ccccaccgccccctccgcctcctcctctcccaggccctgcagctgagactgtaccagctcctcccttagcacctccccttccctctgcacctccgctgcctggaacatcttcacccacagtggttttcaactcaggattagcagctgtgaaaattaagaagccaatcaagacgaagttcagaatgccagtgtttaactgggttgctctgaagcccaatcagatcaatggcacagtcttcaatgaaattgatgatgagcgaattctggaggatttaaatgtggatgaatttgaggaaatattcaagacaaaagcccaaggacctgccattgatctttcttcaagcaaacagaagataccacagaagggatcaaacaaagtgacattactagaagcaaacagggccaaaaatcttgccataactttaaggaaagctggaaagactgctgatgaaatatgtaaagctattcatgtatttgacttgaagacactgcctgtggactttgtggaatgcttgatgcggttcctaccaactgagaatgaagtgaaagtgcttcggctctacgagcgggaaaggaagcctctggaaaacttgtcagatgaagatcggttcatgatgcagtttagtaaaatcgagaggctcatgcagaagatgaccatcatggccttcattgggaactttgctgaaagcattcagatgctgactcctcaactacatgcgattatagcagcatctgtctctataaagtcgtcccaaaaactcaagaaaattctggagatcatcttagcccttggaaactacatgaatagcagtaaaagaggagcagtttatggatttaaacttcagagtttagatctgctcttagatacaaagtcaacagacagaaagcaaacactgttgcactatatatccaatgtggtgaaagaaaaatatcaccaagtgtccctgttttataatgagcttcattatgtggaaaaagctgctgcagtctcccttgagaatgttttgctggatgtcaaggagctccagaggggaatggacttgaccaagagagagtacaccatgcatgaccataacacgctgctgaaggagttcatcctcaacaatgaggggaagctgaagaagctgcaggatgatgccaagatcgcacaggatgcctttgatgatgttgtgaagtattttggagaaaaccccaagacaacaccaccctctgtcttctttcctgtctttgtccggtttgtgaaagcatataagcaagcagaagaggaaaatgagctgaggaaaaagcaggaacaagctctcatggaaaaactcctagagcaagaagctctgatggagcagcaggatccaaagtctccttctcataaatcaaagaggcagcagcaagagttaattgcagaattaagaagacgacaagttaaagataacagacatgtatatgagggaaaagatggtgccattgaagatattatcacagccttaaagaagaataatatcactaaatttccaaatgttcactcgagggtaaggatttcttctagcacaccggtggtggaggatacacagagctgatcttagaaaccaaccatacagacgagccgatgcggtgaggagaagcgtcaggcggcgctttgatgatcagaacttgcgttctgttaatggtgccgaaataacaatgtgaacctgagactggcctgcatgaatacagggtgtgcgtgaatgaaactgcccacatgaactttatgtgctacgatttaactgcagccttgaacacacacaaaaatattcttaagggctcagatttagcaaacacggaagaattttaaaatgagctctcctttcaacccttgttaacaagtgcctaaaaatggaagtacctgttcagattaatcaaagcaataggatttgatttgattaggtatctttttacaccagtatgttatttttaaccaaaatgtaaagttcttattaaactcattacctgccattgtgattgtcccatcatggcccacctggtttcctgatgttgtaaataacatcaatgcatctgctgtgggtcctttgctgagatgtcttcgaaggaattttgttttagccatatccatcaactttgtattttacttgcaatttggaagaaggaaagtcacatgatgaaactccttttgtctataaccaggccctggcaaagtgcaaacaggatgcaactgcagtggcacaaaggtcactcaatcctttgtttccagtttcacattctactacttctgcgctagagaacgatgctctgtgagaggcattcactagtatgaatgtggggatatagtgtataagacttatttgcagtactgtgttcttcagctagaggcagctttttaaataatgcaagtgtatttattagcattaaaattaacatctcagtaatcagcattagcatttctgaggaccattattaattctgagaacagaaattggtgccttgcaaggaagtttactagctctatcaacaagcattcaaggttacatctgctagcagagtagtgttaggaacctggccttactctcctctgacaatcgcaattttttcttattttttataaattcaagaagatacacttggcatcgtgtatcgaggctaagtttttcatgcatttcccagactacttatggagaattgcagtttaagttgctgaaaagtattaacatggtattaagcttaaataatacgtaatgggactagatggcccactaagccactgttattttccttcctctctggcagggcacttgatccattccaaagtcaaaaactggactgaagctaaatttgtacttttcataatatacattctgcttctggcttatcttcttggtacatcaatatattaattgtaaagtttattgtatagtatttaaccgctgaagttcctattttatgttgtgcttatgtgaaccccttggtgaaggtcccttttccttggatgtgtagttatatgatctttttaaatgtacagatattttgctataaaatcggtgcagttttttatggtttttacacttctctttaattcccacctaagcctctgggtaatattgtaaatattgttttaaaatgcatcagcctatgctatacaatctgaatgttattttaacttatagttttttttaatatatatatttaactataaggacagtttagggaacaagttacctaccacatttcactttagtgtacctatttacagaaagattaaactgccacctgcgggcacattcccataaatgtgtactttactttaaaaagaacatgccacgattttgtctttctgtggactcaacattcacttcgattaaaaatagcaatttgaccaagttggacttccactacaaagcagctgttttccaaagttcaatgctgacatatatgtatattaaaataattgcctatttattaatctacaaatagacaacgttggcatgttcttttctgtttgtctattaatgggcctgcttcttagcaatattagaatgttttataaaagcaattcatgttacttttctggtcttttcatggcatatgagcaaataataaactatttacactac

SEQ ID NO: 1136 - protein, 178 aa, Homo sapiens
MDLTKREYTMHDHNTLLKEFILNNEGKLKKLQDDAKIAQDAFDDVVKYFGENPKTTPPSVFFPVFVRFVKAYKQAEEENELRKKQEQALMEKLLEQEALMEQQDPKSPSHKSKRQQQELIAELRRRQVKDNRHVYEGKDGAIEDIITALKKNNITKFPNVHSRVRISSSTPVVEDTQS

SEQ ID NO: 1137 - DNA, 1484 bp, Homo sapiens
ggcacgcagggagggcccagggcgccagggaggccgcgccgggctaatccgaaggggctgcgaggtcaggctgtaaccgggtcaatgtgtggaatattggggggctcggctgcagacttggccaaatggacgggactattaaggaggctctgtcggtggtgagcgacgaccagtccctctttgactcagcgtacggagcggcagcccatctccccaaggccgacatgactgcctcggggagtcctgactacgggcagccccacaagatcaaccccctcccaccacagcaggagtggatcaatcagccagtgagggtcaacgtcaagcgggagtatgaccacatgaatggatccagggagtctccggtggactgcagcgttagcaaatgcagcaagctggtgggcggaggcgagtccaaccccatgaactacaacagctatatggacgagaagaatggcccccctcctcccaacatgaccaccaacgagaggagagtcatcgtccccgcagaccccacactgtggacacaggagcatgtgaggcaatggctggagtgggccataaaggagtacagcttgatggagatcgacacatcctttttccagaacatggatggcaaggaactgtgtaaaatgaacaaggaggacttcctccgcgccaccaccctctacaacacggaagtgctgttgtcacacctcagttacctcagggaaagttcactgctggcctataatacaacctcccacaccgaccaatcctcacgattgagtgtcaaagaagacccttcttatgactcagtcagaagaggagcttggggcaataacatgaattctggcctcaacaaaagtcctccccttggaggggcacaaacgatcagtaagaatacagagcaacggccccagccagatccgtatcagatcctgggcccgaccagcagtcgcctagccaaccctggtgacgggcagatccagctgtggcaattcctcctggagctgctctccgacagcgccaacgccagctgtatcacctgggaggggaccaacggggagttcaaaatgacggaccccgatgaggtggccaggcgctggggcgagcggaaaagcaagcccaacatgaattacgacaagctgagccgggccctccgttattactatgataaaaacattatgaccaaagtgcacggcaaaagatatgcttacaaatttgacttccacggcattgcccaggctctgcagccacatccgaccgagtcgtccatgtacaagtacccttctgacatctcctacatgccttcctaccatgcccaccagcagaaggtgaactttgtccctccccatccatcctccatgcctgtcacttcctccagcttctttggagccgcatcacaatactggacctcccccacggggggaatctaccccaaccccaacgtcccccgccatcctaacacccacgtgccttcacacttaggcagctactactag

SEQ ID NO: 1138 - protein, 452 aa, Homo sapiens
MDGTIKEALSVVSDDQSLFDSAYGAAAHLPKADMTASGSPDYGQPHKINPLPPQQEWINQPVRVNVKREYDHMNGSRESPVDCSVSKCSKLVGGGESNPMNYNSYMDEKNGPPPPNMTTNERRVIVPADPTLWTQEHVRQWLEWAIKEYSLMEIDTSFFQNMDGKELCKMNKEDFLRATTLYNTEVLLSHLSYLRESSLLAYNTTSHTDQSSRLSVKEDPSYDSVRRGAWGNNMNSGLNKSPPLGGAQTISKNTEQRPQPDPYQILGPTSSRLANPGDGQIQLWQFLLELLSDSANASCITWEGTNGEFKMTDPDEVARRWGERKSKPNMNYDKLSRALRYYYDKNIMTKVHGKRYAYKFDFHGIAQALQPHPTESSMYKYPSDISYMPSYHAHQQKVNFVPPHPSSMPVTSSSFFGAASQYWTSPTGGIYPNPNVPRHPNTHVPSHLGSYY

SEQ ID NO: 1139 - DNA, 1161 bp, Homo sapiens
atggagggaggactggcaggcgagcgggcgagggagtctccggtggactgcagcgttagcaaatgcagcaagctggtgggcggaggcgagtccaaccccatgaactacaacagctatatggacgagaagaatggcccccctcctcccaacatgaccaccaacgagaggagagtcatcgtccccgcagaccccacactgtggacacaggagcatgtgaggcaatggctggagtgggccataaaggagtacagcttgatggagatcgacacatcctttttccagaacatggatggcaaggaactgtgtaaaatgaacaaggaggacttcctccgcgccaccaccctctacaacacggaagtgctgttgtcacacctcagttacctcagggaaagttcactgctggcctataatacaacctcccacaccgaccaatcctcacgattgagtgtcaaagaagacccttcttatgactcagtcagaagaggagcttggggcaataacatgaattctggcctcaacaaaagtcctccccttggaggggcacaaacgatcagtaagaatacagagcaacggccccagccagatccgtatcagatcctgggcccgaccagcagtcgcctagccaaccctggtgacgggcagatccagctgtggcaattcctcctggagctgctctccgacagcgccaacgccagctgtatcacctgggaggggaccaacggggagttcaaaatgacggaccccgatgaggtggccaggcgctggggcgagcggaaaagcaagcccaacatgaattacgacaagctgagccgggccctccgttattactatgataaaaacattatgaccaaagtgcacggcaaaagatatgcttacaaatttgacttccacggcattgcccaggctctgcagccacatccgaccgagtcgtccatgtacaagtacccttctgacatctcctacatgccttcctaccatgcccaccagcagaaggtgaactttgtccctccccatccatcctccatgcctgtcacttcctccagcttctttggagccgcatcacaatactggacctcccccacggggggaatctaccccaaccccaacgtcccccgccatcctaacacccacgtgccttcacacttaggcagctactactag

SEQ ID NO: 1140 - protein, 386 aa, Homo sapiens
MEGGLAGERARESPVDCSVSKCSKLVGGGESNPMNYNSYMDEKNGPPPPNMTTNERRVIVPADPTLWTQEHVRQWLEWAIKEYSLMEIDTSFFQNMDGKELCKMNKEDFLRATTLYNTEVLLSHLSYLRESSLLAYNTTSHTDQSSRLSVKEDPSYDSVRRGAWGNNMNSGLNKSPPLGGAQTISKNTEQRPQPDPYQILGPTSSRLANPGDGQIQLWQFLLELLSDSANASCITWEGTNGEFKMTDPDEVARRWGERKSKPNMNYDKLSRALRYYYDKNIMTKVHGKRYAYKFDFHGIAQALQPHPTESSMYKYPSDISYMPSYHAHQQKVNFVPPHPSSMPVTSSSFFGAASQYWTSPTGGIYPNPNVPRHPNTHVPSHLGSYY

SEQ ID NO: 1141 - DNA, 1631 bp, Homo sapiens
ctggccacaccctccgcctggacgcagcagccaccgccgcgtccctctctccacgaggctgccggcttaggacccccagctccgacgtaagtccctctcgtgcgccacctccatccgctgcccctctgcccacgggccgggctcaggtgggtaggggtttgaccccttccgctcctctccgccccccatccacgcccacatctctctgcctcctctcctgggctacagtgggccgctctgcctcgctcccgcccgcctgcctcagtctccccagctctctgccacccccctcggaccagtgcctcttaggtctctccagcgcgccatccctgcaaggcggcccctgacaccaactcactttttcctctgagcgcgggaggcgttactcactcttcctccttcccctcctcgccgactcccgggctctgggcccctgggggagggaagaggcctcctatctactcctctgccccagtcccctccttgcgtcagtcccagtgagggataagcgcctggcggaaggcgcagggaggtgtttctctgcttcaggagtgcccgccggcccttgcagctgctggaagacccatttatctcatgcttcttgttttctttggggacctgcaggggaaggaagcagggtgacggtttggtatccccacctaagaccctcccctttcccctgaggccagccgtcagcccctggcagggggtcttggaagccagaggtttttgctcagggcagggaaagggctgcaggatccccgggggctgccggaggtcggtctcactgacatcatggctgaccccagcatcgcctggtcccacagatgtcgccctctggtcgcctgtgtcttctcaccatcgttggcctgattctccccaccagaggacagacgttgaaagataccacgtccagttcttcagcagactcaactatcatggacattcaggtcccgacacgagccccagatgcagtctacacagaactccagcccacctctccaaccccaacctggcctgctgatgaaacaccacaaccccagacccagacccagcaactggaaggaacggatgggcctctagtgacagatccagagacacacaagagcaccaaagcagctcatcccactgatgacaccacgacgctctctgagagaccatccccaagcacagacgtccagacagacccccagaccctcaagccatctggttttcatgaggatgaccccttcttctatgatgaacacaccctccggaaacgggggctgttggtcgcagctgtgctgttcatcacaggcatcatcatcctcaccagtggcaagtgcaggcagctgtcccggttatgccggaatcgttgcaggtgagtccatcagaaacaggagctgacaacctgctgggcacccgaagaccaagccccctgccagctcaccgtgcccagcctcctgcatcccctcgaagagcctggccagagagggaagacacagatgatgaagctggagccagggctgccggtccgagtctcctacctcccccaaccctgcccgcccctgaaggctacctggcgccttgggggctgtccctcaagttatctcctctgctaagacaaaaagtaaagcactgtggtctttgcc

SEQ ID NO: 1142 - protein, 178 aa, Homo sapiens
MSPSGRLCLLTIVGLILPTRGQTLKDTTSSSSADSTIMDIQVPTRAPDAVYTELQPTSPTPTWPADETPQPQTQTQQLEGTDGPLVTDPETHKSTKAAHPTDDTTTLSERPSPSTDVQTDPQTLKPSGFHEDDPFFYDEHTLRKRGLLVAAVLFITGIIILTSGKCRQLSRLCRNRCR

SEQ ID NO: 1143 - DNA, 890 bp, Homo sapiens
ctggccacaccctccgcctggacgcagcagccaccgccgcgtccctctctccacgaggctgccggcttaggacccccagctccgacatgtcgccctctggtcgcctgtgtcttctcaccatcgttggcctgattctccccaccagaggacagacgttgaaagataccacgtccagttcttcagcagactcaactatcatggacattcaggtcccgacacgagccccagatgcagtctacacagaactccagcccacctctccaaccccaacctggcctgctgatgaaacaccacaaccccagacccagacccagcaactggaaggaacggatgggcctctagtgacagatccagagacacacaagagcaccaaagcagctcatcccactgatgacaccacgacgctctctgagagaccatccccaagcacagacgtccagacagacccccagaccctcaagccatctggttttcatgaggatgaccccttcttctatgatgaacacaccctccggaaacgggggctgttggtcgcagctgtgctgttcatcacaggcatcatcatcctcaccagtggcaagtgcaggcagctgtcccggttatgccggaatcgttgcaggtgagtccatcagaaacaggagctgacaacctgctgggcacccgaagaccaagccccctgccagctcaccgtgcccagcctcctgcatcccctcgaagagcctggccagagagggaagacacagatgatgaagctggagccagggctgccggtccgagtctcctacctcccccaaccctgcccgcccctgaaggctacctggcgccttgggggctgtccctcaagttatctcctctgctaagacaaaaagtaaagcactgtggtctttgcc

SEQ ID NO: 1144 - protein, 178 aa, Homo sapiens; identical to SEQ ID NO: 1142

SEQ ID NO: 1145 - DNA, 11127 bp, Homo sapiens
gggctggctgagcgcgggcgagtgtgagcgcgagtgtgcgcacgccgcgggagcctctctgccctctcctcgcaccctgctcagggcatctgaagagcctggaaacgtgaacaggcttgaagtatggcatgttgcaaagatggtttctgccaagaaggtacccgcgatcgctctgtccgccggggtcagtttcgccctcctgcgcttcctgtgcctggcggtttgtttaaacgaatccccaggacagaaccaaaaggaggagaaattgtgcacagaaaatttcacccgcatcctggacagtttgctcgatggttatgacaacaggctgcgtcctggatttgggggtcctgttacagaagtgaaaactgacatatatgtcaccagctttggacctgtttctgatgttgaaatggaatacacaatggatgtgttcttcaggcagacatggattgacaaaagattaaaatatgacggccccattgaaattttgagattgaacaatatgatggtaacgaaagtgtggacccctgatactttcttcaggaatggaaagaaatctgtctcacataatatgacagctccaaataagctttttagaattatgagaaatggtactattttatacacaatgagactcaccataagtgcggagtgtcccatgagattggtggattttcccatggatggtcatgcatgccctttgaaattcgggagttatgcctatccaaagagtgagatgatctatacctggacaaaaggtcctgagaaatcagttgaagttccgaaggagtcttccagcttagttcaatatgatttgattgggcaaaccgtatcaagtgaaaccatcaaatcaattacgggtgaatatattgttatgacggtttacttccacctcagacggaagatgggttattttatgattcagacctatattccgtgcattatgacagtgattctttctcaagtttcattttggataaataaagaatcagttcccgctaggactgtatttggaataacaactgtcctcaccatgaccacactaagcatcagtgcacgacattctttgcccaaagtgtcctatgctaccgccatggactggttcatagctgtctgctttgcttttgtattttcggcccttatcgagtttgctgctgtcaactatttcaccaatattcaaatggaaaaagccaaaaggaagacatcaaagccccctcaggaagttcccgctgctccagtgcagagagagaagcatcctgaagcccctctgcagaatacaaatgccaatttgaacatgagaaaaagaacaaatgctttggttcactctgaatctgatgttggcaacagaactgaggtgggaaaccattcaagcaaatcttccacagttgttcaagaatcttctaaaggcacacctcggtcttacttagcttccagtccaaacccattcagccgtgcaaatgcagctgaaaccatatctgcagcaagagcacttccatctgcttctcctacttctatccgaactggatatatgcctcgaaaggcttcagttggatctgcttctactcgtcacgtgtttggatcaagactgcagaggataaagaccacagttaataccataggggctactgggaagttgtcagctactcctcctccatcggctccaccaccttctggatctggcacaagtaaaatagacaaatatgcccgtattctctttccagtcacatttggggcatttaacatggtttattgggttgtttatttatctaaggacactatggagaaatcagaaagtctaatgtaatttcgttgctatagtagtttgctaaaagatgatgaaaatgcagaatgtctttttaaatgtttttaaatataaacaaatattctttactaaaataaaaactctgtgtaatttttccatttaaagatataagccagttattgggagagttaattaattcctgagtgaaaaagtgaactatgttttttttcagaaaaattattttaaaagaactcagcattcagttagatagaatacacaccatcctggaaagttgggataagagaaatagagctattagagacaagtggcgcatattttttcattgatatttgaaaacagactatgacattttaaaaatctgccctatgagtatcaacctgccaccctaaatttcccagtggcactacccttaaccagaattgtttattagatgtcatatgcagtgacctttggtgatcttcttaggaacttcaagaaaaggaattttcctgttaaattaaacattggcaaaaggaaatggaatagtataaacactgatcaatagagtaaaatatctgctgcataaaaaactaagacaaagaccagaggaaatatcttccctttcttatgttggctaaacagtacttaacagttgacttgaaattttgttctctgagccaaagtttaactcattgtatgaattctttttcatggtagttcattcagttatgtgtttatttactacatagttattcagagcctactgtgttccaggaactatgctagaaactgtctctctaggaaagctcttgcacctttatctacaatattacttaaaaagtagaacagtcaatgcatgccaaagaaccataaactagcagaggacattgcattctttagtgaaggacatttatttagagtctgacaacatattcaaaatatttttcagcctctactgatagtggataacaaatatatttgttcacataaccactttgatgtcagtacaacttcagcaattggttttcaaaatagatgagaatatggtacagattgttctataagtgaaaagcattatgtacttgaaagtaaaaatcagggcaatataagacttaatagattaactgtcgcaaatttgatcagagtcacagagtagaatttgatcagaatcacagaatcatcagacataggaactgagcacaggctttttcaggtgctttccccaagatagatctagatattagctagtgaaatgctaaattttgaagagttttgtgtccgtagttctgtaattctgggcagtcatcatgttggtttttttgggagtttttttaaggtttaataactaaggggaatattttaaaattaagagagcagcaaatgaaaggagtaaagaaaaaaatagctgtcgggtaggatgccactgactctgctatgtgatttatcagggttttcatctactgacttctttctcattaggtaggcttaacaacttacttgagaattttgcaactgtctatgcagctgaatctaagtatggttttttgtcatattgcctctagattttcttctgtgcttctctctatctgctctggaatggatgagtgaatgtgttctgggtgttttagggaacatattgatagaaatgaccaccttgcagacaaaatctctctctctctttttgtttttatagaaaagaagtgatagtagttaattggcatcgatttttcagatattgcactaccttataatggttgtttttgatacctgaaaattgtgcaaatgccaaatattaattgtaagtcatatctgagaaatcattcttggctgtctttctaggtattccatagaatcaacacattttaaggctgaaagatactgtcgaaatcacccagtcccaaccccccaatttaaaattgattctagtaaaattaggtccagtaacacctgtatatatgtatatatttaataaagagtacttgtacaaaaaagcttatcataaattatttcatgaatgtgaatagatttctggccttgaggacgatgtttggaaatatggttggaagcacaattcattcgctactagttattcagagcgtactttgttccaggaactatgctggaaactgatagttcactattctgatgaaaaggctggttttgttgttgttgttgttgttgttgttgttgtttttggtgaggaactcttactctttgctaatctattggcctatcttaagaaataattatttggttattcattggcttcctttaaaaaaaagtgttcttctacaaatcttacagagtgtaaagagataaaaagaaatgattttttttcttacctttacatatgaaggtttaaaaatacatcatgtggccaaagaatgagaaaggacagaattaaccaaggattcttaattgttaatttgaagaacacattaaccagaaagcttaaacattattattaaaataaattatttcatttgcacacaatgataataatgatgataataataataataataataataataataataataataataatatgttgtttgctttccttaactgaatttcatcaaattcattcagtgatttttattttggtcattatttctatcttcccaataacccagaggtacatcaagtaaaaacacttttgcaaagagccagtcacttttccctcttagaaaatctcagaagaatgattaggggcacccaaagttctggttatctatgaataataatgaataattttggctgagaatggtacctttatataactcttttaaagatgaaattcagaataattttattcaggacctagtatctgcagtccatgttggccactaactgctacataattactttcaatttcctccaggcatgactaggtataaacatatatttacatgattaatccacattttaaaatgacttgcacttgtgcatatacatagtactttgaataatgtatattttaaattggacctcacaaatcttgtattaaagtaggtagagagtagagtcacactttttttgatgaaatgagtcacagagaagttacatgacaaagataaaatcacagggttggaaagaactttgaaaggtcatttttcaataatctcaccttaaaagtgaccccttttcaaacaaagcataaacaatttatttgtggcttattttacccatgagctggccaatacttcctggcctagaaaaatatctccactctccccattcctgttcttaatggtcttctcttctcaatttgtaaatattctccagtaaaagacaccaggtgtggagatgggtcacttaatttcaagttctgagtgtcttgtggttttaaacaagtctcttaacctctctaagactgattcctcatttataacagggaggaggtggattatgtaatatctaagagcttttcagttttaatactctctgattctcatagtaaatacaagcatactcttgtaagaaaaacactgaatactttgaaccacaaataagtgtttatggacaaaaatttagttctactgcttgattactttaagttcattgcttgcttcaaactaaggtttccctaccttcaaaaatatatataacatctctccatttagataaagtatattcttccccagggaagactgtattctttaaagacagtagaatattggctatttctcttttctgggatttcctgggcttttattcactaaatgggctcctgcccagtttgggtactgtgctgatttttagatatacagagataaaaatagcccctttccttgcaggtagtcacagtccggaagagatgatagatgcatagacaaaaaattatgggatgtaactaatgcttcagtagaatacagcagggccaaaactagagtgatactcatctcaggcacaaatatatatggggacatcaaaacttcaataatcaagatacctaatatttaagtgaatatttttaaaactcaaaattaatgcaaaagatttatgatgaacagaatatacaaattttaaataaattaatagaatcagtagtaataatattttcttctgcctcaggctccaaaattgctcagcatagcactgatctagatagaggtggataaaagatccacataacttaattacattgttgaaggagaggaacaagagtgatagcagagaaggtttcacagatataatcttaagctaaattttatagaatgatttggagttcttatagcctccattcccacttccacaaacaaacaaaaaaatgaaagcgcaattttatcagcacctgaggcaggagaagagatgaggatgtggaaagtcaaggggaactcttactacaaattcttagttctgtgtttggaggtaagggtgaatgcagggaagtgagagttgttgatgttggaaagacctaaagagcctggattaggaagagttttgtgtaaattactgaaggaatggaatttgatcaggattagtggcaatttattaaaaatcttgaagaataatacgatgaaaactaacatccttatttttctgttttagagaaagcacctgattattgtgtgaactatggtttggagggccacaaatctagaggtagtggaacagttgagatctcttattttttctttcctgtcttaaactttgccttctattccttttttctttttttgaccgcaatgacttcattgtcatttgtaaaagtgatacatgactgttaaagatagacattgtagaaacttaaaaacaatctcaaaattctaccacccagaaatcagaaatattttgtatttggatatgtttgtctagaagagtagattgcttgattaaaagacagagttttataaatgtagaagccaatatgacatacatgctgccattaaataataaaaaattaaattgacttttatctcaagataagattaaaattggagggtaaaactgaagaaattgttgaaatttggatggtgcttctttaaagcaagagatttagagagtcagagctttttatcccaggtttcaatctttatttcaggaaaattttctgcaattttgtctaagttaattttttttttttaagaaatgccaattatgtcaaatcccttttgtctctatacaatagtccccaactgttttggcaacaggcacgggtgagggtgggggaatggttttcagatgaaattgttccatctcagatcatcaggcattagtcgattctcataaggagcggacaaccttgcatgccctcctatgagaatctaatgccgccgctaatctgacaggaggcagagctcaggcgataatgctcaatgggtgccactcacctcctgttgtgctgcccaattcctaacaggtcatggataagtactggtcagtggcccaggggttggggaccactgctctgtaactatttacagtattctttgtaactactttggtatctttaaaattttctttaacttttgtcaaccataaccctagtgagttttcagttgtgattattctattttgtaacttccaatgtacttttcaacttcataatggttaattttgttttccattgctttcttggtcactgtcatttcatttttcttctctttctctatttttaccattgctttattgaaatatcttctttgagcttctcatgtttctctattaatgagatcatgtctataatattttttgagactacagagacctatttatataaactcttcctctatttcttgaaaaagtttttatctggcgtgagcttcatctgctttttcattgaggttttatctcccttgcctatttttggggctggtttctttctattaatcactgagcagagccagctatttactgaactacagtgtgggaagtggtgggagggtgagtcagatcagcccacagaagctatttaaatttcaggtttcaagcccacctccccaaaaccgttttatgtgttttttcttctgcccaggcaccatatttttatatctatttttgacatttgggcggcctatgtagttcacagtgtaaaactctctgttttactttctttatgttattgctagtgattattgcttgtagtcccacccccttccccacattagccttagtattctatattattcagcaagcttgttcacaactctcaaatatagtctatcagaatttttatctttacctctacattccactattcggaagtatatagtaaaatcgtatgaagacagattttgtctttttcttgcctgtttacactctatcttacagaggtttcaaacaaaccatctttgtttgaaacatcgcaggataatgatacttattgaaatctacatcctgcccaagatatatgccagtcaatttcctttctcctattagtgcaaatggctacctacttaaaagctgctgactatagtttgtcatcaattacttgttaattacagatatggttttcatttttttttctcaatttttcattatgttatttttggagactgtcttaggtggggagtgaattataaatatttttatttcaccacctttaactgagtcaccatatgttatttgcacttccaatagaccagggattgaccagagtatcttttactgatatgaccaccagagctacatggcttttaccttctgtatatcagatgtcactggaatcaagcattaaacctagattaaatctggattaaaccagctgtatggcaccttagaaaattgagaaggactaggaagctgatagaaagaactcctgtataaaaaataaattctttttacattttccttggtagtatttctgcaagcttctttagtttctataggggaatcccagagttttcctctgagattgcttccctttcctttgtattttcatttttccctcttgggctttacttttcagtcgtgtatttctatcccaatgttaatttattacactgtttatattttcctgtccttcaattcatcagtagattagtgaagtacttattcctttaattataagtataaacgtttttaatttctttttggataacgatacatttaatggaaaatttttaaatgctatggtttcttaatagcttttctctaccactaattacttccgttaaaaaaaaaaagaaatacccatgcgtaatataaaagaaattttgaataaaatgttatcctttccttttactagagacaaacatctccacttcaaaatggaaaaatggaactatgcaaaggaaatttacgatattcaagagtatgatattatcactgaaccgattaatttaattgaaaatactaacctgcaaaaaagaattacacaaatgtatttgaaatgtcatcagatacctcaagctatgacagagttgattatgttacacaagtagtaaaggataaattaaatatattctatattaacactaagatttaaaactaattatagtcttctttaatttttctactgtatacatttcatctagttttcagtaaaacaaacttttcattacttttacttatcccatgcaaatctagttgctataagatataacctaatttggaaatacctccctgtaatacattggaattttggtgtgagtgtgtgtgatcagagaggataaacaaatggtgtcagcaaaatagaatgtaaaatatggagataatgtggatttacacaatttgataaaaattctcccttgaattttgcagatcatatatgaatatcatcatgtgaagtgcaattaggattttttcatatattaatacatatacatcatctctttaataaaatattttgctgaactcgtttaatatttctcatgtctcatatttcatattttctcatatgtctcatattttatattttctcatatgtgtctcatttttattattactatagtatccattaaaggagactggcaaatacctgaacaaagttatgttgttggcaatataagatattaccaattgcataatattatttccaaaggcaaattaatatgcaaactatagatttccatgggtatctatacaaattattacttgaagtccatagaaaacagcttccttagagggaagtaaaagaagctctgataacagacaatgtatagcatttcagttaaagtttgattgacatatttttttctcagtcttttatacttgtgaattatagtctacattttgtctttacagatgttgctaacacagtgcagcatgttggcttgtcattttactgattatgtatattgtctcctagttcaagtatacagtaaatcagagctttcatttttcaaggggcagaaaaataattgttggttgataaggtaaggttatatgattttgagggagcttcattgtaaattgaatgagaatccggttttcatgcaaaggtgtatctatgcgataatactttgaatgtctgtagtttgaaatagaaggttaattttttccactggcttatccttaatgaaggaaatcccctgataattactttgattctgaaaatgttgaaaactccagaagaaataaagcttttctttgatttctcagctgaagtgttgtacaaactgaggaatatgaagtccattcccttctttcttctcttgaataattttaaaattgtttgtttagttgtacaattgaaaatattccttattatagaagtaaaaaaacaataatgcatatttcctcatatcataaaaactaaatttgttatcatctgagcttcaatattcttgctcaattagaatagtaaatataaagtgtgatatttataacagttcaaggtttgataggagatagaggtgttttgattttatgggaaaattacttcctcaagaacacatttcttgaggttttagtaatcacatttgactccctgaaattggcaattttattcaatgtaggaatattatcatggtatattatagtgaggagcacatagtcattattattttgtttttgcaaatttattttgaaaaaaaggagcattatcaaatattggtttactattttaaagtaattcatcaggaaatgattttttaaacactgtccctttaagtaaatgtcccttgcttttcaaagctcaacttattacttatggtaatagagttactttgcttcttaaaacaaagtttatactagagcatagcattgtagaattattcaggtctcaatttctcactggaaaatgagtctttaaaatagtaaggatttaaatttctataaaatttaatcacagatacttatattttaagataaatgtgttggagctaaactctggaattattaaaatataaaacattatatccctctaatgtattttttctatttaaatttaaaacaataaacataaatatctttgg

SEQ ID NO: 1146 - protein, 554 aa, Homo sapiens [sequence omitted]

SEQ ID NO: 1147 - DNA, 1714 bp, Homo sapiens
tcatcaacatgcattcccagaaatgccatgaaaggaaagaccaagtcttgactgagaaacggaccgggcagatgagggactcccacatatacctgtttcctgctcttcccgaagacattttgccacaagcatataattcagcttctgaaaaatacggtcttcctcactgcagacaccatgccagcgttttaaatcaagttggctactcgtgctgtttagagtatgcagtttgcctgtggcaatattaaactcatctggaagaaagcacttaaacctatccagttcctcatcggtgatgttatccaggctggttagcaagagtatctccttatatttactctccatctcacgacttttcagcttataagggatccaaactatgtaagattataccaccaaaagtgattcaacattcaaaatgaagcaagatacttcattttcttagcgtttctggagattacaacatcctgcggttccgtttctgggaactttactgatttatctcccccctcacacaaataagcattgattcctgcatttctgaagatctcaagatctggactactgttgaaaaaatttccagtgaggctcacttatgtctgtaaagatgggaaaaaaatacaagaacattgttctactaaaaggattagaggtcatcaatgattatcattttagaatggttaagtccttactgagcaacgatttaaaacttaatttaaaaatgagagaagagtatgacaaaattcagattgctgacttgatggaagaaaagttccgaggtgatgctggtttgggcaaactaataaaaattttcgaagatataccaacgcttgaagacctggctgaaactcttaaaaaagaaaagttaaaagtaaaaggaccagccctatcaagaaagaggaagaaggaagtggatgctacttcacctgcaccctccacaagcagcactgtcaaaactgaaggagcagaggcaactcctggagctcagaaaagaaaaaaatcaaccaaagaaaaggctggacccaaagggagtaaggtgtccgaggaacagactcagcctccctctcctgcaggagccggcatgtccacagccatgggccgttccccatctcccaagacctcattgtcagctccacccaacagttcttcaactgagaacccgaaaacagtggccaaatgtcaggtaactcccagaagaaatgttctccaaaaacgcccagtgatagtgaaggtactgagtacaacaaagccatttgaatatgagaccccagaaatggagaaaaaaataatgtttcatgctacagtggctacacagacacagttcttccatgtgaaggttttaaacaccagcttgaaggagaaattcaatggaaagaaaatcatcatcatatcagattatttggaatatgatagtctcctagaggtcaatgaagaatctactgtatctgaagctggtcctaaccaaacgtttgaggttccaaataaaatcatcaacagagcaaaggaaactctgaagattgatattcttcacaaacaagcttcaggaaatattgtatatggggtatttatgctacataagaaaacagtaaatcagaagaccacaatctacgaaattcaggatgatagaggaaaaatggatgtagtggggacaggacaatgtcacaatatcccctgtgaagaaggagataagctccaacttttctgctttcgactt

SEQ ID NO: 1148 - protein, 373 aa, Homo sapiens
MSVKMGKKYKNIVLLKGLEVINDYHFRMVKSLLSNDLKLNLKMREEYDKIQIADLMEEKFRGDAGLGKLIKIFEDIPTLEDLAETLKKEKLKVKGPALSRKRKKEVDATSPAPSTSSTVKTEGAEATPGAQKRKKSTKEKAGPKGSKVSEEQTQPPSPAGAGMSTAMGRSPSPKTSLSAPPNSSSTENPKTVAKCQVTPRRNVLQKRPVIVKVLSTTKPFEYETPEMEKKIMFHATVATQTQFFHVKVLNTSLKEKFNGKKIIIISDYLEYDSLLEVNEESTVSEAGPNQTFEVPNKIINRAKETLKIDILHKQASGNIVYGVFMLHKKTVNQKTTIYEIQDDRGKMDVVGTGQCHNIPCEEGDKLQLFCFRL

SEQ ID NO: 1149 - DNA, 2701 bp, Homo sapiens
ggcaatagcagaataggagcaagccagcactagtcagctaactaagtgactcaaccaaggccttttttccttgttatctttgcagatacttcattttcttagcgtttctggagattacaacatcctgcggttccgtttctgggaactttactgatttatctcccccctcacacaaataagcattgattcctgcatttctgaagatctcaagatctggactactgttgaaaaaatttccagtgaggctcacttatgtctgtaaagatgggaaaaaaatacaagaacattgttctactaaaaggattagaggtcatcaatgattatcattttagaatggttaagtccttactgagcaacgatttaaaacttaatttaaaaatgagagaagagtatgacaaaattcagattgctgacttgatggaagaaaagttccgaggtgatgctggtttgggcaaactaataaaaattttcgaagatataccaacgcttgaagacctggctgaaactcttaaaaaagaaaagttaaaagtaaaaggaccagccctatcaagaaagaggaagaaggaagtggatgctacttcacctgcaccctccacaagcagcactgtcaaaactgaaggagcagaggcaactcctggagctcagaaaagaaaaaaatcaaccaaagaaaaggctggacccaaagggagtaaggtgtccgaggaacagactcagcctccctctcctgcaggagccggcatgtccacagccatgggccgttccccatctcccaagacctcattgtcagctccacccaacagttcttcaactgagaacccgaaaacagtggccaaatgtcaggtaactcccagaagaaatgttctccaaaaacgcccagtgatagtgaaggtactgagtacaacaaagccatttgaatatgagaccccagaaatggagaaaaaaataatgtttcatgctacagtggctacacagacacagttcttccatgtgaaggttttaaacaccagcttgaaggagaaattcaatggaaagaaaatcatcatcatatcagattatttggaatatgatagtctcctagaggtcaatgaagaatctactgtatctgaagctggtcctaaccaaacgtttgaggttccaaataaaatcatcaacagagcaaaggaaactctgaagattgatattcttcacaaacaagcttcaggaaatattgtatatggggtatttatgctacataagaaaacagtaaatcagaagaccacaatctacgaaattcaggatgatagaggaaaaatggatgtagtggggacaggacaatgtcacaatatcccctgtgaagaaggagataagctccaacttttctgctttcgacttagaaaaaagaaccagatgtcaaaactgatttcagaaatgcatagttttatccagataaagaaaaaaacaaacccgagaaacaatgaccccaagagcatgaagctaccccaggaacagcgtcagcttccatatccttcagaggccagcacaaccttccctgagagccatcttcggactcctcagatgccaccaacaactccatccagcagtttcttcaccaagaaaagtgaagacacaatctccaaaatgaatgacttcatgaggatgcagatactgaaggaagggagtcattttccaggaccgttcatgaccagcataggcccagctgagagccatccccacactcctcagatgcctccatcaacaccaagcagcagtttcttaaccacgttgaaaccaagactgaagactgaacctgaagaagtttccatagaagacagtgcccagagtgacctcaaagaagtgatggtgctgaacgcaacagaatcatttgtatatgagcccaaagagcagaagaaaatgtttcatgccacagtggcaactgagaatgaagtcttccgagtgaaggtttttaatattgacctaaaggagaagttcaccccaaagaagatcattgccatagcaaattatgtttgccgcaatgggttcctggaggtatatcctttcacacttgtggctgatgtgaatgctgaccgaaacatggagatcccaaaaggattgattagaagtgccagcgtaactcctaaaatcaatcagctttgctcacaaactaaaggaagttttgtgaatggggtgtttgaggtacataagaaaaatgtaaggggtgaattcacttattatgaaatacaagataatacagggaagatggaagtggtggtgcatggacgactgaccacaatcaactgtgaggaaggagataaactgaaactcacctgctttgaattggcaccgaaaagtgggaataccggggagttgagatctgtaattcatagtcacatcaaggtcatcaagaccaggaaaaacaagaaagacatactcaatcctgattcaagtatggaaacttcaccagactttttcttctaaaatctggatgtcattgacgataatgtttatggagataaggtctaagtgcctaaaaaaatgtacatatacctggttgaaatacaacactatacatacacaccaccatatatactagctgttaatcctatggaatggggtattgggagtgcttttttaatttttcatagtttttttttaataaaatggcatattttgcatctacaacttctataatttgaaaaaataaataaacattatcttttttgtg

SEQ ID NO: 1150 - protein, 729 aa, Homo sapiens
MGKKYKNIVLLKGLEVINDYHFRMVKSLLSNDLKLNLKMREEYDKIQIADLMEEKFRGDAGLGKLIKIFEDIPTLEDLAETLKKEKLKVKGPALSRKRKKEVDATSPAPSTSSTVKTEGAEATPGAQKRKKSTKEKAGPKGSKVSEEQTQPPSPAGAGMSTAMGRSPSPKTSLSAPPNSSSTENPKTVAKCQVTPRRNVLQKRPVIVKVLSTTKPFEYETPEMEKKIMFHATVATQTQFFHVKVLNTSLKEKFNGKKIIIISDYLEYDSLLEVNEESTVSEAGPNQTFEVPNKIINRAKETLKIDILHKQASGNIVYGVFMLHKKTVNQKTTIYEIQDDRGKMDVVGTGQCHNIPCEEGDKLQLFCFRLRKKNQMSKLISEMHSFIQIKKKTNPRNNDPKSMKLPQEQRQLPYPSEASTTFPESHLRTPQMPPTTPSSSFFTKKSEDTISKMNDFMRMQILKEGSHFPGPFMTSIGPAESHPHTPQMPPSTPSSSFLTTLKPRLKTEPEEVSIEDSAQSDLKEVMVLNATESFVYEPKEQKKMFHATVATENEVFRVKVFNIDLKEKFTPKKIIAIANYVCRNGFLEVYPFTLVADVNADRNMEIPKGLIRSASVTPKINQLCSQTKGSFVNGVFEVHKKNVRGEFTYYEIQDNTGKMEVVVHGRLTTINCEEGDKLKLTCFELAPKSGNTGELRSVIHSHIKVIKTRKNKKDILNPDSSMETSPDFFF

SEQ ID NO: 1151 - DNA, 2701 bp, Homo sapiens; identical to SEQ ID NO: 1149

SEQ ID NO: 1152 - protein, 729 aa, Homo sapiens; identical to SEQ ID NO: 1150

SEQ ID NO: 1153 - DNA, 2869 bp, Homo sapiens
ggcaatagcagaataggagcaagccagcactagtcagctaactaagtgactcaaccaaggccttttttccttgttatctttgcagatacttcattttcttagcgtttctggagattacaacatcctgcggttccgtttctgggaactttactgatttatctcccccctcacacaaataagcattgattcctgcatttctgaagatctcaagatctggactactgttgaaaaaatttccagtgaggctcacttatgtctgtaaagatgggaaaaaaatacaagaacattgttctactaaaaggattagaggtcatcaatgattatcattttagaatggttaagtccttactgagcaacgatttaaaacttaatttaaaaatgagagaagagtatgacaaaattcagattgctgacttgatggaagaaaagttccgaggtgatgctggtttgggcaaactaataaaaattttcgaagatataccaacgcttgaagacctggctgaaactcttaaaaaagaaaagttaaaagtaaaaggaccagccctatcaagaaagaggaagaaggaagtggatgctacttcacctgcaccctccacaagcagcactgtcaaaactgaaggagcagaggcaactcctggagctcagaaaagaaaaaaatcaaccaaagaaaaggctggacccaaagggagtaaggtgtccgaggaacagactcagcctccctctcctgcaggagccggcatgtccacagccatgggccgttccccatctcccaagacctcattgtcagctccacccaacagttcttcaactgagaacccgaaaacagtggccaaatgtcaggtaactcccagaagaaatgttctccaaaaacgcccagtgatagtgaaggtactgagtacaacaaagccatttgaatatgagaccccagaaatggagaaaaaaataatgtttcatgctacagtggctacacagacacagttcttccatgtgaaggttttaaacaccagcttgaaggagaaattcaatggaaagaaaatcatcatcatatcagattatttggaatatgatagtctcctagaggtcaatgaagaatctactgtatctgaagctggtcctaaccaaacgtttgaggttccaaataaaatcatcaacagagcaaaggaaactctgaagattgatattcttcacaaacaagcttcaggaaatattgtatatggggtatttatgctacataagaaaacagtaaatcagaagaccacaatctacgaaattcaggatgatagaggaaaaatggatgtagtggggacaggacaatgtcacaatatcccctgtgaagaaggagataagctccaacttttctgctttcgacttagaaaaaagaaccagatgtcaaaactgatttcagaaatgcatagttttatccagataaagaaaaaaacaaacccgagaaacaatgaccccaagagcatgaagctaccccaggaacagcgtcagcttccatatccttcagaggccagcacaaccttccctgagagccatcttcggactcctcagatgccaccaacaactccatccagcagtttcttcaccaagaaaagtgaagacacaatctccaaaatgaatgacttcatgaggatgcagatactgaaggaagggagtcattttccaggaccgttcatgaccagcataggcccagctgagagccatccccacactcctcagatgcctccatcaacaccaagcagcagtttcttaaccacgaaaagtgaagacacaatctccaaaatgaatgacttcatgaggatgcagatactgaaggaagggagtcattttccaggaccgttcatgaccagcataggcccagctgagagccatccccacactcctcagatgcctccatcaacaccaagcagcagtttcttaaccacgttgaaaccaagactgaagactgaacctgaagaagtttccatagaagacagtgcccagagtgacctcaaagaagtgatggtgctgaacgcaacagaatcatttgtatatgagcccaaagagcagaagaaaatgtttcatgccacagtggcaactgagaatgaagtcttccgagtgaaggtttttaatattgacctaaaggagaagttcaccccaaagaagatcattgccatagcaaattatgtttgccgcaatgggttcctggaggtatatcctttcacacttgtggctgatgtgaatgctgaccgaaacatggagatcccaaaaggattgattagaagtgccagcgtaactcctaaaatcaatcagctttgctcacaaactaaaggaagttttgtgaatggggtgtttgaggtacataagaaaaatgtaaggggtgaattcacttattatgaaatacaagataatacagggaagatggaagtggtggtgcatggacgactgaccacaatcaactgtgaggaaggagataaactgaaactcacctgctttgaattggcaccgaaaagtgggaataccggggagttgagatctgtaattcatagtcacatcaaggtcatcaagaccaggaaaaacaagaaagacatactcaatcctgattcaagtatggaaacttcaccagactttttcttctaaaatctggatgtcattgacgataatgtttatggagataaggtctaagtgcctaaaaaaatgtacatatacctggttgaaatacaacactatacatacacaccaccatatatactagctgttaatcctatggaatggggtattgggagtgcttttttaatttttcatagtttttttttaataaaatggcatattttgcatctacaacttctataatttgaaaaaataaataaacattatcttttttgtg

SEQ ID NO: 1154 - protein, 785 aa, Homo sapiens
MGKKYKNIVLLKGLEVINDYHFRMVKSLLSNDLKLNLKMREEYDKIQIADLMEEKFRGDAGLGKLIKIFEDIPTLEDLAETLKKEKLKVKGPALSRKRKKEVDATSPAPSTSSTVKTEGAEATPGAQKRKKSTKEKAGPKGSKVSEEQTQPPSPAGAGMSTAMGRSPSPKTSLSAPPNSSSTENPKTVAKCQVTPRRNVLQKRPVIVKVLSTTKPFEYETPEMEKKIMFHATVATQTQFFHVKVLNTSLKEKFNGKKIIIISDYLEYDSLLEVNEESTVSEAGPNQTFEVPNKIINRAKETLKIDILHKQASGNIVYGVFMLHKKTVNQKTTIYEIQDDRGKMDVVGTGQCHNIPCEEGDKLQLFCFRLRKKNQMSKLISEMHSFIQIKKKTNPRNNDPKSMKLPQEQRQLPYPSEASTTFPESHLRTPQMPPTTPSSSFFTKKSEDTISKMNDFMRMQILKEGSHFPGPFMTSIGPAESHPHTPQMPPSTPSSSFLTTKSEDTISKMNDFMRMQILKEGSHFPGPFMTSIGPAESHPHTPQMPPSTPSSSFLTTLKPRLKTEPEEVSIEDSAQSDLKEVMVLNATESFVYEPKEQKKMFHATVATENEVFRVKVFNIDLKEKFTPKKIIAIANYVCRNGFLEVYPFTLVADVNADRNMEIPKGLIRSASVTPKINQLCSQTKGSFVNGVFEVHKKNVRGEFTYYEIQDNTGKMEVVVHGRLTTINCEEGDKLKLTCFELAPKSGNTGELRSVIHSHIKVIKTRKNKKDILNPDSSMETSPDFFF

SEQ ID NO: 1155 - DNA, 2022 bp, Homo sapiens
atgggaaaaaaatacaagaacattgttctactaaaaggattagaggtcatcaatgattatcattttagaatggttaagtccttactgagcaacgatttaaaacttaatttaaaaatgagagaagagtatgacaaaattcagattgctgacttgatggaagaaaagttccgaggtgatgctggtttgggcaaactaataaaaattttcgaagatataccaacgcttgaagacctggctgaaactcttaaaaaagaaaagttaaaagtaaaaggaccagccctatcaagaaagaggaagaaggaagtggatgctacttcacctgcaccctccacaagcagcactgtcaaaactgaaggagcagaggcaactcctggagctcagaaaagaaaaaaatcaaccaaagaaaaggctggacccaaagggagtaaggtgtccgaggaacagactcagcctccctctcctgcaggagccggcatgtccacagccatgggccgttccccatctcccaagacctcattgtcagctccacccaacagttcttcaactgagaacccgaaaacagtggccaaatgtcaggtaactcccagaagaaatgttctccaaaaacgcccagtgatagtgaaggtactgagtacaacaaagccatttgaatatgagaccccagaaatggagaaaaaaataatgtttcatgctacagtggctacacagacacagttcttccatgtgaaggttttaaacaccagcttgaaggagaaattcaatggaaagaaaatcatcatcatatcagattatttggaatatgatagtctcctagaggtcaatgaagaatctactgtatctgaagctggtcctaaccaaacgtttgaggttccaaataaaatcatcaacagagcaaaggaaactctgaagattgatattcttcacaaacaagcttcaggaaatattgtatatggggtatttatgctacataagaaaacagtaaatcagaagaccacaatctacgaaattcaggatgatagaggaaaaatggatgtagtggggacaggacaatgtcacaatatcccctgtgaagaaggagataagctccaacttttctgctttcgacttagaaaaaagaaccagatgtcaaaactgatttcagaaatgcatagttttatccagataaagaaaaaaacaaacccgagaaacaatgaccccaagagcatgaagctaccccaggaacagcgtcagcttccatatccttcagaggccagcacaaccttccctgagagccatcttcggactcctcagatgccaccaacaactccatccagcagtttcttcaccaagttgaaaccaagactgaagactgaacctgaagaagtttccatagaagacagtgcccagagtgacctcaaagaagtgatggtgctgaacgcaacagaatcatttgtatatgagcccaaagagcagaagaaaatgtttcatgccacagtggcaactgagaatgaagtcttccgagtgaaggtttttaatattgacctaaaggagaagttcaccccaaagaagatcattgccatagcaaattatgtttgccgcaatgggttcctggaggtatatcctttcacacttgtggctgatgtgaatgctgaccgaaacatggagatcccaaaaggattgattagaagtgccagcgtaactcctaaaatcaatcagctttgctcacaaactaaaggaagttttgtgaatggggtgtttgaggtacataagaaaaatgtaaggggtgaattcacttattatgaaatacaagataatacagggaagatggaagtggtggtgcatggacgactgaccacaatcaactgtgaggaaggagataaactgaaactcacctgctttgaattggcaccgaaaagtgggaataccggggagttgagatctgtaattcatagtcacatcaaggtcatcaagaccaggaaaaacaagaaagacatactcaatcctgattcaagtatggaaacttcaccagactttttcttctaa

SEQ ID NO: 1156 - protein, 673 aa, Homo sapiens
MGKKYKNIVLLKGLEVINDYHFRMVKSLLSNDLKLNLKMREEYDKIQIADLMEEKFRGDAGLGKLIKIFEDIPTLEDLAETLKKEKLKVKGPALSRKRKKEVDATSPAPSTSSTVKTEGAEATPGAQKRKKSTKEKAGPKGSKVSEEQTQPPSPAGAGMSTAMGRSPSPKTSLSAPPNSSSTENPKTVAKCQVTPRRNVLQKRPVIVKVLSTTKPFEYETPEMEKKIMFHATVATQTQFFHVKVLNTSLKEKFNGKKIIIISDYLEYDSLLEVNEESTVSEAGPNQTFEVPNKIINRAKETLKIDILHKQASGNIVYGVFMLHKKTVNQKTTIYEIQDDRGKMDVVGTGQCHNIPCEEGDKLQLFCFRLRKKNQMSKLISEMHSFIQIKKKTNPRNNDPKSMKLPQEQRQLPYPSEASTTFPESHLRTPQMPPTTPSSSFFTKLKPRLKTEPEEVSIEDSAQSDLKEVMVLNATESFVYEPKEQKKMFHATVATENEVFRVKVFNIDLKEKFTPKKIIAIANYVCRNGFLEVYPFTLVADVNADRNMEIPKGLIRSASVTPKINQLCSQTKGSFVNGVFEVHKKNVRGEFTYYEIQDNTGKMEVVVHGRLTTINCEEGDKLKLTCFELAPKSGNTGELRSVIHSHIKVIKTRKNKKDILNPDSSMETSPDFFF

SEQ ID NO: 1157 - DNA, 1236 bp, Homo sapiens
agtgctctatcttgttgccggaagtgggaagagagaaaggttgtgatggcggctatagctgcatccgaggtgctggtggacagcgcggaggaggggtccctcgctgcggcggcggagctggccgctcagaagcgcgaacagagactgcgcaaattccgggagctgcacctgatgcgggaatgtgcggcaagaggagaagactatgagaaagtgaagttgctggagatcagtgcagaagatgcagaaagatgggagaggaaaaagaagaggaaaaaccctgatctgggattttcagattatgctgctgcccagttacgccagtatcatcggttgaccaagcagatcaaacctgacatggaaacatatgagagactgagagaaaaacatggagaagagtttttcccaacatccaatagtcttcttcatggaacacatgtgccttccacagaggaaattgacaggatggtcatagatctggaaaaacagattgaaaaacgagacaaatatagccggagacgtccttataatgatgatgcagatatcgactacattaatgaaaggaatgccaaattcaacaagaaagctgaaagattctatgggaaatacacagctgaaattaaacagaatttggaaagaggaacagctgtctaatcccttcaagaactgtttatagaagcttgagaatggggtaaaaatttctgctagcaaaatcaagttctttttgaaattttatcagtaatccagaatttagtagtccatgccttctcactcagcatttagaaataaaaatgtggtttcttaaacgtatatcctttcatgtatatttccacatttttgtgcttggatataagatgtatttcttgtagtgaagttgttttgtaatctactttgtatacattctaattatattatttttctatgtattttaaatgtatatggctgtttaatctttgaagcattttgggcttaagattgccagcagcacacatcagatgcagtcattgttgctatcagtgtggaatttgatagagtctagactcgggccacttggagttgtgtactccaaagctaaggacagtgatgaggaagatggcagtggccaccggaggactggagcagtccctcctcatggcggcctgtgaccaaggtcggggaggagtggagctatccttccatgatctgatcatgtacagttccctttttaaaaagcaataaatgcttgggattagaatttct

SEQ ID NO: 1158 - protein, 201 aa, Homo sapiens
MAAIAASEVLVDSAEEGSLAAAAELAAQKREQRLRKFRELHLMRECAARGEDYEKVKLLEISAEDAERWERKKKRKNPDLGFSDYAAAQLRQYHRLTKQIKPDMETYERLREKHGEEFFPTSNSLLHGTHVPSTEEIDRMVIDLEKQIEKRDKYSRRRPYNDDADIDYINERNAKFNKKAERFYGKYTAEIKQNLERGTAV

SEQ ID NO: 1159 - DNA, 1361 bp, Homo sapiens
gtgctctatcttgttgccggaagtgggaagagagaaaggttgtgatggcggctatagctgcatccgaggtgctggtggacagcgcggaggaggggtccctcgctgcggcggcggagctggccgctcagaagcgcgaacagagactgcgcaaattccgggagctgcacctgatgcggaatgaagctcgtaaattaaatcaccaggaagttgtggaagaagataaaagactaaaattacctgcaaattgggaagccaaaaaagctcgtttggagtgggaactaaaggaagaggaaaagaaaaaggaatgtgcggcaagaggagaagactatgagaaagtgaagttgctggagatcagtgcagaagatgcagaaagatgggagaggaaaaagaagaggaaaaaccctgatctgggattttcagattatgctgctgcccagttacgccagtatcatcggttgaccaagcagatcaaacctgacatggaaacatatgagagactgagagaaaaacatggagaagagtttttcccaacatccaatagtcttcttcatggaacacatgtgccttccacagaggaaattgacaggatggtcatagatctggaaaaacagattgaaaaacgagacaaatatagccggagacgtccttataatgatgatgcagatatcgactacattaatgaaaggaatgccaaattcaacaagaaagctgaaagattctatgggaaatacacagctgaaattaaacagaatttggaaagaggaacagctgtctaatcccttcaagaactgtttatagaagcttgagaatggggtaaaaatttctgctagcaaaatcaagttctttttgaaattttatcagtaatccagaatttagtagtccatgccttctcactcagcatttagaaataaaaatgtggtttcttaaacgtatatcctttcatgtatatttccacatttttgtgcttggatataagatgtatttcttgtagtgaagttgttttgtaatctactttgtatacattctaattatattatttttctatgtattttaaatgtatatggctgtttaatctttgaagcattttgggcttaagattgccagcagcacacatcagatgcagtcattgttgctatcagtgtggaatttgatagagtctagactcgggccacttggagttgtgtactccaaagctaaggacagtgatgaggaagatggcagtggccaccggaggactggagcagtccctcctcatggcggcctgtgaccaaggtcggggaggagtggagctatccttccatgatctgatcatgtacagttccctttttaaaaagcaataaatgcttgggattagaatttct

SEQ ID NO: 1160 - protein, 243 aa, Homo sapiens
MAAIAASEVLVDSAEEGSLAAAAELAAQKREQRLRKFRELHLMRNEARKLNHQEVVEEDKRLKLPANWEAKKARLEWELKEEEKKKECAARGEDYEKVKLLEISAEDAERWERKKKRKNPDLGFSDYAAAQLRQYHRLTKQIKPDMETYERLREKHGEEFFPTSNSLLHGTHVPSTEEIDRMVIDLEKQIEKRDKYSRRRPYNDDADIDYINERNAKFNKKAERFYGKYTAEIKQNLERGTAV

SEQ ID NO: 1161 - DNA, 3003 bp, Homo sapiens
aattagttgccattcggagtgaggagtgggtagaagcggcggcggcggcggcggcgtttgcggtggcgcggactccgaggagcgccagcacctcgaggccctttctctctaccctggtccccagaagcaggggtcccggccctccttgcagctgccgggttctcccgtgcgtgcagccctgcgagggctgaggagaaggctgcgagcggccctcggggctgcgtgatccgggccgttgccctgtcagcacgatgcctggagcggtggcggcggcggctccgggctccttgcggccccggccgtgaccgccacaccgagcccagccgggcggttgcggccgttggacgtttgttttcgcagccttcccctcccccctcgccgaggcggcgggggtgtgcgttggggagggggagccccgagactcctcccccacagcgatacccccgcccctcccccttacacactcgcacgcactatcgcgccggctcccacacgctcgcgcgcctcccgccccgcgcctccgtgtcggccggcggcgtccagggcccgcagagccaccatgtccactgcctcctcctcctcctcctccagttcctctcagacccctcatcccccgtcgcagaggatgaggcgcagcgccgcggggtccccgcccgccgtcgccgccgccgggagcgggaacggtgcgggcggcggcggcggcgtgggctgcgccccggctgcgggagccggccggctgctgcagcccatccgcgccacggtgccctaccagctcttgcggggcagccagcacagtcccacgcgtccgcccgtcgccgctgccgccgcctcgctgggcagcctcccggggcccggcgcggcccgcggccccagcccgtccagcccgacgccgccggcggccgcagccccggccgagcaggcgccgcgggccaagggccgcccgagacggtccccagagagccaccggaggagcagctcacctgagagacggagccccggctcgcccgtgtgcagagcggacaaggcaaaatctcagcaagttcggacctctagtacaataaggcgaacctcctctttggatacaataacaggaccttacctcacaggacagtggccacgggatcctcatgttcactacccttcatgcatgaaagacaaagctactcagacacctagctgttgggcagaagagggtgcagaaaagaggtcacatcagcgttctgcgtcatgggggagtgctgatcaactaaaagagcagatcgccaaactgaggcagcaactacaacgcagtaaacagagtagtcgtcacagtaaggagaaagatcgccagtcacctcttcatggcaaccatataacaatcagtcacactcaggctactggatcaaggtcagttcctatgccactgtcaaatatatcagtgccaaaatcatctgtttcgcgtgtgccctgcaatgtagaaggaataagtcctgaattagaaaaggtattcattaaagaaaataatgggaaggaagaagtatccaagccgttggacataccagatggtcgaagagctccacttcctgctcattaccggagcagtagtactcgcagcattgacactcagactccttctgtccaggagcgcagcagtagctgcagcagtcattcaccctgtgtctcccctttttgtcccccggaatcccaggatggtagcccttgctcaacagaagatttgctctatgatcgtgataaagacagtgggagtagctcaccgttacccaagtatgcttcatctcccaaaccaaacaacagctacatgttcaaacgggagcccccagagggatgtgagcgagtgaaggtctttgaggaaatggcgtctcgtcagcctatctcggcccctctcttttcatgtcctgacaaaaacaaggttaatttcatcccaaccggatcagctttctgtcctgtaaaacttctaggccccctcttacctgcttctgaccttatgctcaagaactcccctaactctggccagagctcagctttggcaactctgaccgttgagcagctctcatcccgggtttcctttacgtctctttctgatgacaccagcacagcgggctccatggaggcctctgtccagcagccatcccagcagcagcagctcctgcaggaactgcagggtgaggaccacatctctgctcagaactatgtgatcatctaaaaaagggggagctggcctccaccctatgttccatggattcggaacaagatttcagacatctgcatgagtgacaaactttctgaacaccaccaccaccaataatacttatcagcatcataaagtatctcttaaacactgatcttggcagggacggaactcctattcagcagtttttgtggaaagcagtaatgcttgcaaaacgtgtgtgtcattcagcattttaagtggagactatgcatttcatagtatatttgacagattagtactgtgtcctgtgttttgttccagattcttcagtataaataagctctatatcaaaaagttgcctgtctaaatagaaaatgtcttgctgtgttttgtcctatggaaaatactgtaattcaggattatgtttacaattgatccaggtgtttgtttctaacttctgtaatacatacaatgcaaaaaaaaaaaaaaaaaaatggccacaacagttgcacagtgcccaccctatggcctagcttcaggtacttcagttgaagtctaaactcaggtaacttggaatgtatatcatattgggatattaaatatttcacagctaaaaagctaaagagggaacatcactcttttgcctttccttattttatgcatttccctttcctcattacattccacattcttagaataagaagtgcattcaatcctaggagaatgataatcctggacatgggtgaacatgaggagaaccagcaaaatctgtggtgtttgacatcactttgtcatgtggttacaagtaaaacaactgttgcattcactgtttc

SEQ ID NO: 1162 - protein, 547 aa, Homo sapiens
MSTASSSSSSSSSQTPHPPSQRMRRSAAGSPPAVAAAGSGNGAGGGGGVGCAPAAGAGRLLQPIRATVPYQLLRGSQHSPTRPPVAAAAASLGSLPGPGAARGPSPSSPTPPAAAAPAEQAPRAKGRPRRSPESHRRSSSPERRSPGSPVCRADKAKSQQVRTSSTIRRTSSLDTITGPYLTGQWPRDPHVHYPSCMKDKATQTPSCWAEEGAEKRSHQRSASWGSADQLKEQIAKLRQQLQRSKQSSRHSKEKDRQSPLHGNHITISHTQATGSRSVPMPLSNISVPKSSVSRVPCNVEGISPELEKVFIKENNGKEEVSKPLDIPDGRRAPLPAHYRSSSTRSIDTQTPSVQERSSSCSSHSPCVSPFCPPESQDGSPCSTEDLLYDRDKDSGSSSPLPKYASSPKPNNSYMFKREPPEGCERVKVFEEMASRQPISAPLFSCPDKNKVNFIPTGSAFCPVKLLGPLLPASDLMLKNSPNSGQSSALATLTVEQLSSRVSFTSLSDDTSTAGSMEASVQQPSQQQQLLQELQGEDHISAQNYVII

SEQ ID NO: 1163 - DNA, 3513 bp, Homo sapiens
ggggcggcagaggcaccagccgacccgtcagtgacaccgctgtgccgtccccaaaaccagccgagacagctggcccccacccttccacccattgggcaggccgcacgggggcgcggcccggagtcctggtccctttgttgggcgcgcaccccctcccttaggtggcaacaaagtcgtgcagtgggagccgccgcgatagggcggggagtggccagggcgggactccaagaactgcccgggggcagcggggccaaaaagtgggaagaaggaaaaaaggcaggaggcatctggggacaggcgcgagggcagccggctctgaagtatgcggagggcctcctcccggccccgggcattcgcggagaacgagcctcgcagaagtttggctgcagctgcccgggcggcgtcgatggctgcgcgccccgcgccgcgcgggggctgagcgggcgccacttcccctccgggccggcttttgtgtctggcatctcctcctcatgctgcgtctggccacctactgcggcggccgctgctgagacgctcgctcggaccaaggggaggagacggcgggggcggccgcggctttgggtccaggcgggactatgggaaacgggatgtgctcccgaaagcagaagcggattttccagacgctgctgctgctgaccgtcgtgttcggctttctctacggcgcgatgctctactacgagctgcagacgcagctgcggaaagccgaggcggtggcgctcaagtaccagcagcaccaggagtccctctccgcccagttacaagttgtatatgaacacagatcaagattagagaaatccttgcaaaaagaaagacttgaacataaaaaagcaaaggaagattttcttgtttataagttagaagcacaagaaacattaaataaaggaaggcaagattccaatagcagatacagtgcactgaatgtccaacatcagatgttgaaaagccaacacgaggagctaaagaaacagcacagtgacttggaagaggaacatcgcaaacaaggggaagacttcagtagaacatttaatgaccataagcaaaaatacttgcagctccagcaagaaaaagaacaagaactttctaagctaaaagagactgtatacaatttgagagaagagaatagacaactaaggaaagcacaccaagacatacatacacagcttcaagatgtcaagcaacagcataagaatttactctccgagcatgaacaacttgtagtgactttggaagaccacaagagtgcactagctgctgcacagactcaagttgcagaatataaacaactgaaagatactctgaataggattccaagccttcgaaaacctgatccagcagaacagcaaaatgtgacccaggtggcacattctccacaaggttacaacacagcaagggagaagccaacccgagaggtgcaggaggtgtctcgaaataatgatgtgtggcagaaccatgaagcagttcctggaagagcagaagacacaaaactctatgctcccacccataaggaggcagaatttcaggctcccccagagccaatccaacaagaagtggaacgcagagaacctgaggagcatcaggtggaagaggagcacagaaaggccctggaggaggaagaaatggagcaggtcgggcaagcagaacatcttgaggaggaacacgatccatcaccagaggagcaggatcgggagtggaaagagcagcatgagcaacgagaagcagccaacctcctggaagggcacgcgcgtgctgaggtgtacccttcagccaagccaatgatcaaattccaatcaccctatgaggaacagttggaacagcagagactggcagtgcagcaggtggaggaggcccagcagctgcgggaacaccaggaagctttgcaccagcagaggctgcaggggcacttactacggcagcaggaacagcagcagcagcaggtggcaagagagatggccctgcagaggcaggctgagcttgaggagggccggccgcagcaccaggagcagctccggcagcaagctcattatgatgctatggataatgatatcgttcagggagcagaggaccagggaatccaaggagaggaaggagcctatgaaagagacaaccagcaccaagatgaagcagaaggagatccaggtaatagacatgagcctcgtgaacaaggaccccgagaagccgacccagaatctgaggcagatagggcagctgtagaagatataaacccagcagatgaccctaataatcaaggtgaggatgaatttgaagaagccgagcaagtgagagaagaaaatttgccagatgaaaatgaagagcaaaaacaaagtaatcaaaagcaagagaatacagaagtggaggaacatttggtgatggcaggaaatccagaccagcaggaggacaatgttgatgaacagtaccaggaagaggcagaagaggaggttcaggaagatttgactgaagagaaaaaaagggaactggagcataatgctgaagagacctatggtgaaaatgatgaaaatactgatgataaaaataatgatggagaagagcaagaagttcgagatgacaaccgccccaaaggccgagaggaacactacgaggaggaagaagaggaggaagaagacggggctgcagttgctgagaaatcacatcgaagagctgaaatgtagcggcacccaatttctagacaacgctcagccaacggattcttttcaagctgctcaaacataaatctgcctactgaactctaggatatttaattacaaaaattaagaacttagacttttttaaaacttttgtattagaaatgcgcatacatttatatgaatatattttgataacgtaggtctagagcttcttttatattcaagctaaacatgaaaaagaagaaaaacaataaagtaaacctgagcccccacgtcccaatttttttaatagattatgtgatgttggaaagctcattgattttgtatatgtttcagcgtgttacctttctggcttccagttcccaggtgttctttgtttgcctttgataaaatacaggatttaagaacagagagtactgcaaaatgccatgcagactttaaagagaatggcctgtttactaattgctgcccttctgatgtctttatgtatagctctgatagaattttcaccagtctatgtatctctggagtgagatctatgtacaaagtgacatacaattggaaatccatttttgttgtaaagacattgtttttcagacttttcagatcaattagaaaaatgtcattgctttaaaatcatagctgttctgtttaagaggaattgaatttaaaaatgagagagtattaaaactcatgtggcagtatcctggtcttaatcaggtattgcagtgttcaaacaaggtatggacacatcaacatattcaccttttggaaggactagtgacttggttaaaaactaatgagtgtttgcgtgtggtgtttctatgcgagcacccattctcaatttttt

SEQ ID NO: 1164 - protein, 696 aa, Homo sapiens
MGNGMCSRKQKRIFQTLLLLTVVFGFLYGAMLYYELQTQLRKAEAVALKYQQHQESLSAQLQVVYEHRSRLEKSLQKERLEHKKAKEDFLVYKLEAQETLNKGRQDSNSRYSALNVQHQMLKSQHEELKKQHSDLEEEHRKQGEDFSRTFNDHKQKYLQLQQEKEQELSKLKETVYNLREENRQLRKAHQDIHTQLQDVKQQHKNLLSEHEQLVVTLEDHKSALAAAQTQVAEYKQLKDTLNRIPSLRKPDPAEQQNVTQVAHSPQGYNTAREKPTREVQEVSRNNDVWQNHEAVPGRAEDTKLYAPTHKEAEFQAPPEPIQQEVERREPEEHQVEEEHRKALEEEEMEQVGQAEHLEEEHDPSPEEQDREWKEQHEQREAANLLEGHARAEVYPSAKPMIKFQSPYEEQLEQQRLAVQQVEEAQQLREHQEALHQQRLQGHLLRQQEQQQQQVAREMALQRQAELEEGRPQHQEQLRQQAHYDAMDNDIVQGAEDQGIQGEEGAYERDNQHQDEAEGDPGNRHEPREQGPREADPESEADRAAVEDINPADDPNNQGEDEFEEAEQVREENLPDENEEQKQSNQKQENTEVEEHLVMAGNPDQQEDNVDEQYQEEAEEEVQEDLTEEKKRELEHNAEETYGENDENTDDKNNDGEEQEVRDDNRPKGREEHYEEEEEEEEDGAAVAEKSHRRAEM

SEQ ID NO: 1165 - DNA, 1355 bp, Homo sapiens
cagtggctggtaggcagtggctgggaggcagcggcccaattagtgtcgtgcggcccgtggcgaggcgaggtccggggagcgagcgagcaagcaaggcgggaggggtggccggagctgcggcggctggcacaggaggaggagcccgggcgggcgaggggcggccggagagcgccagggcctgagctgccggagcggcgcctgtgagtgagtgcagaaagcaggcgcccgcgcgctagccgtggcaggagcagcccgcacgccgcgctctctccctgggcgacctgcagtttgcaatatgactttggaggaattctcggctggagagcagaagaccgaaaggatggataaggtgggggatgccctggaggaagtgctcagcaaagccctgagtcagcgcacgatcactgtcggggtgtacgaagcggccaagctgctcaacgtcgaccccgataacgtggtgttgtgcctgctggcggcggacgaggacgacgacagagatgtggctctgcagatccacttcaccctgatccaggcgttttgctgcgagaacgacatcaacatcctgcgcgtcagcaacccgggccggctggcggagctcctgctcttggagaccgacgctggccccgcggcgagcgagggcgccgagcagcccccggacctgcactgcgtgctggtgacgaatccacattcatctcaatggaaggatcctgccttaagtcaacttatttgtttttgccgggaaagtcgctacatggatcaatgggttccagtgattaatctccctgaacggtgatggcatctgaatgaaaataactgaaccaaattgcactgaagtttttgaaatacctttgtagttactcaagcagttactccctacactgatgcaaggattacagaaactgatgccaaggggctgagtgagttcaactacatgttctgggggcccggagatagatgactttgcagatggaaagaggtgaaaatgaagaaggaagctgtgttgaaacagaaaaataagtcaaaaggaacaaaaattacaaagaaccatgcaggaaggaaaactatgtattaatttagaatggttgagttacattaaaataaaccaaatatgttaaagtttaagtgtgcagccatagtttgggtatttttggtttatatgccctcaagtaaaagaaaagccgaaagggttaatcatatttgaaaaccatattttattgtattttgatgagatattaaattctcaaagttttattataaattctactaagttattttatgacatgaaaagttatttatgctataaattttttgaaacacaatacctacaataaactggtatgaataattgcatcatt

SEQ ID NO: 1166 - protein, 165 aa, Homo sapiens
MTLEEFSAGEQKTERMDKVGDALEEVLSKALSQRTITVGVYEAAKLLNVDPDNVVLCLLAADEDDDRDVALQIHFTLIQAFCCENDINILRVSNPGRLAELLLLETDAGPAASEGAEQPPDLHCVLVTNPHSSQWKDPALSQLICFCRESRYMDQWVPVINLPER

SEQ ID NO: 1167 - DNA, 1058 bp, Homo sapiens
cactcgctggtggtgggcgcgccgtgctgagctctggctgtcagtgtgttcgcccgcgtcccctccgcgctctccgcttgtggataactagctgctggttgatcgcactatgactctggaagaagtccgcggccaggacacagttccggaaagcacagccaggatgcagggtgccgggaaagcgctgcatgagttgctgctgtcggcgcagcgtcagggctgcctcactgccggcgtctacgagtcagccaaagtcttgaacgtggaccccgacaatgtgaccttctgtgtgctggctgcgggtgaggaggacgagggcgacatcgcgctgcagatccattttacgctgatccaggctttctgctgcgagaacgacatcgacatagtgcgcgtgggcgatgtgcagcggctggcggctatcgtgggcgccggcgaggaggcgggtgcgccgggcgacctgcactgcatcctcatttcgaaccccaacgaggacgcctggaaggatcccgccttggagaagctcagcctgttttgcgaggagagccgcagcgttaacgactgggtgcccagcatcaccctccccgagtgacagcccggcggggaccttggtctgatcgacgtggtgacgccccggggcgcctagagcgcggctggctctgtggaggggccctccgagggtgcccgagtgcggcgtggagactggcaggcggggggggcgcctggagagcgaggaggcgcggcctcccgaggaggggcccggtggcggcagggccaggctggtccgagctgaggactctgcaagtgtctggagcggctgctcgcccaggaaggcctaggctaggacgttggcctcagggccaggaaggacagactggccgggcaggcgtgactcagcagcctgcgctcggcaggaaggagcggcgccctggacttggtacagttgcaggagcgtgaaggacttagccgactgcgctgctttttcaaaacggatccgggcaatgcttcgttttctaaaggatgctgctgttgaagctttgaattttacaataaactttttg

SEQ ID NO: 1168 - protein, 159 aa, Homo sapiens
MTLEEVRGQDTVPESTARMQGAGKALHELLLSAQRQGCLTAGVYESAKVLNVDPDNVTFCVLAAGEEDEGDIALQIHFTLIQAFCCENDIDIVRVGDVQRLAAIVGAGEEAGAPGDLHCILISNPNEDAWKDPALEKLSLFCEESRSVNDWVPSITLPE

SEQ ID NO: 1169 - DNA, 2383 bp, Homo sapiens
ctccttcaagccctcagtcagttgtgcaggagaaagggggcggttggctttctcctttcaagaacgagttattttcagctgctgactggagacggtgcacgtctggatacgagagcatttccactatgggactggatacaaacacacacccggcagacttcaagagtctcagactgaggagaaagcctttccttctgctgctactgctgctgccgctgcttttgaaagtccactcctttcatggtttttcctgccaaaccagaggcacctttgctgctgccgctgttctctttggtgtcattcagcggctggccagaggatgagactccccaaactcctcactttcttgctttggtacctggcttggctggacctggaattcatctgcactgtgttgggtgcccctgacttgggccagagaccccaggggaccaggccaggattggccaaagcagaggccaaggagaggccccccctggcccggaacgtcttcaggccagggggtcacagctatggtgggggggccaccaatgccaatgccagggcaaagggaggcaccgggcagacaggaggcctgacacagcccaagaaggatgaacccaaaaagctgccccccagaccgggcggccctgaacccaagccaggacaccctccccaaacaaggcaggctacagcccggactgtgaccccaaaaggacagcttcccggaggcaaggcacccccaaaagcaggatctgtccccagctccttcctgctgaagaaggccagggagcccgggcccccacgagagcccaaggagccgtttcgcccaccccccatcacaccccacgagtacatgctctcgctgtacaggacgctgtccgatgctgacagaaagggaggcaacagcagcgtgaagttggaggctggcctggccaacaccatcaccagctttattgacaaagggcaagatgaccgaggtcccgtggtcaggaagcagaggtacgtgtttgacattagtgccctggagaaggatgggctgctgggggccgagctgcggatcttgcggaagaagccctcggacacggccaagccagcggcccccggaggcgggcgggctgcccagctgaagctgtccagctgccccagcggccggcagccggcctccttgctggatgtgcgctccgtgccaggcctggacggatctggctgggaggtgttcgacatctggaagctcttccgaaactttaagaactcggcccagctgtgcctggagctggaggcctgggaacggggcagggccgtggacctccgtggcctgggcttcgaccgcgccgcccggcaggtccacgagaaggccctgttcctggtgtttggccgcaccaagaaacgggacctgttctttaatgagattaaggcccgctctggccaggacgataagaccgtgtatgagtacctgttcagccagcggcgaaaacggcgggccccactggccactcgccagggcaagcgacccagcaagaaccttaaggctcgctgcagtcggaaggcactgcatgtcaacttcaaggacatgggctgggacgactggatcatcgcaccccttgagtacgaggctttccactgcgaggggctgtgcgagttcccattgcgctcccacctggagcccacgaatcatgcagtcatccagaccctgatgaactccatggaccccgagtccacaccacccacctgctgtgtgcccacgcggctgagtcccatcagcatcctcttcattgactctgccaacaacgtggtgtataagcagtatgaggacatggtcgtggagtcgtgtggctgcaggtagcagcactggccctctgtcttcctgggtggcacatcccaagagccccttcctgcactcctggaatcacagaggggtcaggaagctgtggcaggagcatctacacagcttgggtgaaaggggattccaataagcttgctcgctctctgagtgtgacttgggctaaaggcccccttttatccacaagttcccctggctgaggattgctgcccgtctgctgatgtgaccagtggcaggcacaggtccagggagacagactctgaatgggactgagtcccaggaaacagtgctttccgatgagactcagcccaccatttctcctcacctgggccttctcagcctctggactctcctaagcacctctcaggagagccacaggtgccactgcctcctcaaatcacatttgtgcctggtgacttcctgtccctgggacagttgagaagctgactgggcaagagtgggagagaagaggagagggcttggatagagttgaggagtgtgaggctgttagactgttagatttaaatgtatattgatgagataaaaagcaaaactgtgcct

SEQ ID NO: 1170 - protein, 501 aa, Homo sapiens
MRLPKLLTFLLWYLAWLDLEFICTVLGAPDLGQRPQGTRPGLAKAEAKERPPLARNVFRPGGHSYGGGATNANARAKGGTGQTGGLTQPKKDEPKKLPPRPGGPEPKPGHPPQTRQATARTVTPKGQLPGGKAPPKAGSVPSSFLLKKAREPGPPREPKEPFRPPPITPHEYMLSLYRTLSDADRKGGNSSVKLEAGLANTITSFIDKGQDDRGPVVRKQRYVFDISALEKDGLLGAELRILRKKPSDTAKPAAPGGGRAAQLKLSSCPSGRQPASLLDVRSVPGLDGSGWEVFDIWKLFRNFKNSAQLCLELEAWERGRAVDLRGLGFDRAARQVHEKALFLVFGRTKKRDLFFNEIKARSGQDDKTVYEYLFSQRRKRRAPLATRQGKRPSKNLKARCSRKALHVNFKDMGWDDWIIAPLEYEAFHCEGLCEFPLRSHLEPTNHAVIQTLMNSMDPESTPPTCCVPTRLSPISILFIDSANNVVYKQYEDMVVESCGCR

SEQ ID NO: 1171 - DNA, 2086 bp, Homo sapiens
ccgagtagctgggactacaggcgcccgctaccgcgcccggctaattttttgtatttttaatagagacggggtttcaccgtgttagccaggatggtctcgatctcctgacctcgtgatccgcccgccttggcctcccagagtgctgggatgacaggcgtgagcctctgagagcaaattttacccagttcctctctatcctcccgatgactctgaaatcaaactcagcaagtcatccgagcccccacggcgcagcggccctaggctggcatgggcgatgcggagctactccgccctcaggaagcaggcgaggtgcccagcgggagaatcacccacatcaccgtctaatctctgctgtgaagtggaagcgcgagaaggagggagcgtctcatgacggagggtgtgaagacgctaggctggacgaagcagaaaggcgggtgtcactggggacgttctgagggcccctggttgctaaggctcagtgtggggagaagaagggctgctaccctgttggatggagtatgcagggcatcttcctgccagctctgcccagggcaccatattggcatgcaccagctgcacaggtgctggggagtcagggaagagcaccatcgtcaagcagatgaagatcatccacgaggatggctactccgaggaggaatgccggcagtaccgggcggttgtctacagcaacaccatccagtccatcatggccattgtcaaagccatgggcaacctgcagatcgactttgccgacccctccagagcggacgacgccaggcagctatttgcactgtcctgcaccgccgaggagcaaggcgtgctccctgatgacctgtccggcgtcatccggaggctctgggctgaccatggtgtgcaggcctgctttggccgctcaagggaataccagctcaacgactcagctgcctactacctgaacgacctggagcgtattgcacagagtgactacatccccacacagcaagatgtgctacggacccgcgtaaagaccacggggatcgtggagacacacttcaccttcaaggacctacacttcaagatgtttgatgtgggtggtcagcggtctgagcggaagaagtggatccactgctttgagggcgtcacagccatcatcttctgcgtagccttgagcgcctatgacttggtgctagctgaggacgaggagatgaaccgcatgcatgagagcatgaagctattcgatagcatctgcaacaacaagtggttcacagacacgtccatcatcctcttcctcaacaagaaggacctgtttgaggagaagatcacacacagtcccctgaccatctgcttccctgagtacacaggggccaacaaatatgatgaggcagccagctacatccagagtaagtttgaggacctgaataagcgcaaagacaccaaggagatctacacgcacttcacgtgcgccaccgacaccaagaacgtgcagttcgtgtttgacgccgtcaccgatgtcatcatcaagaacaacctgaaggactgcggcctcttctgaggggcagcggggcctggcgggatgggccaccgccgactttgtaccccccaacccctgaggaagatgggggcaagaagatcacgctccccgcctgttcccccgccgcttttctcctctttcctctctttgttctcagctccccctgtcccctcagctccagacgtaggggaggggttgccacaggcctccctgtttgaagcctgcccttgtctgagatgctggtaatggccatggtacccccttctgggcatctgttctggtttttaaccattgtcttgttctgtgatgaggggaggggggcacatgctgagtctcccaaggctgcgtctggaggggcccctgcttctccagcctggacccccagctttgcccaacaccagcccctgccccagcccaagtccaaatgtttacagggagcctcctgcccagtcccccaaccccagccgctcggaggccccaaaggaaaaagcacaagaagcgtgagacgccaccattcctggaaaccacagtccacctgctcattctcgtagctttttaaaaaaatgaaagtaaagg

SEQ ID NO: 1172 - protein, 339 aa, Homo sapiens
MEYAGHLPASSAQGTILACTSCTGAGESGKSTIVKQMKIIHEDGYSEEECRQYRAVVYSNTIQSIMAIVKAMGNLQIDFADPSRADDARQLFALSCTAEEQGVLPDDLSGVIRRLWADHGVQACFGRSREYQLNDSAAYYLNDLERIAQSDYIPTQQDVLRTRVKTTGIVETHFTFKDLHFKMFDVGGQRSERKKWIHCFEGVTAIIFCVALSAYDLVLAEDEEMNRMHESMKLFDSICNNKWFTDTSIILFLNKKDLFEEKITHSPLTICFPEYTGANKYDEAASYIQSKFEDLNKRKDTKEIYTHFTCATDTKNVQFVFDAVTDVIIKNNLKDCGLF

SEQ ID NO: 1173 - DNA, 2185 bp, Homo sapiens
actgccgacccgagtgcttcccgcagagggctggtggtgggagcggagtgggtcgggcggggccgagccgggccgtgggccgtgtgggggccgggcggcggccgggccggcggacggcgggatgggctgcaccgtgagcgccgaggacaaggcggcggccgagcgctctaagatgatcgacaagaacctgcgggaggacggagagaaggcggcgcgggaggtgaagttgctgctgttgggtgctggggagtcagggaagagcaccatcgtcaagcagatgaagatcatccacgaggatggctactccgaggaggaatgccggcagtaccgggcggttgtctacagcaacaccatccagtccatcatggccattgtcaaagccatgggcaacctgcagatcgactttgccgacccctccagagcggacgacgccaggcagctatttgcactgtcctgcaccgccgaggagcaaggcgtgctccctgatgacctgtccggcgtcatccggaggctctgggctgaccatggtgtgcaggcctgctttggccgctcaagggaataccagctcaacgactcagctgcctactacctgaacgacctggagcgtattgcacagagtgactacatccccacacagcaagatgtgctacggacccgcgtaaagaccacggggatcgtggagacacacttcaccttcaaggacctacacttcaagatgtttgatgtgggtggtcagcggtctgagcggaagaagtggatccactgctttgagggcgtcacagccatcatcttctgcgtagccttgagcgcctatgacttggtgctagctgaggacgaggagatgaaccgcatgcatgagagcatgaagctattcgatagcatctgcaacaacaagtggttcacagacacgtccatcatcctcttcctcaacaagaaggacctgtttgaggagaagatcacacacagtcccctgaccatctgcttccctgagtacacaggggccaacaaatatgatgaggcagccagctacatccagagtaagtttgaggacctgaataagcgcaaagacaccaaggagatctacacgcacttcacgtgcgccaccgacaccaagaacgtgcagttcgtgtttgacgccgtcaccgatgtcatcatcaagaacaacctgaaggactgcggcctcttctgaggggcagcggggcctggcgggatgggccaccgccgactttgtaccccccaacccctgaggaagatgggggcaagaagatcacgctccccgcctgttcccccgccgcttttctcctctttcctctctttgttctcagctccccctgtcccctcagctccagacgtaggggaggggttgccacaggcctccctgtttgaagcctgcccttgtctgagatgctggtaatggccatggtacccccttctgggcatctgttctggtttttaaccattgtcttgttctgtgatgaggggaggggggcacatgctgagtctcccaaggctgcgtctggaggggcccctgcttctccagcctggacccccagctttgcccaacaccagcccctgccccagcccaagtccaaatgtttacagggagcctcctgcccagtcccccaaccccagccgctcggaggccccaaaggaaaaagcacaagaagcgtgagacgccaccattcctggaaaccacagtccacctgctcattctcgtagctttttaaaaaaatgaaagtaaaggaaaaaaaaaaaactgcaaatctagaaaactttttagagaaaaactatttaaaactgtcagatcctgaccagcaagcccccccccagccccccttccaagtgactccgtgccttgagtgtgtctgcgtgtttacacccgtccctctgctggccgcccccgtgcgagcggcacccctgccctgccctccacagaattgggttccaagggctgttccagacaactgccaacgtcactgagggccctgccccagcggccctggccccaggctctattaacctaaaatgtagctccctagcgctaacctaggaaccgccgctgcctgctggggggccacgcccctcatgcccttgtcccaggcccggggccttcagcgttgaacacttccttgcttttttcacatgttttatggaattgttcacctggtttgaaataataaaatgt

SEQ ID NO: 1174 - protein, 355 aa, Homo sapiens
MGCTVSAEDKAAAERSKMIDKNLREDGEKAAREVKLLLLGAGESGKSTIVKQMKIIHEDGYSEEECRQYRAVVYSNTIQSIMAIVKAMGNLQIDFADPSRADDARQLFALSCTAEEQGVLPDDLSGVIRRLWADHGVQACFGRSREYQLNDSAAYYLNDLERIAQSDYIPTQQDVLRTRVKTTGIVETHFTFKDLHFKMFDVGGQRSERKKWIHCFEGVTAIIFCVALSAYDLVLAEDEEMNRMHESMKLFDSICNNKWFTDTSIILFLNKKDLFEEKITHSPLTICFPEYTGANKYDEAASYIQSKFEDLNKRKDTKEIYTHFTCATDTKNVQFVFDAVTDVIIKNNLKDCGLF

SEQ ID NO: 1175 - DNA, 1242 bp, Homo sapiens
ccttttttggcctcgacggcggcaacccagcctccctcctaacgccctccgcctttgggaccaaccaggggagctcaagttagtagcagccaaggagaggcgctgccttgccaagactaaaaagggaggggagaagagaggaaaaaagcaagaatcccccacccctctcccgggcggagggggcgggaagagcgcgtcctggccaagccgagtagtgtcttccactcggtgcgtctctctaggagccgcgcgggaaggatgctggtccgcaggggcgcgcgcgcagggcccaggatgccgcggggctggaccgcgctttgcttgctgagtttgctgccttctgggttcatgagtcttgacaacaacggtactgctaccccagagttacctacccagggaacattttcaaatgtttctacaaatgtatcctaccaagaaactacaacacctagtacccttggaagtaccagcctgcaccctgtgtctcaacatggcaatgaggccacaacaaacatcacagaaacgacagtcaaattcacatctacctctgtgataacctcagtttatggaaacacaaactcttctgtccagtcacagacctctgtaatcagcacagtgttcaccaccccagccaacgtttcaactccagagacaaccttgaagcctagcctgtcacctggaaatgtttcagacctttcaaccactagcactagccttgcaacatctcccactaaaccctatacatcatcttctcctatcctaagtgacatcaaggcagaaatcaaatgttcaggcatcagagaagtgaaattgactcagggcatctgcctggagcaaaataagacctccagctgtgcggagtttaagaaggacaggggagagggcctggcccgagtgctgtgtggggaggagcaggctgatgctgatgctggggcccaggtatgctccctgctccttgcccagtctgaggtgaggcctcagtgtctactgctggtcttggccaacagaacagaaatttccagcaaactccaacttatgaaaaagcaccaatctgacctgaaaaagctggggatcctagatttcactgagcaagatgttgcaagccaccagagctattcccaaaagaccctgattgcactggtcacctcgggagccctgctggctgtcttgggcatcactggctatttcctgatgaatcgccgcagctggagccccacaggagaaaggctggagtttgaacct

SEQ ID NO: 1176 - protein, 328 aa, Homo sapiens
MLVRRGARAGPRMPRGWTALCLLSLLPSGFMSLDNNGTATPELPTQGTFSNVSTNVSYQETTTPSTLGSTSLHPVSQHGNEATTNITETTVKFTSTSVITSVYGNTNSSVQSQTSVISTVFTTPANVSTPETTLKPSLSPGNVSDLSTTSTSLATSPTKPYTSSSPILSDIKAEIKCSGIREVKLTQGICLEQNKTSSCAEFKKDRGEGLARVLCGEEQADADAGAQVCSLLLAQSEVRPQCLLLVLANRTEISSKLQLMKKHQSDLKKLGILDFTEQDVASHQSYSQKTLIALVTSGALLAVLGITGYFLMNRRSWSPTGERLEFEP

SEQ ID NO: 1177 - DNA, 2538 bp, Homo sapiens
acagagacccagttctgatgatggtcacacaccccagcagttttcccctaacaggaaagttgtcagggctgttcaggcatttccttctctgccatctgccatccggactgaagagaaagtcttagtttcaattcctttcctgttcaggggaggaggacactctgattggaggctgctggaataaattctgactcactattgaagaattatcagagtttttcttctgagtccaaattcctgggtctgatggcccagtcagcaacctgaagaaaaatctatgaacttcattaaaactgggttccatgcttttaatggaaaacagagatggaagacgagacaaaaatgccatttcagtttgagcaatgcactttttgagactcctttgggtagaaagagggaggaggccactgaggtttccactgagtgtatattatagatttgttctctcctcctcacctcccttggcttttcttccatcattggggactgctgtaatcttgaaacagaatattttctcttagttattattgcattattaatattttctgtttttggccatttcttttgagtttaatttgcatatgtgtacatgggcaatgcttcaacgagacaatttttttaagtttgttctctaacatcttagatactagaagatatggattttggtcctgggagattatttaggtttttttcttattgtgttgttgcacatatacagttagcagttttttttttttctgttggaattttagaaacaaggatccttcttgcggacggggcggagtttaagaaggacaggggagagggcctggcccgagtgctgtgtggggaggagcaggctgatgctgatgctggggcccaggtatgctccctgctccttgcccagtctgaggtgaggcctcagtgtctactgctggtcttggccaacagaacagaaatttccagcaaactccaacttatgaaaaagcaccaatctgacctgaaaaagctggggatcctagatttcactgagcaagatgttgcaagccaccagagctattcccaaaagaccctgattgcactggtcacctcgggagccctgctggctgtcttgggcatcactggctatttcctgatgaatcgccgcagctggagccccacaggagaaaggctgggcgaagacccttattacacggaaaacggtggaggccagggctatagctcaggacctgggacctcccctgaggctcagggaaaggccagtgtgaaccgaggggctcaggaaaacgggaccggccaggccacctccagaaacggccattcagcaagacaacacgtggtggctgataccgaattgtgactcggctaggtggggcaaggctgggcagtgtccgagagagcacccctctctgcatctgaccacgtgctacccccatgctggaggtgacatctcttacgcccaacccttccccactgcacacacctcagaggctgttcttggggccctacaccttgaggaggggcaggtaaactcctgtcctttacacattcggctccctggagccagactctggtcttctttgggtaaacgtgtgacgggggaaagccaaggtctggagaagctcccaggaacaatcgatggccttgcagcactcacacaggacccccttcccctaccccctcctctctgccgcaatacaggaacccccaggggaaagatgagcttttctaggctacaattttctcccaggaagctttgatttttaccgtttcttccctgtattttctttctctactttgaggaaaccaaagtaaccttttgcacctgctctcttgtaatgatatagccagaaaaacgtgttgccttgaaccacttccctcatctctcctccaagacactgtggacttggtcaccagctcctcccttgttctctaagttccactgagctccatgtgccccctctaccatttgcagagtcctgcacagttttctggctggagcctagaacaggcctcccaagttttaggacaaacagctcagttctagtctctctggggccacacagaaactctttttgggctcctttttctccctctggatcaaagtaggcaggaccatgggaccaggtcttggagctgagcctctcacctgtactcttccgaaaaatcctcttcctctgaggctggatcctagccttatcctctgatctccatggcttcctcctccctcctgccgactcctgggttgagctgttgcctcagtcccccaacagatgcttttctgtctctgcctccctcaccctgagccccttccttgctctgcacccccatatggtcatagcccagatcagctcctaacccttatcaccagctgcctcttctgtgggtgacccaggtccttgtttgctgttgatttctttccagaggggttgagcagggatcctggtttcaatgacggttggaaatagaaatttccagagaagagagtattgggtagatattttttctgaatacaaagtgatgtgtttaaatactgcaattaaagtgatactgaaacac

SEQ ID NO: 1178 - protein, 227 aa, Homo sapiens
MDFGPGRLFRFFSYCVVAHIQLAVFFFSVGILETRILLADGAEFKKDRGEGLARVLCGEEQADADAGAQVCSLLLAQSEVRPQCLLLVLANRTEISSKLQLMKKHQSDLKKLGILDFTEQDVASHQSYSQKTLIALVTSGALLAVLGITGYFLMNRRSWSPTGERLGEDPYYTENGGGQGYSSGPGTSPEAQGKASVNRGAQENGTGQATSRNGHSARQHVVADTEL

SEQ ID NO: 1179 - DNA, 2359 bp, Homo sapiens
cgggaaggatgctggtccgcaggggcgcgcgcgcagggcccaggatgccgcggggctggaccgcgctttgcttgctgagtttgctgccttctgggttcatgagtcttgacaacaacggtactgctaccccagagttacctacccagggaacattttcaaatgtttctacaaatgtatcctaccaagaaactacaacacctagtacccttggaagtaccagcctgcaccctgtgtctcaacatggcaatgaggccacaacaaacatcacagaaacgacagtcaaattcacatctacctctgtgataacctcagtttatggaaacacaaactcttctgtccagtcacagacctctgtaatcagcacagtgttcaccaccccagccaacgtttcaactccagagacaaccttgaagcctagcctgtcacctggaaatgtttcagacctttcaaccactagcactagccttgcaacatctcccactaaaccctatacatcatcttctcctatcctaagtgacatcaaggcagaaatcaaatgttcaggcatcagagaagtgaaattgactcagggcatctgcctggagcaaaataagacctccagctgtgcggagtttaagaaggacaggggagagggcctggcccgagtgctgtgtggggaggagcaggctgatgctgatgctggggcccaggtatgctccctgctccttgcccagtctgaggtgaggcctcagtgtctactgctggtcttggccaacagaacagaaatttccagcaaactccaacttatgaaaaagcaccaatctgacctgaaaaagctggggatcctagatttcactgagcaagatgttgcaagccaccagagctattcccaaaagaccctgattgcactggtcacctcgggagccctgctggctgtcttgggcatcactggctatttcctgatgaatcgccgcagctggagccccacaggagaaaggctgggcgaagacccttattacacggaaaacggtggaggccagggctatagctcaggacctgggacctcccctgaggctcagggaaaggccagtgtgaaccgaggggctcaggaaaacgggaccggccaggccacctccagaaacggccattcagcaagacaacacgtggtggctgataccgaattgtgactcggctaggtggggcaaggctgggcagtgtccgagagagcacccctctctgcatctgaccacgtgctacccccatgctggaggtgacatctcttacgcccaacccttccccactgcacacacctcagaggctgttcttggggccctacaccttgaggaggggcaggtaaactcctgtcctttacacattcggctccctggagccagactctggtcttctttgggtaaacgtgtgacgggggaaagccaaggtctggagaagctcccaggaacaatcgatggccttgcagcactcacacaggacccccttcccctaccccctcctctctgccgcaatacaggaacccccaggggaaagatgagcttttctaggctacaattttctcccaggaagctttgatttttaccgtttcttccctgtattttctttctctactttgaggaaaccaaagtaaccttttgcacctgctctcttgtaatgatatagccagaaaaacgtgttgccttgaaccacttccctcatctctcctccaagacactgtggacttggtcaccagctcctcccttgttctctaagttccactgagctccatgtgccccctctaccatttgcagagtcctgcacagttttctggctggagcctagaacaggcctcccaagttttaggacaaacagctcagttctagtctctctggggccacacagaaactctttttgggctcctttttctccctctggatcaaagtaggcaggaccatgggaccaggtcttggagctgagcctctcacctgtactcttccgaaaaatcctcttcctctgaggctggatcctagccttatcctctgatctccatggcttcctcctccctcctgccgactcctgggttgagctgttgcctcagtcccccaacagatgcttttctgtctctgcctccctcaccctgagccccttccttgctctgcacccccatatggtcatagcccagatcagctcctaacccttatcaccagctgcctcttctgtgggtgacccaggtccttgtttgctgttgatttctttccagaggggttgagcagggatcctggtttcaatgacggttggaaatagaaatttccagagaagagagtattgggtagatattttttctgaatacaaagtgatgtgtttaaatactgcaattaaagtgatactg

SEQ ID NO: 1180 - protein, 385 aa, Homo sapiens
MLVRRGARAGPRMPRGWTALCLLSLLPSGFMSLDNNGTATPELPTQGTFSNVSTNVSYQETTTPSTLGSTSLHPVSQHGNEATTNITETTVKFTSTSVITSVYGNTNSSVQSQTSVISTVFTTPANVSTPETTLKPSLSPGNVSDLSTTSTSLATSPTKPYTSSSPILSDIKAEIKCSGIREVKLTQGICLEQNKTSSCAEFKKDRGEGLARVLCGEEQADADAGAQVCSLLLAQSEVRPQCLLLVLANRTEISSKLQLMKKHQSDLKKLGILDFTEQDVASHQSYSQKTLIALVTSGALLAVLGITGYFLMNRRSWSPTGERLGEDPYYTENGGGQGYSSGPGTSPEAQGKASVNRGAQENGTGQATSRNGHSARQHVVADTEL

SEQ ID NO: 1181 - DNA, 1110 bp, Homo sapiens
agagtctcctcagacgccgagatgctggtcatggcgccccgaaccgtcctcctgctgctctcggcggccctggccctgaccgagacctgggccggctcccactccatgaggtatttctacacctccgtgtcccggcccggccgcggggagccccgcttcatctcagtgggctacgtggacgacacccagttcgtgaggttcgacagcgacgccgcgagtccgagagaggagccgcgggcgccgtggatagagcaggaggggccggagtattgggaccggaacacacagatctacaaggcccaggcacagactgaccgagagagcctgcggaacctgcgcggctactacaaccagagcgaggccgggtctcacaccctccagagcatgtacggctgcgacgtggggccggacgggcgcctcctccgcgggcatgaccagtacgcctacgacggcaaggattacatcgccctgaacgaggacctgcgctcctggaccgccgcggacacggcggctcagatcacccagcgcaagtgggaggcggcccgtgaggcggagcagcggagagcctacctggagggcgagtgcgtggagtggctccgcagatacctggagaacgggaaggacaagctggagcgcgctgaccccccaaagacacacgtgacccaccaccccatctctgaccatgaggccaccctgaggtgctgggccctgggtttctaccctgcggagatcacactgacctggcagcgggatggcgaggaccaaactcaggacactgagcttgtggagaccagaccagcaggagatagaaccttccagaagtgggcagctgtggtggtgccttctggagaagagcagagatacacatgccatgtacagcatgaggggctgccgaagcccctcaccctgagatgggagccgtcttcccagtccaccgtccccatcgtgggcattgttgctggcctggctgtcctagcagttgtggtcatcggagctgtggtcgctgctgtgatgtgtaggaggaagagttcaggtggaaaaggagggagctactctcaggctgcgtgtaacgacagtgcccagggctctgatgtgtctctcacagcttga

SEQ ID NO: 1182 - protein, 362 aa, Homo sapiens
MLVMAPRTVLLLLSAALALTETWAGSHSMRYFYTSVSRPGRGEPRFISVGYVDDTQFVRFDSDAASPREEPRAPWIEQEGPEYWDRNTQIYKAQAQTDRESLRNLRGYYNQSEAGSHTLQSMYGCDVGPDGRLLRGHDQYAYDGKDYIALNEDLRSWTAADTAAQITQRKWEAAREAEQRRAYLEGECVEWLRRYLENGKDKLERADPPKTHVTHHPISDHEATLRCWALGFYPAEITLTWQRDGEDQTQDTELVETRPAGDRTFQKWAAVVVPSGEEQRYTCHVQHEGLPKPLTLRWEPSSQSTVPIVGIVAGLAVLAVVVIGAVVAAVMCRRKSSGGKGGSYSQAACNDSAQGSDVSLTA

SEQ ID NO: 1183 - DNA, 642 bp, Homo sapiens
agagtctcctcagacgccgagatgctggtcatggcgccccgaaccgtcctcctgctgctctcggcggccctggccctgaccgagacctgggccggctcccactccatgaggtatttctacacctccgtgtcccggcccggccgcggggagccccgcttcatctcagtgggctacgtggacgacacccagttcgtgaggttcgacagcgacgccgcgagtccgagagaggagccgcgggcgccgtggatagagcaggaggggccggagtattgggaccggaacacacagatctacaaggcccaggcacagactgaccgagagagcctgcggaacctgcgcggctactacaaccagagcgaggccgggtctcacaccctccagagcatgtacggctgcgacgtggggccggacgggcgcctcctccgcgggcatgaccagtacgcctacgacggcaaggattacatcgccctgaacgaggacctgcgctcctggacccggacacggcggctcagatcacccagcgcaagtgggaggcggcccgtgaggcggagcagcggagagcctacctggagggcgagtgcgtggagtggctccgcagatacctggagaacgggaaggacaagctggagcgcgctggtacca

SEQ ID NO: 1184 - protein, 207 aa, Homo sapiens
MLVMAPRTVLLLLSAALALTETWAGSHSMRYFYTSVSRPGRGEPRFISVGYVDDTQFVRFDSDAASPREEPRAPWIEQEGPEYWDRNTQIYKAQAQTDRESLRNLRGYYNQSEAGSHTLQSMYGCDVGPDGRLLRGHDQYAYDGKDYIALNEDLRSWTRTRRLRSPSASGRRPVRRSSGEPTWRASAWSGSADTWRTGRTSWSALVP

SEQ ID NO: 1185 - DNA, 3595 bp, Homo sapiens
gcaggttgggagggaaagtcgggggaggacgcggaagaggagctgtgggaagggggaggagggagggaggaaaagaggaggaggcggaggagaactgagcagagcagagcatcgagccaaaggggagatgagtttgtctgtcctctgctgaggctacggccgggcctagggaactgggagcttgggtggaagcgacacccgtggaagtgggaggaggtggcgccgggactttaaccccttgtgggctctgcggcaggggatttaaccctttgtggatctggcccctcggaggcagcgtcatcggtagttttaaccccttcggggctgggtttcacgcactggacttaccctcatcaccttgctcaccaactcctttattggggtgctccgcttggaggtttgaggcccacctccgcccattacgtactgttcctgccgctgcacccccttggacccgctagctggccgcactgtgggcgcttaaccctttactgacttgagctccccagattgcagttggagtttgctgatagaaggactagctaaaggcgtcactgcaggaattacaaactgaagaggactctgttggactgttttttttttctttttcttttttttaagaaaaacccatttttttccttaaggacttactagccaaaatttcttaaacttcgaggactctactagccatggccgagccattcttgtcagaatatcaacaccagcctcaaactagcaactgtacaggtgctgctgctgtccaggaagagctgaaccctgagcgccccccaggcgcggaggagcgggtgcccgaggaggacagtaggtggcaatcgagagcgttcccccagttgggtggccgtccggggccggagggggaagggagcctggaatcccaaccacctcccttgcagacccaggcctgtccagaatctagctgcctgagagagggcgagaagggccagaatggggacgactcgtccgctggcggcgacttcccgccgccggcagaagtggaaccgacgcccgaggccgagctgctcgcccagccttgtcatgactccgaggccagtaagttgggggctcctgccgcagggggcgaagaggagtggggacagcagcagagacagctggggaagaaaaaacataggagacgcccgtccaagaagaagcggcattggaaaccgtactacaagctgacctgggaagagaagaaaaagttcgacgagaaacagagccttcgagcttcaaggatccgagccgagatgttcgccaagggccagccggtcgcgccctataacaccacgcagttcctcatggatgatcacgaccaggaggagccggatctcaaaaccggcctgtactccaagcgggccgccgccaaatccgacgacaccagcgatgacgacttcatggaagaagggggtgaggaggatgggggcagcgatgggatgggaggggacggcagcgagtttctgcagcgggacttctcggagacgtacgagcggtaccacacggagagcctgcagaacatgagcaagcaggagctcatcaaggagtacctggaactggagaagtgcctctcgcgcatggaggacgagaacaaccggctgcggctggagagcaagcggctgggtggcgacgacgcgcgtgtgcgggagctggagctggagctggaccggctgcgcgccgagaacctccagctgctgaccgagaacgaactgcaccggcagcaggagcgagcgccgctttccaagtttggagactagactgaaacttttttgggggagggggcaaaggggactttttacagtgatggaatgtaacattatatacatgtgtatataagacagtggacctttttatgacacataatcagaagagaaatccccctggctttggtttcgtaaatttagctatatgtagcttgcgtgctttctcctgttcttttaattatgtgaaactgaagagttgcttttcttgttttcctttttagaagtttttttccttaatgtgaaagtaatttgaccaagttataatgcatttttgtttttaacaaatcccctccttaaacggagctataaggtggccaaatctgagaacaattaaattcattttagttataataaatttaatatttgtaaatgtaacatagtttcagtgtgatttctagagctaattcaaaatagtattgatatattttatgtgactgcatttttggggaggggtaccgaaatcgttaaatttgtcagtttgcaaaaatatcaatctttaatgggagaattttcaatttgccaattttttccttgaatgggtttaagtatgctacaatatacagttcaggcaaaatttaagatgtaattatcttcaatacttaagtgtgcttgctttctagtgccttggttttctttcttgatgctggaaaaataaacaaaccggtattgagtgtttaggcgagtggaaagtggctacaatccaaaattttaaatttaactctgcctcggccattcaaaagtctaataacaaaaaatgtaaacctaatttggcagtttgttaggttagacaactgacagcctcatttcattcctacaagttggttttcagtaatctcttccttccccccagtaaggctggaagaggctcttggcaaacttcttagtgcaagcaatggttagattaatttgtgaggcagctctttaagacgttcagaggtaagaaatactggatttataaagcaaatggctgtttgggggattccaaggatttacctaattgtccaattctacgtgctctctataccaaaacaaaaaaaaaaagctatccacctttccatgtgggtcaaactaaaattagaaatgtcccctcactgcagatcaaatgtaaagcttccagttaaggagctaaatgaggtcctcagctgaatgaggaaccctgtacatccccttgcacagccctattctaaatcgcttaaactatgctgatagctgcttaggttcttgagtagttctgctcttaaacgtagggaggccctgagaactaaattttgccccaaaataaaaacagaaattatgagattgcctcctgtcattttggttaacccagtccttcacctgccctgtgtcagtgtcttctgagggcaattgcgttgctcaaatcactagcacagaggttccttaatttggggccttagaaaccattgtgggccttggggtccatgaaccccatgaaattatttgtagacttgtatgtacatttttctggggagaaggttcaagagattcataagattgtcaaactccttgaaggttcagaacctctgcagggaagggggaagaaaaccctcccattaggaagcatgcttttgcagttaaatggcgatggtggaggtgatagggacttcaagagtaaaatgcaccttgtattgcataagaagcatacacaaatcaataaatcaagggagattataccagtaggactgaatcagggccttcaaagctggactgagttggtcctgttctggcacatatggtccactggagacaatgtatgattgagtttttctttggtctaaaaattatattaaacatttattttg

SEQ ID NO: 1186 - protein, 359 aa, Homo sapiens
MAEPFLSEYQHQPQTSNCTGAAAVQEELNPERPPGAEERVPEEDSRWQSRAFPQLGGRPGPEGEGSLESQPPPLQTQACPESSCLREGEKGQNGDDSSAGGDFPPPAEVEPTPEAELLAQPCHDSEASKLGAPAAGGEEEWGQQQRQLGKKKHRRRPSKKKRHWKPYYKLTWEEKKKFDEKQSLRASRIRAEMFAKGQPVAPYNTTQFLMDDHDQEEPDLKTGLYSKRAAAKSDDTSDDDFMEEGGEEDGGSDGMGGDGSEFLQRDFSETYERYHTESLQNMSKQELIKEYLELEKCLSRMEDENNRLRLESKRLGGDDARVRELELELDRLRAENLQLLTENELHRQQERAPLSKFGD

SEQ ID NO: 1187 - DNA, 2273 bp, Homo sapiens
aaaactttgggagtttttagagacgagtttttttttttttctattacttttccccccccctaactaacggactattattgttgttgttttaaatttagctcttagggcttagctatttgggttttcttgcggtgtccggctcccgtctccctggctcccccgcccgccctgcggccccagcgcccctcgctctcatccagcccgcgaggagtgcgggcgccgcgccgcctttaaagcgaggccagggagcgaggcggtgaccggccgagatccggccctcgcctcctccctcggtggcgctagggctcccggcctctcttcctcagtgcgggcggagaagcgaaagcggatcgtcctcggctgccgccgccttctccgggactcgcgcgcccctccccgcgcgcccacccacccagtccggctggactgcggcagccgcgcggctcaccccggcaggatgttcgcagccgggctggctcccttctacgcctccaacttcagcctctggtcggccgcttactgctcctcggccggcccaggcggctgctccttccccttggaccccgccgccgtcaaaaagccctccttctgcatcgcagacattctgcacgccggcgtgggggatctgggggcggccccggagggcctggcaggggcctcggccgccgccctcaccgcgcacttgggctcggttcacccgcacgcctctttccaagcggcggccagatccccgcttcgacccaccccagtggtggcgccctccgaagtcccggctggcttcccgcagcggctgtctccgctctcagccgcctaccaccaccatcacccgcaacaacaacagcagcagcaacagccgcagcagcaacagcctccgcctccgccccgggctggcgccctgcagcccccggcctcggggacgcgagtggttccgaacccccaccacagtggctctgccccggccccctccagcaaagacctcaaatttggaattgaccgcattttatctgcagaatttgacccaaaagtcaaagaaggcaacacgctgagagatctcacttccctgctaaccggtgggcggcccgccggggtgcacctctcaggcctgcagccctcggccggccagttcttcgcatctctagatcccattaacgaggcttctgcaatcctgagtcccttaaactcgaacccaagaaattcagttcagcatcagttccaagacacgtttccaggtccctatgctgtgctcacgaaggacaccatgccgcagacgtacaaaaggaagcgttcatggtcgcgcgctgtgttctccaacctgcagaggaaaggcctggagaaaaggtttgagattcagaagtacgtgaccaagccggaccgaaagcagctggcggcgatgctgggcctcacggacgcacaggtgaaggtgtggttccagaaccggcggatgaagtggcggcactccaaggaggcccaggcccaaaaggacaaggacaaggaggctggcgagaagccatcaggtggagccccggctgcggatggcgagcaggacgagaggagccccagccgttctgaaggcgaggctgagagcgagagcagcgactccgagtccctggacatggcccccagcgacacggagcggactgaggggagtgagcgttctctgcaccaaacaacagttattaaggccccggtcactggcgccctcattaccgccagcagtgctgggagtggtgggagcagcggcggcggcggcaatagtttcagcttcagcagcgccagcagtcttagtagcagcagcaccagtgcgggttgcgccagcagccttggcggcggcggcgcctcggagcttctccctgcaacacagcccacagccagcagcgctcccaaaagccccgagccagcccaaggcgcgcttggctgcttatagactgtactagggcggaggggatccgggccttgcgtgcagcctcccaaccatgggctgggttttgtgcttactgtatgttggcgacttggtagggcaggagacgcagcgtggagcctacctcccgacattcacgcttcgccccacgctgctccgactggctgcagcggacactgcccaaagcagaggggagtctcagtgtcctgctagccagccgaacacttctctccggaagcaggctggttcgactgtgaggtgtttgactaaactgtttctctgactcgccccagaggtcgtggctcaaaggcacttaggacgccttaaatttgtaaataaaatgtttactacggtt

SEQ ID NO: 1188 - protein, 488 aa, Homo sapiens
MFAAGLAPFYASNFSLWSAAYCSSAGPGGCSFPLDPAAVKKPSFCIADILHAGVGDLGAAPEGLAGASAAALTAHLGSVHPHASFQAAARSPLRPTPVVAPSEVPAGFPQRLSPLSAAYHHHHPQQQQQQQQPQQQQPPPPPRAGALQPPASGTRVVPNPHHSGSAPAPSSKDLKFGIDRILSAEFDPKVKEGNTLRDLTSLLTGGRPAGVHLSGLQPSAGQFFASLDPINEASAILSPLNSNPRNSVQHQFQDTFPGPYAVLTKDTMPQTYKRKRSWSRAVFSNLQRKGLEKRFEIQKYVTKPDRKQLAAMLGLTDAQVKVWFQNRRMKWRHSKEAQAQKDKDKEAGEKPSGGAPAADGEQDERSPSRSEGEAESESSDSESLDMAPSDTERTEGSERSLHQTTVIKAPVTGALITASSAGSGGSSGGGGNSFSFSSASSLSSSSTSAGCASSLGGGGASELLPATQPTASSAPKSPEPAQGALGCL

SEQ ID NO: 1189 - DNA, 3687 bp, Homo sapiens
tcccgctccccactcccgggatgtgtctccgccgtacgacgggctatggccaccacgacttccgggttccgtcatttcgttctcccgccgccgacccgcgccgccaaactgaggctcttcaataagccaggcagcagccaacctgccaacacctactgacactcactcatctcccagagagagaaagagagcgagagagagcgagcgcgagagagcgagcgcgagtgagagcgagcgagcgagcgagaaagagagagagggagagacaaaatacctaccaggaaagggggggaggaagtccaatttttgcaaactattcatttttttttcttgatttttctcactgctttctttgaacaatactttaaagagagaggatcgtattatagataccgcgggggcaaagctaaaaaaggggggaggggggaggaaaaaattcaagaagcagaaacccctcgcggagttttactggaagaaaaaaacgggtctgaaagattcctcctcttcatcatcatcaaccatcattcattcactaccttgacattccgggctttgattgacagctggagtggcaaaaagccatgaaacacgacagttcggttacatgtgggctgctgacgggccgctcgtaaccttcagttcgggggcttgacaatttttttcttctttttcttctttttcttttctttctttttttttccaactgaggggaagagaagagaaagagggggaaaggaggaccgaagaggaggaggaggggaggggggaggaggaggaggtggaggaggaggaggaagatcaggaggaggaggaagaagaggaaaaaagagaaaaagaagaaatatcacagaaaaaaaaattcttcgttgtctagactgggctttttttcccccctaaaaaatagcatattggagaattgggagaagtctctttggtttggaaaaaaaaaaaaggaatcttcagcctagatcactttcttatccggactgggatattaaatatacgacacatccaggagtttattggagcgcagactgatggcgcaaaggtacgatgagctgccccattacggcgggatggacggagtaggggttcccgcttccatgtacggagaccctcacgcgccgcggccgatccccccggttcaccacctgaaccacgggccgccgctccacgccacacagcactacggcgcgcacgccccgcaccccaatgtcatgccggccagtatgggatccgctgtcaacgacgccttgaagcgggacaaggacgcgatctatgggcacccgttgtttcctctgttagctctggtctttgagaagtgcgagctggcgacctgcactccccgggaacctggagtggctggcggagacgtctgctcctccgactccttcaacgaggacatcgcggtcttcgccaagcaggttcgcgccgaaaagccacttttttcctcaaatccagagctggacaatttgatgatacaagcaatacaagtactaaggtttcatcttttggagttagaaaaggtccacgaactgtgcgataacttctgccaccgatacattagctgtttgaaggggaaaatgcccatcgacctcgtcattgatgaaagagacggcagctccaagtcagatcatgaagaactttcaggctcctccacaaatctcgctgaccataacccttcttcttggcgagaccacgatgatgcaacctcaacccactcagcaggcaccccagggccctccagtgggggccatgcttcccagagcggagacaacagcagtgagcaaggggatggtttagacaacagtgtagcttcacctggtacaggtgacgatgatgatccggataaggacaaaaaacgccagaagaaaagaggcattttccccaaagtagcaacaaatatcatgagagcatggctcttccagcatctcacacatccgtacccttccgaagagcagaagaaacagttagcgcaagacacaggacttacaattctccaagtaaacaactggtttattaatgccagaagaagaatagtacagcccatgattgaccagtcaaatcgagcaggcaaccaaggagcagcatatagtccagagggtcagcccatggggagctttgtgttggatggtcagcaacacatggggatccggcctgcaggacctatgagtggaatgggcatgaatatgggcatggatgggcaatggcactacatgtaaccttcatcatgtaaagcaatcgcaaagcaagggggaagtttgcagagcatgccaggggactacgtttctcagggtggtcctatgggaatgagtatggcacagccaagttacactcctccccagatgaccccacaccctactcaattaagacatggacccccaatgcattcatatttgccaagccatccccaccacccagccatgatgatgcacggaggaccccctacccaccctggaatgactatgtcagcacagagccccacaatgttaaattctgtagatcccaatgttggcggacaggttatggacattcatgcccaatagtataagggaactcaagggaaaaggaaacacacgcaaaaactattttaagactttctgaactttgaccagatgttgacacttaatatgaaattccagacagctgtgattattttttacttttgtcatttttcatcaagcaacagaggaccaatgcaacaagaacacaaatgtgaaatcatgggctgactgagacaattctgtccatgtaaagatcctctggaaaaagactccgagagttataactactgtagtataaatataggaactaagttaaacttgtacatttctgttgatcacgccgttatgttgcctcaaatagttttagaagagaaaaaaaaatatatccttgttttccacactatgtgtgttgttcccaaaagaatgactgttttggttcatcagtgaattcaccatccaggagagactgtggtatatattttaaacctgttgggccaatgagaaaagaaccacactggagatcatgatgaacttttggctgaacctcatcactcgaactccagcttcaagaatgtgttttcatgcccggcctttgttcctccataaatgtgtcctttagtttcaaacagatctttatagttcgtgcttcataagccaattcttattattatttttgggggactcttcttcaaagagcttgccaatgaagatttaaagacagagcaggagcttcttccaggagttctgagccttggttgtggacaaaacaatcttaagttgggcagctttcctcaacacaaaaaaaagttattaatggtcattgaaccataactaggactttatcagaaactcaaagcttgggggataaaaaggagcaagagaatactgtaacaaacttcgtacagagttcggtctattaattgtttcatgttagatattctatgtgtttacctcaattgaaaaaaaaaagaatgtttttgctagtatcagatctgctgtggaattggtattgtatgtccatgaattcttcttttctcagcacgtgttcctcactagaagaaaatgctgttacctttaagctttgtcaaatttacattaaaatacttgtatgaggactgtgacgttatgttaaaaaaaaaaaggtgttaagtcacaaaaagcggtaataaatatttcatttttg

SEQ ID NO: 1190 - protein, 381 aa, Homo sapiens [sequence omitted]

SEQ ID NO: 1191 - DNA, 3050 bp, Homo sapiens
gcctttggctacatcggacccagatgactgcctcctcacttcctccctcccgattccgccgcggcccccaaagactctcggggtggccccttgtccgcaccgcttggagggagtgtgctctgagttaagctggtctcttctggtcctggaaaaaaatgagtattgacaaggttgctggatctgcgcagaaaagaaagtgccacttaataaaaaatttagcccggcagtggtaccgtctgcagagcttgctgcccttggacgttagcaggaagccttcggggtgctgtaatcggcgggcagaggagagggaggccgcggaattaaaaggaacaaaagctagagcgccatgccaaacgtccccggcaagacccagttaggcaggagccgggagtgatgggaaaatgaactagaatacgatgagctgccccattacggcgggatggacggagtaggggttcccgcttccatgtacggagaccctcacgcgccgcggccgatccccccggttcaccacctgaaccacgggccgccgctccacgccacacagcactacggcgcgcacgccccgcaccccaatgtcatgccggccagtatgggatccgctgtcaacgacgccttgaagcgggacaaggacgcgatctatgggcacccgttgtttcctctgttagctctggtctttgagaagtgcgagctggcgacctgcactccccgggaacctggagtggctggcggagacgtctgctcctccgactccttcaacgaggacatcgcggtcttcgccaagcaggttcgcgccgaaaagccacttttttcctcaaatccagagctggacaatttgatgatacaagcaatacaagtactaaggtttcatcttttggagttagaaaaggtccacgaactgtgcgataacttctgccaccgatacattagctgtttgaaggggaaaatgcccatcgacctcgtcattgatgaaagagacggcagctccaagtcagatcatgaagaactttcaggctcctccacaaatctcgctgaccataacccttcttcttggcgagaccacgatgatgcaacctcaacccactcagcaggcaccccagggccctccagtgggggccatgcttcccagagcggagacaacagcagtgagcaaggggatggtttagacaacagtgtagcttcacctggtacaggtgacgatgatgatccggataaggacaaaaaacgccagaagaaaagaggcattttccccaaagtagcaacaaatatcatgagagcatggctcttccagcatctcacacatccgtacccttccgaagagcagaagaaacagttagcgcaagacacaggacttacaattctccaagtaaacaactggtttattaatgccagaagaagaatagtacagcccatgattgaccagtcaaatcgagcaggcaaccaaggagcagcatatagtccagagggtcagcccatggggagctttgtgttggatggtcagcaacacatggggatccggcctgcaggacctatgagtggaatgggcatgaatatgggcatggatgggcaatggcactacatgtaaccttcatcatgtaaagcaatcgcaaagcaagggggaagtttgcagagcatgccaggggactacgtttctcagggtggtcctatgggaatgagtatggcacagccaagttacactcctccccagatgaccccacaccctactcaattaagacatggacccccaatgcattcatatttgccaagccatccccaccacccagccatgatgatgcacggaggaccccctacccaccctggaatgactatgtcagcacagagccccacaatgttaaattctgtagatcccaatgttggcggacaggttatggacattcatgcccaatagtataagggaactcaagggaaaaggaaacacacgcaaaaactattttaagactttctgaactttgaccagatgttgacacttaatatgaaattccagacagctgtgattattttttacttttgtcatttttcatcaagcaacagaggaccaatgcaacaagaacacaaatgtgaaatcatgggctgactgagacaattctgtccatgtaaagatcctctggaaaaagactccgagagttataactactgtagtataaatataggaactaagttaaacttgtacatttctgttgatcacgccgttatgttgcctcaaatagttttagaagagaaaaaaaaatatatccttgttttccacactatgtgtgttgttcccaaaagaatgactgttttggttcatcagtgaattcaccatccaggagagactgtggtatatattttaaacctgttgggccaatgagaaaagaaccacactggagatcatgatgaacttttggctgaacctcatcactcgaactccagcttcaagaatgtgttttcatgcccggcctttgttcctccataaatgtgtcctttagtttcaaacagatctttatagttcgtgcttcataagccaattcttattattatttttgggggactcttcttcaaagagcttgccaatgaagatttaaagacagagcaggagcttcttccaggagttctgagccttggttgtggacaaaacaatcttaagttgggcagctttcctcaacacaaaaaaaagttattaatggtcattgaaccataactaggactttatcagaaactcaaagcttgggggataaaaaggagcaagagaatactgtaacaaacttcgtacagagttcggtctattaattgtttcatgttagatattctatgtgtttacctcaattgaaaaaaaaaagaatgtttttgctagtatcagatctgctgtggaattggtattgtatgtccatgaattcttcttttctcagcacgtgttcctcactagaagaaaatgctgttacctttaagctttgtcaaatttacattaaaatacttgtatgaggactgtgacgttatgttaaaaaaaaaaaggtgttaagtcacaaaaagcggtaataaatatttcatttttg

SEQ ID NO: 1192 - protein, 390 aa, Homo sapiens
YDELPHYGGMDGVGVPASMYGDPHAPRPIPPVHHLNHGPPLHATQHYGAHAPHPNVMPASMGSAVNDALKRDKDAIYGHPLFPLLALVFEKCELATCTPREPGVAGGDVCSSDSFNEDIAVFAKQVRAEKPLFSSNPELDNLMIQAIQVLRFHLLELEKVHELCDNFCHRYISCLKGKMPIDLVIDERDGSSKSDHEELSGSSTNLADHNPSSWRDHDDATSTHSAGTPGPSSGGHASQSGDNSSEQGDGLDNSVASPGTGDDDDPDKDKKRQKKRGIFPKVATNIMRAWLFQHLTHPYPSEEQKKQLAQDTGLTILQVNNWFINARRRIVQPMIDQSNRAGNQGAAYSPEGQPMGSFVLDGQQHMGIRPAGPMSGMGMNMGMDGQWHYM

SEQ ID NO: 1193 - DNA, 3612 bp, Homo sapiens
tcccgctccccactcccgggatgtgtctccgccgtacgacgggctatggccaccacgacttccgggttccgtcatttcgttctcccgccgccgacccgcgccgccaaactgaggctcttcaataagccaggcagcagccaacctgccaacacctactgacactcactcatctcccagagagagaaagagagcgagagagagcgagcgcgagagagcgagcgcgagtgagagcgagcgagcgagcgagaaagagagagagggagagacaaaatacctaccaggaaagggggggaggaagtccaatttttgcaaactattcatttttttttcttgatttttctcactgctttctttgaacaatactttaaagagagaggatcgtattatagataccgcgggggcaaagctaaaaaaggggggaggggggaggaaaaaattcaagaagcagaaacccctcgcggagttttactggaagaaaaaaacgggtctgaaagattcctcctcttcatcatcatcaaccatcattcattcactaccttgacattccgggctttgattgacagctggagtggcaaaaagccatgaaacacgacagttcggttacatgtgggctgctgacgggccgctcgtaaccttcagttcgggggcttgacaatttttttcttctttttcttctttttcttttctttctttttttttccaactgaggggaagagaagagaaagagggggaaaggaggaccgaagaggaggaggaggggaggggggaggaggaggaggtggaggaggaggaggaagatcaggaggaggaggaagaagaggaaaaaagagaaaaagaagaaatatcacagaaaaaaaaattcttcgttgtctagactgggctttttttcccccctaaaaaatagcatattggagaattgggagaagtctctttggtttggaaaaaaaaaaaaggaatcttcagcctagatcactttcttatccggactgggatattaaatatacgacacatccaggagtttattggagcgcagactgatggcgcaaaggtacgatgagctgccccattacggcgggatggacggagtaggggttcccgcttccatgtacggagaccctcacgcgccgcggccgatccccccggttcaccacctgaaccacgggccgccgctccacgccacacagcactacggcgcgcacgccccgcaccccaatgtcatgccggccagtatgggatccgctgtcaacgacgccttgaagcgggacaaggacgcgatctatgggcacccgttgtttcctctgttagctctggtctttgagaagtgcgagctggcgacctgcactccccgggaacctggagtggctggcggagacgtctgctcctccgactccttcaacgaggacatcgcggtcttcgccaagcaggttcgcgccgaaaagccacttttttcctcaaatccagagctggacaatttgatgatacaagcaatacaagtactaaggtttcatcttttggagttagaaaaggtccacgaactgtgcgataacttctgccaccgatacattagctgtttgaaggggaaaatgcccatcgacctcgtcattgatgaaagagacggcagctccaagtcagatcatgaagaactttcaggctcctccacaaatctcgctgaccataacccttcttcttggcgagaccacgatgatgcaacctcaacccactcagcaggcaccccagggccctccagtgggggccatgcttcccagagcggagacaacagcagtgagcaaggggatggtttagacaacagtgtagcttcacctggtacaggtgacgatgatgatccggataaggacaaaaaacgccagaagaaaagaggcattttccccaaagtagcaacaaatatcatgagagcatggctcttccagcatctcacacatccgtacccttccgaagagcagaagaaacagttagcgcaagacacaggacttacaattctccaagtaaacaactggtttattaatgccagaagaagaatagtacagcccatgattgaccagtcaaatcgagcaggttttcttcttgatccttcagtgagccaaggagcagcatatagtccagagggtcagcccatggggagctttgtgttggatggtcagcaacacatggggatccggcctgcaggtttgcagagcatgccaggggactacgtttctcagggtggtcctatgggaatgagtatggcacagccaagttacactcctccccagatgaccccacaccctactcaattaagacatggacccccaatgcattcatatttgccaagccatccccaccacccagccatgatgatgcacggaggaccccctacccaccctggaatgactatgtcagcacagagccccacaatgttaaattctgtagatcccaatgttggcggacaggttatggacattcatgcccaatagtataagggaactcaagggaaaaggaaacacacgcaaaaactattttaagactttctgaactttgaccagatgttgacacttaatatgaaattccagacagctgtgattattttttacttttgtcatttttcatcaagcaacagaggaccaatgcaacaagaacacaaatgtgaaatcatgggctgactgagacaattctgtccatgtaaagatcctctggaaaaagactccgagagttataactactgtagtataaatataggaactaagttaaacttgtacatttctgttgatcacgccgttatgttgcctcaaatagttttagaagagaaaaaaaaatatatccttgttttccacactatgtgtgttgttcccaaaagaatgactgttttggttcatcagtgaattcaccatccaggagagactgtggtatatattttaaacctgttgggccaatgagaaaagaaccacactggagatcatgatgaacttttggctgaacctcatcactcgaactccagcttcaagaatgtgttttcatgcccggcctttgttcctccataaatgtgtcctttagtttcaaacagatctttatagttcgtgcttcataagccaattcttattattatttttgggggactcttcttcaaagagcttgccaatgaagatttaaagacagagcaggagcttcttccaggagttctgagccttggttgtggacaaaacaatcttaagttgggcagctttcctcaacacaaaaaaaagttattaatggtcattgaaccataactaggactttatcagaaactcaaagcttgggggataaaaaggagcaagagaatactgtaacaaacttcgtacagagttcggtctattaattgtttcatgttagatattctatgtgtttacctcaattgaaaaaaaaaagaatgtttttgctagtatcagatctgctgtggaattggtattgtatgtccatgaattcttcttttctcagcacgtgttcctcactagaagaaaatgctgttacctttaagctttgtcaaatttacattaaaatacttgtatgaggactgtgacgttatgttaaaaaaaaaaaggtgttaagtcacaaaaagcggtaataaatatttcatttttg

SEQ ID NO: 1194 - protein, 477 aa, Homo sapiens
MAQRYDELPHYGGMDGVGVPASMYGDPHAPRPIPPVHHLNHGPPLHATQHYGAHAPHPNVMPASMGSAVNDALKRDKDAIYGHPLFPLLALVFEKCELATCTPREPGVAGGDVCSSDSFNEDIAVFAKQVRAEKPLFSSNPELDNLMIQAIQVLRFHLLELEKVHELCDNFCHRYISCLKGKMPIDLVIDERDGSSKSDHEELSGSSTNLADHNPSSWRDHDDATSTHSAGTPGPSSGGHASQSGDNSSEQGDGLDNSVASPGTGDDDDPDKDKKRQKKRGIFPKVATNIMRAWLFQHLTHPYPSEEQKKQLAQDTGLTILQVNNWFINARRRIVQPMIDQSNRAGFLLDPSVSQGAAYSPEGQPMGSFVLDGQQHMGIRPAGLQSMPGDYVSQGGPMGMSMAQPSYTPPQMTPHPTQLRHGPPMHSYLPSHPHHPAMMMHGGPPTHPGMTMSAQSPTMLNSVDPNVGGQVMDIHAQ

SEQ ID NO: 1195 - DNA, 2923 bp, Homo sapiens
gttaagctggtctcttctggtcctggaaaaaaatgagtattgacaaggttgctggatctgcgcagaaaagaaagtgccacttaataaaaaatttagcccggcagtggtaccgtctgcagagcttgctgcccttggacgttagcaggaagccttcggggtgctgtaatcggcgggcagaggagagggaggccgcggaattaaaaggaacaaaagctagagcgccatgccaaacgtccccggcaagacccagttaggcaggagccgggagtgatgggaaaatgaactagaacatattggagaattgggagaagtctctttggtttggaaaaaaaaaaaaggaatcttcagcctagatcactttcttatccggactgggatattaaatatacgacacatccaggagtttattggagcgcagactgatggcgcaaaggtacgatgagctgccccattacggcgggatggacggagtaggggttcccgcttccatgtacggagaccctcacgcgccgcggccgatccccccggttcaccacctgaaccacgggccgccgctccacgccacacagcactacggcgcgcacgccccgcaccccaatgtcatgccggccagtatgggatccgctgtcaacgacgccttgaagcgggacaaggacgcgatctatgggcacccgttgtttcctctgttagctctggtctttgagaagtgcgagctggcgacctgcactccccgggaacctggagtggctggcggagacgtctgctcctccgactccttcaacgaggacatcgcggtcttcgccaagcaggttcgcgccgaaaagccacttttttcctcaaatccagagctggacaatttgatgatacaagcaatacaagtactaaggtttcatcttttggagttagaaaaggtccacgaactgtgcgataacttctgccaccgatacattagctgtttgaaggggaaaatgcccatcgacctcgtcattgatgaaagagacggcagctccaagtcagatcatgaagaactttcaggctcctccacaaatctcgctgaccataacccttcttcttggcgagaccacgatgatgcaacctcaacccactcagcaggcaccccagggccctccagtgggggccatgcttcccagagcggagacaacagcagtgagcaaggggatggtttagacaacagtgtagcttcacctggtacaggtgacgatgatgatccggataaggacaaaaaacgccagaagaaaagaggcattttccccaaagtagcaacaaatatcatgagagcatggctcttccagcatctcacacatccgtacccttccgaagagcagaagaaacagttagcgcaagacacaggacttacaattctccaagtaaacaactggtttattaatgccagaagaagaatagtacagcccatgattgaccagtcaaatcgagcagtgagccaaggagcagcatatagtccagagggtcagcccatggggagctttgtgttggatggtcagcaacacatggggatccggcctgcaggtttgcagagcatgccaggggactacgtttctcagggtggtcctatgggaatgagtatggcacagccaagttacactcctccccagatgaccccacaccctactcaattaagacatggacccccaatgcattcatatttgccaagccatccccaccacccagccatgatgatgcacggaggaccccctacccaccctggaatgactatgtcagcacagagccccacaatgttaaattctgtagatcccaatgttggcggacaggttatggacattcatgcccaatagtataagggaactcaagggaaaaggaaacacacgcaaaaactattttaagactttctgaactttgaccagatgttgacacttaatatgaaattccagacagctgtgattattttttacttttgtcatttttcatcaagcaacagaggaccaatgcaacaagaacacaaatgtgaaatcatgggctgactgagacaattctgtccatgtaaagatcctctggaaaaagactccgagagttataactactgtagtataaatataggaactaagttaaacttgtacatttctgttgatcacgccgttatgttgcctcaaatagttttagaagagaaaaaaaaatatatccttgttttccacactatgtgtgttgttcccaaaagaatgactgttttggttcatcagtgaattcaccatccaggagagactgtggtatatattttaaacctgttgggccaatgagaaaagaaccacactggagatcatgatgaacttttggctgaacctcatcactcgaactccagcttcaagaatgtgttttcatgcccggcctttgttcctccataaatgtgtcctttagtttcaaacagatctttatagttcgtgcttcataagccaattcttattattatttttgggggactcttcttcaaagagcttgccaatgaagatttaaagacagagcaggagcttcttccaggagttctgagccttggttgtggacaaaacaatcttaagttgggcagctttcctcaacacaaaaaaaagttattaatggtcattgaaccataactaggactttatcagaaactcaaagcttgggggataaaaaggagcaagagaatactgtaacaaacttcgtacagagttcggtctattaattgtttcatgttagatattctatgtgtttacctcaattgaaaaaaaaaagaatgtttttgctagtatcagatctgctgtggaattggtattgtatgtccatgaattcttcttttctcagcacgtgttcctcactagaagaaaatgctgttacctttaagctttgtcaaatttacattaaaatacttgtatgaggactgtgacgttatgtt

SEQ ID NO: 1196 - protein, 470 aa, Homo sapiens
MAQRYDELPHYGGMDGVGVPASMYGDPHAPRPIPPVHHLNHGPPLHATQHYGAHAPHPNVMPASMGSAVNDALKRDKDAIYGHPLFPLLALVFEKCELATCTPREPGVAGGDVCSSDSFNEDIAVFAKQVRAEKPLFSSNPELDNLMIQAIQVLRFHLLELEKVHELCDNFCHRYISCLKGKMPIDLVIDERDGSSKSDHEELSGSSTNLADHNPSSWRDHDDATSTHSAGTPGPSSGGHASQSGDNSSEQGDGLDNSVASPGTGDDDDPDKDKKRQKKRGIFPKVATNIMRAWLFQHLTHPYPSEEQKKQLAQDTGLTILQVNNWFINARRRIVQPMIDQSNRAVSQGAAYSPEGQPMGSFVLDGQQHMGIRPAGLQSMPGDYVSQGGPMGMSMAQPSYTPPQMTPHPTQLRHGPPMHSYLPSHPHHPAMMMHGGPPTHPGMTMSAQSPTMLNSVDPNVGGQVMDIHAQ

SEQ ID NO: 1197 - DNA, 2315 bp, Homo sapiens
aaaggaccgaggcgtgcagcggacagcagatggatcccgcggccagcagctgcatgaggagcctccagcccccagcccctgtctggggctgccttcgaaacccccactcggaaggcaatggggcctcagggctaccccactacccgcccaccccgttctccttccaccagaaaccagacttcctggcgacagcgacggcagcgtaccctgacttctcagcctcctgcctggcagccaccccacacagcctgccccaggaggagcacatcttcactgagcagcaccccgctttcccacagtcccccaactggcacttccctgtctcagacgcccggcgcaggcccaactcaggcccggcagggggttccaaggaaatggggaccagcagcctgggcctggtggacaccacaggaggcccaggcgatgactacggggtgcttgggagcactgccaatgagacagagaagaaatcatccaggcggagaaaggagagttcagacaaccaggagaacagagggaagccggagggcagcagcaaagcccgcaaggagaggacggccttcaccaaggagcagctgcgagagctggaggcagagtttgcccatcataactacctgactcggctccgcagatatgagattgcggtaaacctggacctctctgagcgccaggtcaaagtgtggttccagaaccgaaggatgaagtggaagcgtgtgaagggaggtcagcccatctcccccaatgggcaggaccctgaggatggggactccacagcctctccaagttcagagtgagattctgcatggaggaaaaatgactaaggactgagccccctacccaactacccccaccccaatcccaccttcaccctcttccttccccagccagggcagcctctccacatctttccctgactcttggatatgaaactgcccagcattcctgggagtcttaggattttctaggaagttctgtccagcctcttagcagcctcttccctagggcctttgctcccacactctcatggaatcagacagagatcctaccgggccggatgaatctggaaacagcttcagagatactgcttctcagcgtctcttggctgccacccatgcctcctcctaccgctgttctcctaggtcagccaggcctcctcctggtctggacaccacctggcctggtgggagaggagctttggaaccagctggcgactcggaaagtaaatgcttcaaaaggaaggaaatgacagagacacacgcccttgcccaccttcctctgtaggctgcacatctgaggctttggggccccttagttgtcccgaaaccccaagaaaaatcagaatgaggagagtcaaggacagcaactcagctgctgcaagccagaaacacatccctgtctccaaatttgttggctaagtggagacacttctgagaactgactagagaagacagaaaaatagcccgatgtaggtttcggtgtccccatataggcccgtccacacaggcttgactgggtggacaagaatgaacccatgacagcacctgctgcttcaaaatcaaaatcaatttagggatacagcaggggctgttgggctgtgctccagagaaaaggagcagctactccttttaaatccacgatttctggattgaaaacctgtccagatgctgagttgttgggctgaacaactaggagctgaaaacaacgtagaggctggaaagtgtcccctgcattctggaggggaggggagataataaggagggctgctgggtgagggcctggagatgtggaaccctggagtggaaggttctccagtgacagtgtcctgtgactgcaaaaggggacaagaaaatccctcttcctccatgggatggatttaagctcttgctgtgtgttctacaaatgctgttattgtgggaggaaatgctaggtttttgtgtgtggactgcccagacctcagccaggtcttctggagatgacatttgaggactgatggccaaagagcatgggggactgaagccctggctgcctcagcgctctgtctcccaacaccagctggtgttgcagagggaggtcaacgtgagtttggatctcttgtacgcagatgtaatcattcacatgtaaaaataaccccacctccccaccccaaaaagggcaagagctgtggaaaatgattgccaaatgagatggctggttagagcatgattttttctaaagcatacttcatatattttcttaagattacatcaagctaattgtgcgagctcaattcactttgtaagaaaactctcggagaaataaaatcaataaaaagcaaa

SEQ ID NO: 1198 - protein, 254 aa, Homo sapiens
MDPAASSCMRSLQPPAPVWGCLRNPHSEGNGASGLPHYPPTPFSFHQKPDFLATATAAYPDFSASCLAATPHSLPQEEHIFTEQHPAFPQSPNWHFPVSDARRRPNSGPAGGSKEMGTSSLGLVDTTGGPGDDYGVLGSTANETEKKSSRRRKESSDNQENRGKPEGSSKARKERTAFTKEQLRELEAEFAHHNYLTRLRRYEIAVNLDLSERQVKVWFQNRRMKWKRVKGGQPISPNGQDPEDGDSTASPSSE

SEQ ID NO: 1199 - DNA, 2142 bp, Homo sapiens
aaaggaccgaggcgtgcagcggacagcagatggatcccgcggccagcagctgcatgaggagcctccagcccccagcccctgtctggggctgccttcgaaacccccactcggaaggcaatggggcctcagggctaccccactacccgcccaccccgttctccttccaccagaaaccagacttcctggcgacagcgacggcagcgtaccctgacttctcagcctcctgcctggcagccaccccacacagcctgccccaggaggagcacatcttcactgagcagcaccccgctttcccacagtcccccaactggcacttccctgtctcagacgcccggcgcaggcccaactcaggcccggcagggggttccaaggaaatggggaccagcagcctgggcctggtggacaccacaggaggcccaggcgatgactacggggtgcttgggagcactgccaatgagacagagaagaaatcatccaggcggagaaaggagagttcaggtcaaagtgtggttccagaaccgaaggatgaagtggaagcgtgtgaagggaggtcagcccatctcccccaatgggcaggaccctgaggatggggactccacagcctctccaagttcagagtgagattctgcatggaggaaaaatgactaaggactgagccccctacccaactacccccaccccaatcccaccttcaccctcttccttccccagccagggcagcctctccacatctttccctgactcttggatatgaaactgcccagcattcctgggagtcttaggattttctaggaagttctgtccagcctcttagcagcctcttccctagggcctttgctcccacactctcatggaatcagacagagatcctaccgggccggatgaatctggaaacagcttcagagatactgcttctcagcgtctcttggctgccacccatgcctcctcctaccgctgttctcctaggtcagccaggcctcctcctggtctggacaccacctggcctggtgggagaggagctttggaaccagctggcgactcggaaagtaaatgcttcaaaaggaaggaaatgacagagacacacgcccttgcccaccttcctctgtaggctgcacatctgaggctttggggccccttagttgtcccgaaaccccaagaaaaatcagaatgaggagagtcaaggacagcaactcagctgctgcaagccagaaacacatccctgtctccaaatttgttggctaagtggagacacttctgagaactgactagagaagacagaaaaatagcccgatgtaggtttcggtgtccccatataggcccgtccacacaggcttgactgggtggacaagaatgaacccatgacagcacctgctgcttcaaaatcaaaatcaatttagggatacagcaggggctgttgggctgtgctccagagaaaaggagcagctactccttttaaatccacgatttctggattgaaaacctgtccagatgctgagttgttgggctgaacaactaggagctgaaaacaacgtagaggctggaaagtgtcccctgcattctggaggggaggggagataataaggagggctgctgggtgagggcctggagatgtggaaccctggagtggaaggttctccagtgacagtgtcctgtgactgcaaaaggggacaagaaaatccctcttcctccatgggatggatttaagctcttgctgtgtgttctacaaatgctgttattgtgggaggaaatgctaggtttttgtgtgtggactgcccagacctcagccaggtcttctggagatgacatttgaggactgatggccaaagagcatgggggactgaagccctggctgcctcagcgctctgtctcccaacaccagctggtgttgcagagggaggtcaacgtgagtttggatctcttgtacgcagatgtaatcattcacatgtaaaaataaccccacctccccaccccaaaaagggcaagagctgtggaaaatgattgccaaatgagatggctggttagagcatgattttttctaaagcatacttcatatattttcttaagattacatcaagctaattgtgcgagctcaattcactttgtaagaaaactctcggagaaataaaatcaataaaaagcaaa

SEQ ID NO: 1200 - protein, 184 aa, Homo sapiens
MDPAASSCMRSLQPPAPVWGCLRNPHSEGNGASGLPHYPPTPFSFHQKPDFLATATAAYPDFSASCLAATPHSLPQEEHIFTEQHPAFPQSPNWHFPVSDARRRPNSGPAGGSKEMGTSSLGLVDTTGGPGDDYGVLGSTANETEKKSSRRRKESSGQSVVPEPKDEVEACEGRSAHLPQWAGP

SEQ ID NO: 1201 - DNA, 1349 bp, Homo sapiens
gacggcgcttttgtctccggtgagttttgtggcgggaagcttctgcgctggtgcttagtaaccgactttcctccggactcctgcacgacctgctcctacagccggcgatccactcccggctgttcccccggagggtccagaggcctttcagaaggagaaggcagctctgtttctctgcagaggagtagggtcctttcagccatgaagcatgtgttgaacctctacctgttaggtgtggtactgaccctactctccatcttcgttagagtgatggagtccctagagggcttactagagagcccatcgcctgggacctcctggaccaccagaagccaactagccaacacagagcccaccaagggccttccagaccatccatccagaagcatgtgataagacctccttccatactggccatattttggaacactgacctagacatgtccagatgggagtcccattcctagcagacaagctgagcaccgttgtaaccagagaactattactaggccttgaagaacctgtctaactggatgctcattgcctgggcaaggcctgtttaggccggttgcggtggctcatgcctgtaatcctagcactttgggaggctgaggtgggtggatcacctgaggtcaggagttcgagaccagcctcgccaacatggcgaaaccccatctctactaaaaatacaaaagttagctgggtgtggtggcagaggcctgtaatcccagctccttgggaggctgaggcgggagaattgcttgaacccggggacggaggttgcagtgagccgagatcgcactgctgtacccagcctgggccacagtgcaagactccatctcaaaaaaaaaagaaaagaaaaagcctgtttaatgcacaggtgtgagtggattgcttatggctatgagataggttgatctcgcccttaccccggggtctggtgtatgctgtgctttcctcagcagtatggctctgacatctcttagatgtcccaacttcagctgttgggagatggtgatattttcaaccctacttcctaaacatctgtctggggttcctttagtcttgaatgtcttatgctcaattatttggtgttgagcctctcttccacaagagctcctccatgtttggatagcagttgaagaggttgtgtgggtgggctgttgggagtgaggatggagtgttcagtgcccatttctcattttacattttaaagtcgttcctccaacatagtgtgtattggtctgaagggggtggtgggatgccaaagcctgctcaagttatggacattgtggccaccatgtggcttaaatgattttttctaactaataaagtggaatatatatttc

SEQ ID NO: 1202 - protein, 63 aa, Homo sapiens
MKHVLNLYLLGVVLTLLSIFVRVMESLEGLLESPSPGTSWTTRSQLANTEPTKGLPDHPSRSM

SEQ ID NO: 1203 - DNA, 144 bp, Homo sapiens
atgtttgtttgtttgtttttgagacggagttttgcttttgttgcagtgagccgagatcgcactgctgtacccagcctgggccacagtgcaagactccatctcaaaaaaaagaaaagaaaaagcctgtttaatgcacaggtgtga

SEQ ID NO: 1204 - protein, 47 aa, Homo sapiens
MFVCLFLRRSFAFVAVSRDRTAVPSLGHSARLHLKKKKRKSLFNAQV

SEQ ID NO: 1205 - DNA, 4598 bp, Homo sapiens
cccaggccggctctggcctcctgacccagacagcgcagggcgcgagggatcgcgcggccgagcccgggtcgcgccgctcccagcatcggggccgctagccaagagttcgaggccttcccgatccggatgtgatgaaaaagagcaacagagggagaagtgtttcaggattgtaggagtggaagaggggaaagagaggcagagagggggaaggccccctcgcaggggagccggctggagtgagctggctggaaagagggggcggagtgcgcggagtcagagccgccaccgctgccgcagttgccgccactgcggcgtctgggctgagccggagggaggcgggaggacgcgcaggggcggccgccgccgtcgtcaggccaccggggcgaaaatgcggccgctgccggaggctcgctaactttccggggcggaagaggaggaggaggaggaggaaggggcttggagcgactacggggggatgcggagaagcagtcagttccctgcacccagcacctcacagcccttcctccgtgcgccctgccgggcggcgagctaggcggcagcggcgcggcgcgggctcggcggagcggcccatgtccggcgcgggcgaagccctcgctcccgggcccgtggggccgcagcgcgtggccgaggcgggcggcggccagctgggctccacagcccagggaaaatgtgataaagacaatactgagaaagatataactcaagctaccaatagccacttcacacatggagagatgcaagaccagtccatttggggaaatccttcggatggtgaactcattagaacccaacctcagcgcttgcctcagcttcagacttcagcccaggtgccaagtggtgaggaaataggcaagataaagaacggccacacaggtctgagcaatggaaatggaattcaccacggggccaaacacggatccgcagataatcgcaaactttcagcacctgtttctcaaaaaatgcatagaaaaattcagtccagcttgtctgtaaacagcgatatcagtaagaagagcaaagtaaatgctgtcttttcccaaaagacaggctcttcacctgaagattgttgtgtccactgtatcctggcttgcttgttctgcgaattcctgaccctttgcaacattgtcctgggacaagcgtcatgtggcatctgcacctcagaagcctgctgctgttgctgtggtgacgagatgggggatgattgtaactgcccttgtgatatggactgtggcatcatggatgcctgttgtgaatcatcagactgcttggaaatctgtatggaatgctgtggaatttgttttccttcataaatatttatcttttgtttgtgttaaaactggagagtgtttaaaaatttccttttggggggaagaaaagcacattgtaagattctcatgaaacaacatggaatttgcactgttaactcattattgtaagtaatctctgaaagcctttttactttaaccaaatctacatggtttaatatgtgaaattttaactactttaactagttttataaatttcttaatatgttacaataacttagggacattttgacaccccccttcccaaatgttaaatgccttctcctttttaccgatatttctgtttcttttaaccgttctcaggagcactttgctccaaatatattatttttcagtgtgtatttaaacgaggcagtttattttgatatgtatctattcatgattgaaaggaagcagtcttggccaggcacggtggcttacacctgtaaccctggcattttgggaggccaaggtgggcagattgcctgagctcaggagttcgagaccagccagggcaacatggtgaaaccccatctctactaaaatacaaaaagttagctgggcttggcggtgtgcgcctgtagtcccagctactcaggaggctgaggcaggagaattgcttgaacccgagaggcggaagttgcagtgagccgagattgtgccactgaactccaacctgcactccagcctgggcaacagagcgagactccatctctaaataaataaataaataaataaataaataaataaataaataaacaaaccagtctttattttaaaagaaactttaggaaacaaacccacataatagttgggaaccagtgttgatctctctcccttaccttctccacttgttcaacagactctgaatgccgactgtgtggactctcttcctcagactgtggggacagatacaattccactcctgtccacaggaacatgagatttagcagactaaggagatctgtaaagaatgaaccataccacaaggcatactgaagtgaggattataagagaaataaactcaaaatgctgttggaatatgcagagaattgctaccagaatattcagtaaggtttcagggagaatgtggcatttgaggactctcttagaatgagtgattcacctgctatttaaatgaattatttagatttttgacaaagatttaggtggacaccctaaactgtgtgtgcctttaaccagttaaaagaacagtgccttcagcatacttttttattagttgtaggaatacagctttttgaaaaagctataaagtttaaattaactaaaaatatgcattttcttacacataatttaaatgttatcatacttttttgatgaaaacataatgccttagtaaaatagctctatttaataaagaagattgagtactctgacacatttcatttaaattaggaaatttttaatattaaaatcccagtgttctgagttattgaaaggctttcttttattttgagagctttaggtctttttgggatgagaacattttagttgtttagtttgtttcttaagcagtgctattttttgtaaacacagataaatggaaaccattcttttcaatgcagaagaaatctagatatcccctactgtgaccaaatttctgtattacgattttatgttaaattaaactaatatggcaggttataatgatccttaagtgtaaagaaatcagtcaattacaagagtaattgtatagttattgagacctatagtgtgtggcttagatgaaagggagagtaaattttcataccatgctctctcctactcagtttgatctctctaaaattgtagtttggtttgatttaatataattcttagtagaaattttgaaagtatgctttgggattaataattatttttaatttttctggctgaatatcaaattgatagtaacaacagaagcataattttaggaaggctttcgcaaacctagccttttaagagaggtttttaacctgaagcatgagaatatatcacctgtggtttttcctttgagatgaaacgtagtttctagttatatcattacttaaagggcttaaaaagaaaaaacttagcaaacttttgaatctttcttttattgctatttacacatacatacacacatacaaaacctttaaattttgggatctgaatataattctggtaaacagctgtcttcatttttctcctctaaagaacttaattcatttgttacataaaatataaggaaatctttatactattttacagtaaccacaatctaaatatttacatatacccaaaattaacttatgctcatatattaggatgtgagaatatcatctgtttatggacacatgaaacctcctaatgacctggaattgttagaatatttgactttttatatgcaaagtttttcaaccaagtggtttgtctaatatttaaacatgtactggcacaatttgtgatgaaaatattagcacatttgcaataatgtttctccataacagagaatgttaatggataccagaattttatttttgtatttatgttcatagtacttttcctcttgtctactccagacagttattccataaagcatttgtataattaaaaggaaaacagaaaaaggaaaagtaggcaaatgtgaaaatagtttcaatatatcttatgatttcttaatgtaaaatgttttgttgaagtatatggctatcatgactaagtgctagaatttatagttacaggcggtgtccttttaaatgtggaaaggcttttaaaatattttaaaactggacctgtattatcctgaatacactattttgaaaatttttaaaaatgacttctttattttgctttaccgtatgtttatatctaattgacatattgactaatgtttgaaagaattcaaccataagttaaaatctgaaggttatctttatcatgtttcatccctgtctgaagatttcctagtcttcttatgtaaatcacatgactcatgtccgtaaatgaactatgaaagatatcgatcagtttatgatcattgacatgtgatttcaaaacacagtgttcttttaaaaatctataatatgtcaaaatacaagttttttttttttacatcgttttagtaagttaatttcatttatttactttggagctatatttccacttagaaaaactaaggtaattttacaatatatgctgagattaaaaaccaaggtaaaaatgatcaaacatatatgaaattgagtcttagatttaatgaatttcactcgaaaataaatgatcagaagaatt

SEQ ID NO: 1206 - protein, 355 aa, Homo sapiens
VRGVRAATAAAVAATAASGLSRREAGGRAGAAAAVVRPPGRKCGRCRRLANFPGRKRRRRRRKGLGATTGGCGEAVSSLHPAPHSPSSVRPAGRRARRQRRGAGSAERPMSGAGEALAPGPVGPQRVAEAGGGQLGSTAQGKCDKDNTEKDITQATNSHFTHGEMQDQSIWGNPSDGELIRTQPQRLPQLQTSAQVPSGEEIGKIKNGHTGLSNGNGIHHGAKHGSADNRKLSAPVSQKMHRKIQSSLSVNSDISKKSKVNAVFSQKTGSSPEDCCVHCILACLFCEFLTLCNIVLGQASCGICTSEACCCCCGDEMGDDCNCPCDMDCGIMDACCESSDCLEICMECCGICFPS

SEQ ID NO: 1207 - DNA, 2335 bp, Homo sapiens
gcggccgcaagccgtcgccccctttaagagcctgctccgcgggactaacgttcgaacgggccctggcgcccctcctcgggctccgattggccgtgcgcggcgcacgagggcgcgccggccagccccggaacggttggcggcccttcgtgattggcggtcgagaagcctatataaggcgcggggcagccaggctgccctgtttagcgaccggacccgaaacggggaagttgtcttgtttggagaggttagtagagcagcgcgcgcgtcaccagagtcgtttctcttcggagtcttaggtgatcgagggtgtgcccagggggcggacttgtttgcgcctcccgttccctcccaatttccaaacgtgtcaccccggcgccgacggccctgtgcaggggaagcagatggagttcaagctggaggctcatcgcatcgtcagcatctctctgggcaagatctacaactcgcgggtccagcgcggcggcatcaagctgcataagaacctcctggtctcgctggtgctgcgcagcgcccgccaagtctacctgagcgacccgtgccccggcctctacctggccggtcccgctgggaccccggcgccgccaccgcagcagcagcccggggagccggcggccgggccacccgccggctggggagagccgcccccgcccgccgctcgtgcctcttggccggagaccgagccgcagccggagcgctcctccgtctcagacgcgccgcgggtaggggacgaggtgccggtggccacggtgactggagtcggggacgtttttcagggcggagaggcggacgcgacggaagctgcctggagccgcgtggaggggccgcgccaggcggcggccagagaagccgagggtaccgccggaggctggggcgtcttccccgaggtatctcgtgccgcgcgccgcccctgcggctgccccctaggcggggaggacccgccgggtacaccggccgcgaccccccgcgctgcctgctgctgcgcgccgcaaccagcggaggacgagccccccgcgccgcccgcggtgtgccccaggaagcgctgcgcggcgggggtgggcggcggcccagcgggctgcccggcgcccggctcgaccccgctcaagaagccccgccggaacttagagcagccgccgagtggaggagaggacgacgacgcggaggagatggagaccgggaacgtggctaacctcatcagcatcttcggttccagtttctcgggactcctacggaaaagccccgggggcggcagagaggaagaggagggagaggagagcggtccggaagccgccgagcccgggcagatctgctgcgataagccggtgctgagagacatgaacccctggagcacagccatcgtggccttctgagcccttggcccccctgcggggaggaggtggagcagcgggcgtccccgaagtgagggccaggcccttcccggctgcgaggacgcccagagaccgcgggcgctgagcgcgttgggcagactggttgcctctgggcatcgcaaactgcccccgggcgcatctggcttatctggagacctgggagcttgaggctcattggaagaggacgatcgttaacttttgtgtttgtgtatgtctgtgtatgtaagtttgtcttgtggcattaagactattttgctcttctggaatgcaccactccttccccagggtttaagagattgggggcagacagggactttcctctgccggctgcgtggagaaggaagcggctaaaaggtttgggccggggagttccccattcgttctccggggagggagggactttacacctacccctcaccggaaagctagacccgcttcagggccaggagtggcgtttccgcacaggatttcctaagacgagagggatttagccaagagcacagacttggattccttctgtccctccccacctttctctcccaatgaagaaacgtttatatcctgtgattactctaggaaaggggcgtattaacggtcctttgcttccccgcaggggagaaaaagcttgacgaacttcacagaagagttcaagcttggaaataatggagtttatagagaaaagatatatttttaaaagctctaggtcagaagtactacacagtgcttttaaaaagtgtttaatgagagtttacagacagaagcccgaagtggaaagaccttatggttttgtagatatggtgactccagtctttgttgtataaaggttgggggagctgataaggtttttgtacagtattttctccttcgttgtattgatttttgtataaaaatgtaacttctacgtgtctaacacgtattaaatattttgaagc

SEQ ID NO: 1208 - protein, 327 aa, Homo sapiens
MEFKLEAHRIVSISLGKIYNSRVQRGGIKLHKNLLVSLVLRSARQVYLSDPCPGLYLAGPAGTPAPPPQQQPGEPAAGPPAGWGEPPPPAARASWPETEPQPERSSVSDAPRVGDEVPVATVTGVGDVFQGGEADATEAAWSRVEGPRQAAAREAEGTAGGWGVFPEVSRAARRPCGCPLGGEDPPGTPAATPRAACCCAPQPAEDEPPAPPAVCPRKRCAAGVGGGPAGCPAPGSTPLKKPRRNLEQPPSGGEDDDAEEMETGNVANLISIFGSSFSGLLRKSPGGGREEEEGEESGPEAAEPGQICCDKPVLRDMNPWSTAIVAF

SEQ ID NO: 1209 - DNA, 3778 bp, Homo sapiens
cctttgcagaaacacccgaaaccctcctgccaggaagaccagggcctgggaagagggtcgctctccggccattctcccctcaccctcctcaccttcctcacatcctgtgccctgggggaccagcagctgcttccacccagaacaagcgggagcctgtgtcaggaaagcatgtcagagcagagctgccagatgtccgaactgcggctcctcctcctgggaaaatgccgctcgggaaaaagtgccacaggaaatgccattctgggcaaacatgtgttcaagtccaagttcagtgatcagacagtgatcaaaatgtgccagagagagagttgggtcctgagagaaaggaaggttgtggtaattgacacccctgaccttttctcctcaatagcttgtgctgaagacaagcaacgcaacatccaacactgcttggagctctctgctcccagcctccatgctctgctcttggtaattgccatcggccatttcacaagggaggatgaggaaacagccaagggcatccaacaagtgtttggagctgaagccaggaggcacatcattattgtcttcactcggaaggatgatttgggggatgacttgctgcaagatttcattgaaaaaaacaaacctctcaagcagttggttcaagactatgagggccgatactgcattttcaacaacaagaccaatagtaaggatgagcagatcacccaggtgttggagctccttcgcaaggttgagtctttggtgaatacgaacggaggaccctatcatgtgaacttcaaaactgaaggcagcaggtttcaagattgtgtgaatgaagctgcatctcaagagggagacaagccacagggcccaagggaaaggcagctgcagtccacaggacccgagcagaatccggggacatcagaactgacagtcctccttgtggggaaacgcggtgctggaaaaagtgcagcaggaaacagcattctggggaggcaggcctttcagaccggatttagtgagcagtcagtaacccagagcttcttgtctgagagcagaagctggagaaaaaagaaagtttcgatcattgatgctccggacatctcatctttaaagaacattgactcagaagttagaaaacacatctgtacaggcccccatgccttcctgctggtgacaccactgggcttttacactaagaatgatgaggcagtgctgagcaccatccaaaacaattttggagaaaaattctttgagtacatgatcatacttcttaccaggaaagaagatttaggggatcaggatctagatacgttcttaagaaacagcaataaagctctctatggtctcatccagaagtgtaaaaacagatatagtgccttcaactaccgggcaacaggagaagaagagcaaaggcaggcggacgagctcctggaaaaaattgagagcatggtgcatcagaatgggaacaagcattgtgttttcagagaaaaagaaaccctgaacattgtccttgtggggagaagcgggactgggaagagtgcgaccgggaactctatcctggggagcctcgtcttcacctctcggctccgggcccagccagtcaccaagaccagccagagtggcaggaggacatgggacggacaggaggtggtggttgtggacactccttccttcaaccagatgctggatgtcgaaaaggacccatcccggttagaagaggaggtcaagcgctgtttgtcctgctgtgaaaaaggggacacattttttgtcctggtgttccagctgggacgattcactgaagaggacaaaacagctgtggcgaaactggaggccatctttggagcagactttacgaaatacgcgattatgctgttcacccggaaggaagacctaggggcggggaatttggaagacttcatgaagaactcagataacaaagcccttcggcgcatttttaaaaagtgtgggcggcgagtttgtgcttttaacaacaaagaaacaggccaggcccaggaaacccaggtgaaagctcttttaacaaaggtcaatgatctgagaaaagaaagtgggtggtccgggtatccccatacacaggagaacgtcagcaaactaattaaaaatgtccaggaaatgtcccaagccgaaaaactccttaaaaatttaataggtattttacaataggtagccgaagtgcctggggtctcttcaattagagacaccctcaggttggggggaggggcggggcatggtacaacctgtgggaagggaagcgggttcatggctttgagggcctgagaggcaaatgcatcccgccttgtgatgtatcagctatttgtagataaataaattgcaggtgggggcgaatagtagggtattataaaggagaaagaagatacaaggtggggaaatctggaaaaagatttcagacattaggctgataataagtggtagaatcaagtcacaagaatcacctcacttgtgtaggtaggttggaatcaggatagacactgtgatcaaggctgaggccacctgggatgagaatatagatagtcgtacaacaacccaggggatccagatacatgagaccagggcagcgttcagcacactcctgggcatggcggaagcaggaagcagactccagagggcctccctgttgtccagggccgttggctccctgagctctcctgtctcctttgggatgcgacttagggctagagtgttcttttcttcacacgttagccattccttacggctcttcacgttccacgcctagatgtgaagtgggacatagtcttccattgctggctgtccctgaggaaacagacatgagtcttggaggttctgaatgattttattgctaattatcacagtgacatagactagaacagaaattagaagcatagtaagattgccaaaatcagagaatcttgcaaagttctgtaattctaagtgttgttctagatttcctctagagaaggttattagaatctccattgcgtttctctttctccttctctttcccttgaggttaggaaacaggttaaaactcagagaactccaataataatggtttaaaaacatcaggggcttcctgtatctcctgtcaggaagccgaggaataagcaggctggggctggtgggcgtcaacatcccagttttgttctatctttctgtcccacctgcactgggatgtggcttctacactcgaatttgcttcttggtttcaagacagtggtgttctttccatagctgagcagattattttgagaggtgggtgatatgtgagagagaaatctggaaccttcttctgggtagatacaggataagatagatacagggtaaaatgttgagcactttgtacatgctttgagagcataatctttgtcatctgtttttttcccctagacaatatcaggttaccgtcaacattaatccatttaaaaggacatggactgttgccattaatacttttggattccatataacccttaacacaataacttctagaaaatgtgtgtgccgtagacacaaagaagggaacaatagacaccagggtatacttgagggtggagggtggcaggagggtgaagattgaaaagctgcctattgcgtgttatgctggtttcctgggtgacaaaattacctgtacaccacacccctgtgacacacaacttactcatgtaacaaacctgtgcatgtaccccttgaacctgaaataaaaattggaaagtaaaaaaaagtgtgtaaatatatttagttgaatcaaataataaagatgaatcattatgaattc

SEQ ID NO: 1210 - protein, 721 aa, Homo sapiens
PLQKHPKPSCQEDQGLGRGSLSGHSPLTLLTFLTSCALGDQQLLPPRTSGSLCQESMSEQSCQMSELRLLLLGKCRSGKSATGNAILGKHVFKSKFSDQTVIKMCQRESWVLRERKVVVIDTPDLFSSIACAEDKQRNIQHCLELSAPSLHALLLVIAIGHFTREDEETAKGIQQVFGAEARRHIIIVFTRKDDLGDDLLQDFIEKNKPLKQLVQDYEGRYCIFNNKTNSKDEQITQVLELLRKVESLVNTNGGPYHVNFKTEGSRFQDCVNEAASQEGDKPQGPRERQLQSTGPEQNPGTSELTVLLVGKRGAGKSAAGNSILGRQAFQTGFSEQSVTQSFLSESRSWRKKKVSIIDAPDISSLKNIDSEVRKHICTGPHAFLLVTPLGFYTKNDEAVLSTIQNNFGEKFFEYMIILLTRKEDLGDQDLDTFLRNSNKALYGLIQKCKNRYSAFNYRATGEEEQRQADELLEKIESMVHQNGNKHCVFREKETLNIVLVGRSGTGKSATGNSILGSLVFTSRLRAQPVTKTSQSGRRTWDGQEVVVVDTPSFNQMLDVEKDPSRLEEEVKRCLSCCEKGDTFFVLVFQLGRFTEEDKTAVAKLEAIFGADFTKYAIMLFTRKEDLGAGNLEDFMKNSDNKALRRIFKKCGRRVCAFNNKETGQAQETQVKALLTKVNDLRKESGWSGYPHTQENVSKLIKNVQEMSQAEKLLKNLIGILQ

SEQ ID NO: 1211 - DNA, 1812 bp, Homo sapiens
gttcccaatcagtttccagccaacaccagggtgtcctagtccgcagaggtgtgggggacacactccataatctctacttttctttttgtgcagctgagtcatggagctttcagccccagcacatggctcctccttaactgcgtctgctcaacctccctcagccctgtgaacagcatccccgcacacagacgcagagcaggactctctctgctgccacttcaccttcctgagagaggaccagcggccagagcctcagtgactgccaccctggaggacagggcacaacaaccgtttctggagagaatgggaggattccagaggggcaaatatggaactatggctgaaggtagatcagaagataacttgtctgcaacaccaccggcattgaggattatcctagtgggcaaaacaggctgcgggaaaagtgccacagggaacagcatccttggccagcccgtgtttgagtccaagctgagggcccagtcagtgaccaggacgtgccaggtgaaaacaggaacatggaacgggaggaaagtcctggtggttgacacgccctccatctttgagtcacaggccgatacccaagagctgtacaagaacatcggggactgctacctgctctctgccccggggccccacgtcctgcttctggtgatccagctggggcgtttcactgctcaggacacagtggccatcaggaaggtgaaagaggtctttgggacaggggccatgagacatgtggtcatcctcttcacccacaaagaggacttagggggccaggccctggatgactatgtagcaaacacggacaactgcagcctgaaagacctggtgcgggagtgtgagagaaggtactgtgccttcaacaactggggctctgtggaggagcagaggcagcagcaggcagagctcctggctgtgattgagaggctggggagggagcgagagggctccttccacagcaatgacctcttcttggatgcccagctgctccaaagaactggagctggggcctgccaggaagactacaggcagtaccaggccaaagtggaatggcaggtggagaagcacaagcaagagctgagggagaacgagagtaactgggcatacaaggcgctcctcagagtcaaacacttgatgcttttgcattatgagatttttgtttttctattgttgtgcagcatactttttttcattatttttctgttcatctttcattacatttaaatctctggaccctggagcacttctaatgtatcaccccatggagtcattgttctaataatcaccaattcagactcagatcctcgtggtctatggagcatgctgcttgctgtctgtgcagctcccatttccccttcttcctgatagacttggagctgtgtgcctccactccaaggctgcctgcctgctgtaaacactattccactctgtctgccaacaactgcttcaggaatgggcctgagatcccatgcaggtccctgagaagtgagtaaaagtccgcagaggtggggatggaagatctctccttagatagaacctgtcttcctccctggcattgtggggtctgggcgtgacactgggactctcagcagctttgtgctgccaacctgagattgaaggcagtgcctcagagcagcacagagagttggggccccctgagccctgagccaccagccctgcagcctgccctatctccgcatttccagttgtattagccaatagatttcctacttatttaagctatttgagctccgggtctcttctacctgcattctaaaacattcaaagtaataaaaatttctccacatt

SEQ ID NO: 1212 - protein, 307 aa, Homo sapiens
MGGFQRGKYGTMAEGRSEDNLSATPPALRIILVGKTGCGKSATGNSILGQPVFESKLRAQSVTRTCQVKTGTWNGRKVLVVDTPSIFESQADTQELYKNIGDCYLLSAPGPHVLLLVIQLGRFTAQDTVAIRKVKEVFGTGAMRHVVILFTHKEDLGGQALDDYVANTDNCSLKDLVRECERRYCAFNNWGSVEEQRQQQAELLAVIERLGREREGSFHSNDLFLDAQLLQRTGAGACQEDYRQYQAKVEWQVEKHKQELRENESNWAYKALLRVKHLMLLHYEIFVFLLLCSILFFIIFLFIFHYI

SEQ ID NO: 1213 - DNA, 5857 bp, Homo sapiens
ggagccgcggcggcgggcagcgcgggacccagtactatggctgtgtactgctatgcgctcaatagcctggtgatcatgaatagcgccaacgagatgaagagcggcggcggcccggggcccagtggcagcgagacgcccccgcccccgaggagggcagtgctgagccccggcagcgttttcagccccgggagaggcgcctctttcctcttccccccagccgagtcgctgtcccccgaggagccccggagccccgggggctggcggagcggccggcgcaggctgaatagtagcagcggcagtggcagcggcagcagcggcagtagcgtgagcagcccaagttgggctggtcgcctgcgaggggaccggcagcaggtggtggcagccggtaccctctccccgccagggccggaggaggccaagaggaagctgcggatcttgcagcgcgagttgcagaacgtgcaggtgaaccagaaagtgggcatgtttgaggcgcacatccaggcacagagctccgccattcaagcgccccgcagcccgcgtttgggcagggctcgctcgccctccccgtgccccttccgcagcagcagtcagccccctggaagggtcctggttcagggcgcccggagcgaggaacggaggacaaagtcctggggggagcaatgtccagagacttcaggaaccgactccgggaggaaaggagggcccagcctatgctcctcgcaggtgaagaaaggaatgccacctcttcccggccgggctgcccctacaggatcagaggctcagggtccatccgcttttgtaaggatggagaagggtatccctgccagtccccgctgtggctcacccacagctatggaaattgacaaaaggggctctcctaccccgggaactcggagctgcctagctccctcattggggctgttcggagctagcttaacgatggccacggaagtggcagcgagagttacatccactgggccacaccgtccacaggatcttgccctcactgagccgtctgggagagcccgtgagcttgaggacctgcagcccccagaggccctggtggagaggcaggggcagtttctgggcagtgagacaagcccagccccagaaaggggcgggccccgcgatggagaaccccctgggaagatggggaaaggatatctgccctgtggcatgccgggctctggggagcctgaagtgggcaaaaggccagaggagacgactgtgagcgtgcaaagcgcagagtcctctgattccctgagctggtccaggctgcccagggccctggcctccgtaggccctgaggaggcccgaagtggggcccccgtgggcggggggcgttggcagctctccgacagagtggagggagggtccccaacgctgggcttgcttgggggcagcccctcagcacagccggggaccgggaatgtggaggcgggaattccttctggcagaatgctggagcctttgccctgttgggacgctgcgaaagatctgaaagaacctcagtgccctcctggggacagggtgggtgtgcagcctgggaactccagggtttggcagggcaccatggagaaagccggtttggcttggacgcgtggcacaggggtgcaatcagaggggacttgggaaagccagcggcaggacagtgatgccctcccaagtccggagctgctaccccaagatccggacaagcctttcctgaggaaggcctgcagccccagcaacatacctgctgtcatcattacagacatgggcacccaggaggatggggccttggaggagacgcagggaagccctcggggcaacctgcccctgaggaaactgtcctcttcctcggcctcctccacgggcttctcctcatcctacgaagactcagaggaggacatctccagtgaccctgagcgcaccctggaccccaactcagccttcctgcataccctggaccagcagaaacctagagtgagcaaatcatggaggaagataaaaaacatggtgcactggtctcccttcgtcatgtccttcaagaagaagtacccctggatccagctggcaggacacgcagggagtttcaaggcagctgccaatggcaggatcctgaagaagcactgtgagtcagagcagcgctgcctggaccggctgatggtggatgtgctgaggcccttcgtacctgcctaccatggggatgtggtgaaggacggggagcgctacaaccagatggacgacctgctggccgacttcgactcgccctgtgtgatggactgcaagatgggaatcaggacctacctggaggaggagctcacgaaggcccggaagaagcccagcctgcggaaggacatgtaccagaagatgatcgaggtggaccccgaggcccccaccgaggaggaaaaagcacagcgggctgtgaccaagccacggtacatgcagtggcgggagaccatcagctccacggccaccctggggttcaggatcgagggaatcaagaaagaagacggcaccgtgaaccgggacttcaagaagaccaaaacgagggagcaggtcaccgaggccttcagagagttcactaaaggaaaccataacatcctgatcgcctatcgggaccggctgaaggccattcgaaccactctagaagtttctcccttcttcaagtgccacgaggtcattggcagctccctcctcttcatccacgacaagaaggaacaggccaaagtgtggatgatcgactttgggaaaaccacgcccctgcctgagggccagaccctgcagcatgacgtcccctggcaggaggggaaccgggaggatggctacctctcggggctcaataacctcgtcgacatcctgaccgagatgtcccaggatgccccactcgcctgagctgcccacgccctccctggcccccgcctgggcctcctttcctcctcctgtgcttcctttctcgttcctaacttttccttcacttacacctgactgaccctcctgaactgcactacaagacactttgtagaagaggagatgagagtttctagtcattttcctaacttcagggcttggaggtggtgtttgcactgctttttgtagagagggtcacctactagaagagaaatgcccagtcttagaggtgggtcaggtgtagagctggagggggtccctggctgctgaggggaccctaccagatgagccctgcctctgggagccccctaggaagcaccagcctggacctaccacctgcggaggcctgctgccccctggcggccagtgctgttagagtgctgccaagcacagccttatttctgccggggcctccccaccggagagcccagggggccggccgggttcctggtccctggctgggagcagggctttctggtagttggggcacaaaaccatcggggaaccacatgttgactgtgagcaaagtgtcttccgattagcagcctcagggatgccctggtggcctctccagggctgctcaggcaaggccccccacccatctggtatggaaacctgccggctccaggccagacccaggagccaagagaaggctgaagccagcttggctgtgttctctgatctaggccttcccagaggaggcgagcagaagctgtgccacttggaattgcaacccatgagttcagaaggcacactctgccatgctgagctccaagggtgctaccaggggaagatgggatctatagagtctctgggccctggccccagggaggagcacatttttcttgaccctcacctacctggtgctagttggtcaaccctgcctgcatacatgggctcctgtcatggggcccagagtcccttgcagatatagaaataggggaggagctcaggtctgcgccaggcaggaagaaggcaggcttctggcttccagaggtgccgcggtggcctcctggcatcatttgttattgcctctgaaacaagccttactgcctggagggcttagattcctgcttctccaatgtagtgtgggtatcttgtagggtatgtggtggatgccagggcgtgctccaggcacctcttcctgaagtctctgcatttggagattcgtggagaacctatttaagcccaattttaactgaaagccagtgagtctgatatggaagggaatgtaaaatttgcctgacttcttaagaacaaaacccccagctctgtgccccatgctccttggggcttgccacccactcctttgctgtcagaggtacaggagctgggagagtccaggagctagggacacagagggagactatggaccaaggtgtgtgtgtctggaggaaccactgcccaccccaccaccccggggtctctggggaactgtcaacctgcccacgggacatgtacatttccccttttgtgctggaagtgtgagtgacacttgctgggggtggagggtgggacacatgaggatgtataagtacagattttaaaaaaggaaatcaacttacacttcctggctcttgtttaaaacagtggtgagctcctgtgtgggccgacttgctaaaggtcacacacgcgcccggtggagcacgagagacctcgtggcagcatgtgatctggaaggcaggcaggacgggggcgttggggagccaaagtcaactctgggcctctggagctatagtgacttttgggctagaagggaccctggtggtctgtgcttcagccatttgcagggcaggggcatcattaattcagacgtaaagattctatgaatatggactggccaaaagttatccttactccatctgtgaaagaagtttgctaaagcaaatcatgatatgaacaaaaattacaggggacctgtttaagagaacaaaatgttccaagcactttaggcagacaccagctgtttgcaaacaatgtgctaatatgcaaatgatgtgcttattaaaggaggcccatggggcctcttattggcaatacttggctgtgggttacattaaatatgtgaacatagtatgaagtagcatcattttagggttattctgttacttagggtttttgttttctgttttttttttctctttttttgtatttaccgtgctagttctcttctacacctactctgtctctcaagccattttgccactcgcttccctgccatctggcccttccctttgtctcagtgggatagatggattgtgaaatggaatctcccagaacccctgccctggcagcctggaagaccgtgcctgcccagccctcgtcaccacagggactccttgggtcctggcagtgcatgtgccagcaggcaggacaaactctgtgtacctgtgcccaggtgaatgggcgcagggtcctcttgccctgtcctgcggggggccccacgagttcctggcattcagcactgcttagcattctcggaaggtttcttcaactgcttgcttttcccaggcttgcctttagtgtcatgtaagacatttttaagttatatttattttgttgggttttaaaattgcacagaacactaagaccgaaaggctggactcttgtttctccttgaaagctttgcctttgttttgaacttcctttcccacttggtagaaagagcccagaagcagccctggccctgtaagatggactctttcatccttcagttgtatttagctttgagtttctctgcatctgtccaccccatgtgtatataacccagcccctggctctggggtggtcacctcgtcagtgccttttgttctggaggagaggaccccccccgcctgccgagaggctctcttcctgttctgcacccctctccccatgggaccttggagaaaactgaactgttacaaacccctgcacagtgcctgtcaaacagatgcaaaccttcctgaataaagccttggagacc

SEQ ID NO: 1214 - protein, 946 aa, Homo sapiens
MAVYCYALNSLVIMNSANEMKSGGGPGPSGSETPPPPRRAVLSPGSVFSPGRGASFLFPPAESLSPEEPRSPGGWRSGRRRLNSSSGSGSGSSGSSVSSPSWAGRLRGDRQQVVAAGTLSPPGPEEAKRKLRILQRELQNVQVNQKVGMFEAHIQAQSSAIQAPRSPRLGRARSPSPCPFRSSSQPPGRVLVQGARSEERRTKSWGEQCPETSGTDSGRKGGPSLCSSQVKKGMPPLPGRAAPTGSEAQGPSAFVRMEKGIPASPRCGSPTAMEIDKRGSPTPGTRSCLAPSLGLFGASLTMATEVAARVTSTGPHRPQDLALTEPSGRARELEDLQPPEALVERQGQFLGSETSPAPERGGPRDGEPPGKMGKGYLPCGMPGSGEPEVGKRPEETTVSVQSAESSDSLSWSRLPRALASVGPEEARSGAPVGGGRWQLSDRVEGGSPTLGLLGGSPSAQPGTGNVEAGIPSGRMLEPLPCWDAAKDLKEPQCPPGDRVGVQPGNSRVWQGTMEKAGLAWTRGTGVQSEGTWESQRQDSDALPSPELLPQDPDKPFLRKACSPSNIPAVIITDMGTQEDGALEETQGSPRGNLPLRKLSSSSASSTGFSSSYEDSEEDISSDPERTLDPNSAFLHTLDQQKPRVSKSWRKIKNMVHWSPFVMSFKKKYPWIQLAGHAGSFKAAANGRILKKHCESEQRCLDRLMVDVLRPFVPAYHGDVVKDGERYNQMDDLLADFDSPCVMDCKMGIRTYLEEELTKARKKPSLRKDMYQKMIEVDPEAPTEEEKAQRAVTKPRYMQWRETISSTATLGFRIEGIKKEDGTVNRDFKKTKTREQVTEAFREFTKGNHNILIAYRDRLKAIRTTLEVSPFFKCHEVIGSSLLFIHDKKEQAKVWMIDFGKTTPLPEGQTLQHDVPWQEGNREDGYLSGLNNLVDILTEMSQDAPLA

SEQ ID NO: 1215 - DNA, 2044 bp, Homo sapiens
gtgcgcccgagccccgccgaaccgaggccacccggagccgtgcccagtccacgccggccgtgcccggcggccttaagaacccggcaacctctgccttcttccctcttccactcggagtcgcgctccgcgcgccctcactgcagcccctgcgtcgccgggaccctcgcgcgcgaccgccgaatcgctcctgcagcagagccaacatgcccatcactcggatgcgcatgagaccctggctagagatgcagattaattccaaccaaatcccggggctcatctggattaataaagaggagatgatcttccagatcccatggaagcatgctgccaagcatggctgggacatcaacaaggatgcctgtttgttccggagctgggccattcacacaggccgatacaaagcaggggaaaaggagccagatcccaagacgtggaaggccaactttcgctgtgccatgaactccctgccagatatcgaggaggtgaaagaccagagcaggaacaagggcagctcagctgtgcgagtgtaccggatgcttccacctctcaccaagaaccagagaaaagaaagaaagtcgaagtccagccgagatgctaagagcaaggccaagaggaagtcatgtggggattccagccctgataccttctctgatggactcagcagctccactctgcctgatgaccacagcagctacacagttccaggctacatgcaggacttggaggtggagcaggccctgactccagcactgtcgccatgtgctgtcagcagcactctccccgactggcacatcccagtggaagttgtgccggacagcaccagtgatctgtacaacttccaggtgtcacccatgccctccacctctgaagctacaacagatgaggatgaggaagggaaattacctgaggacatcatgaagctcttggagcagtcggagtggcagccaacaaacgtggatgggaaggggtacctactcaatgaacctggagtccagcccacctctgtctatggagactttagctgtaaggaggagccagaaattgacagcccagggggggatattgggctgagtctacagcgtgtcttcacagatctgaagaacatggatgccacctggctggacagcctgctgaccccagtccggttgccctccatccaggccattccctgtgcaccgtagcagggcccctgggcccctcttattcctctaggcaagcaggacctggcatcatggtggatatggtgcagagaagctggacttctgtgggcccctcaacagccaagtgtgaccccactgccaagtggggatggggcctccctccttgggtcattgacctctcagggcctggcaggccagtgtctgggtttttcttgtggtgtaaagctggccctgcctcctgggaagatgaggttctgagaccagtgtatcaggtcagggacttggacaggagtcagtgtctggctttttcctctgagcccagctgcctggagagggtctcgctgtcactggctggctcctaggggaacagaccagtgaccccagaaaagcataacaccaatcccagggctggctctgcactaagagaaaattgcactaaatgaatctcgttcccaaagaactacccccttttcagctgagccctggggactgttccaaagccagtgaaatgtgaaggaaagtggggtccttcggggcgatgctccctcagcctcagaggagctctaccctgctccctgctttggctgaggggcttgggaaaaaaacttggcactttttcgtgtggatcttgccacatttctgatcagaggtgtacactaacatttcccccgagctcttggcctttgcatttatttatacagtgccttgctcggcgcccaccaccccctcaagccccagcagccctcaacaggcccagggagggaagtgtgagcgccttggtatgacttaaaattggaaatgtcatctaaccattaagtcatgtgtgaacacataaggacgtgtgtaaatatgtacatttgtctttttataaaaagtaaattgtt

SEQ ID NO: 1216 - protein, 325 aa, Homo sapiens
MPITRMRMRPWLEMQINSNQIPGLIWINKEEMIFQIPWKHAAKHGWDINKDACLFRSWAIHTGRYKAGEKEPDPKTWKANFRCAMNSLPDIEEVKDQSRNKGSSAVRVYRMLPPLTKNQRKERKSKSSRDAKSKAKRKSCGDSSPDTFSDGLSSSTLPDDHSSYTVPGYMQDLEVEQALTPALSPCAVSSTLPDWHIPVEVVPDSTSDLYNFQVSPMPSTSEATTDEDEEGKLPEDIMKLLEQSEWQPTNVDGKGYLLNEPGVQPTSVYGDFSCKEEPEIDSPGGDIGLSLQRVFTDLKNMDATWLDSLLTPVRLPSIQAIPCAP

SEQ ID NO: 1217 - DNA, 1624 bp, Homo sapiens
aggaagccagcactagtcaagtgactctaagaagggccattttcccttgttgtctttgaaaatacttcattttcttagcatttcaggagattataacatcctgtatttcagtttctgagagctttactgactgatttccctattcaaaacaatcctcatttcctacatttctgaagatctcaagatctggactactgttgaagaaattcccagtaaggctcacttatatctttagagatggcaaataactacaagaaaattgttctactgaaaggattagaggtcatcaatgattatcattttagaattgttaagtccttactgagtaacgatttaaaacttaatccaaaaatgaaagaagagtatgacaaaattcagattgctgacttgatggaggaaaagttcccaggtgatgccggtttgggcaaactaatagaattcttcaaagaaataccaacactgggagaccttgctgaaactcttaaaagagaaaagttaaaagttgcaaataaaattgaatccattccagtcaaaggaataatcccatctaaaaagacgaaacagaaagaagtgtatcctgctacacctgcatgcaccccaagcaaccgtctcacagctaaaggagcagaggagactcttggacctcagaaaagaaaaaaaccatctgaagaagagactggaaccaaaaggagtaagatgtccaaagagcagactcggccttcctgctctgcaggagccagcacgtccacagccatgggccgttccccacctccccagacctcatcatcagctccacccaacacttcctcaactgagagcctaaaaccattggccaaccgtcacgcaactgccagtaaaaatattttccgagaagacccaataatcgcgatggtactaaatgcaacaaaagtatttaaatatgaatcctcagaaaatgagcaaagaagaatgtttcatgctacagtggctacgcagacacagttctttcatgtgaaggttttaaacatcaacttgaagaggaaattcattaaaaagagaatcatcattatatcaaattattccaaacgtaatagtctcctagaggtgaatgaagcctcttctgtatctgaagctggtcctgaccaaacgtttgaggttccaaaggacatcatcagaagagcaaagaaaattccgaagatcaatattcttcacaaacaaacttcaggatatattgtatatggattatttatgctacatacgaaaattgtaaataggaagacgacaatctatgaaattcaggataaaacaggaagtatggctgtagtaggaaaaggagaatgccacaatatcccctgtgaaaaaggagataagcttcgactcttctgctttcgactgagaaagagggaaaatatgtcaaaactgatgtcagaaatgcatagtttcatccagatacagaaaaatacaaaccagagaagccatgactccaggagcatggcactaccccaggaacagagtcagcatccaaaaccttcagaggccagcacaaccctacctgaaagccatctcaagactcctcagatgccaccaacaaccccatccagcagttccttcaccaaggtcaccaaggacaaggatatcaaataac

SEQ ID NO: 1218 - protein, 461 aa, Homo sapiens
MANNYKKIVLLKGLEVINDYHFRIVKSLLSNDLKLNPKMKEEYDKIQIADLMEEKFPGDAGLGKLIEFFKEIPTLGDLAETLKREKLKVANKIESIPVKGIIPSKKTKQKEVYPATPACTPSNRLTAKGAEETLGPQKRKKPSEEETGTKRSKMSKEQTRPSCSAGASTSTAMGRSPPPQTSSSAPPNTSSTESLKPLANRHATASKNIFREDPIIAMVLNATKVFKYESSENEQRRMFHATVATQTQFFHVKVLNINLKRKFIKKRIIIISNYSKRNSLLEVNEASSVSEAGPDQTFEVPKDIIRRAKKIPKINILHKQTSGYIVYGLFMLHTKIVNRKTTIYEIQDKTGSMAVVGKGECHNIPCEKGDKLRLFCFRLRKRENMSKLMSEMHSFIQIQKNTNQRSHDSRSMALPQEQSQHPKPSEASTTLPESHLKTPQMPPTTPSSSSFTKVTKDKDIK

SEQ ID NO: 1219 - DNA, 1722 bp, Homo sapiens
aggaagccagcactagtcaagtgactctaagaagggccattttcccttgttgtctttgaaaatacttcattttcttagcatttcaggagattataacatcctgtatttcagtttctgagagctttactgactgatttccctattcaaaacaatcctcatttcctacatttctgaagatctcaagatctggactactgttgaagaaattcccagtaaggctcacttatatctttagagatggcaaataactacaagaaaattgttctactgaaaggattagaggtcatcaatgattatcattttagaattgttaagtccttactgagtaacgatttaaaacttaatccaaaaatgaaagaagagtatgacaaaattcagattgctgacttgatggaggaaaagttcccaggtgatgccggtttgggcaaactaatagaattcttcaaagaaataccaacactgggagaccttgctgaaactcttaaaagagaaaagttaaaagtcaaaggaataatcccatctaaaaagacgaaacagaaagaagtgtatcctgctacacctgcatgcaccccaagcaaccgtctcacagctaaaggagcagaggagactcttggacctcagaaaagaaaaaaaccatctgaagaagagactggaaccaaaaggagtaagatgtccaaagagcagactcggccttcctgctctgcaggagccagcacgtccacagccatgggccgttccccacctccccagacctcatcatcagctccacccaacacttcctcaactgagagcctaaaaccattggccaaccgtcacgcaactgccagtaaaaatattttccgagaagacccaataatcgcgatggtactaaatgcaacaaaagtatttaaatatgaatcctcagaaaatgagcaaagaagaatgtttcatgctacagtggctacgcagacacagttctttcatgtgaaggttttaaacatcaacttgaagaggaaattcattaaaaagagaatcatcattatatcaaattattccaaacgtaatagtctcctagaggtgaatgaagcctcttctgtatctgaagctggtcctgaccaaacgtttgaggttccaaaggacatcatcagaagagcaaagaaaattccgaagatcaatattcttcacaaacaaacttcaggatatattgtatatggattatttatgctacatacgaaaattgtaaataggaagacgacaatctatgaaattcaggataaaacaggaagtatggctgtagtaggaaaaggagaatgccacaatatcccctgtgaaaaaggagataagcttcgactcttctgctttcgactgagaaagagggaaaatatgtcaaaactgatgtcagaaatgcatagtttcatccagatacagaaaaatacaaaccagagaagccatgactccaggagcatggcactaccccaggaacagagtcagcatccaaaaccttcagaggccagcacaaccctacctgaaagccatctcaagactcctcagatgccaccaacaaccccatccagcagttccttcaccaagaaggatgaaacccacccaggagcacagtcatcgcctgcaaactttagaatcacctcaccaactgtggcccctcctctttcttctgacacttccaccaaccgccatccagcagttccttaaataaggtcaccaaggacaaggatatcaaataac

SEQ ID NO: 1220 - protein, 483 aa, Homo sapiens
MANNYKKIVLLKGLEVINDYHFRIVKSLLSNDLKLNPKMKEEYDKIQIADLMEEKFPGDAGLGKLIEFFKEIPTLGDLAETLKREKLKVKGIIPSKKTKQKEVYPATPACTPSNRLTAKGAEETLGPQKRKKPSEEETGTKRSKMSKEQTRPSCSAGASTSTAMGRSPPPQTSSSAPPNTSSTESLKPLANRHATASKNIFREDPIIAMVLNATKVFKYESSENEQRRMFHATVATQTQFFHVKVLNINLKRKFIKKRIIIISNYSKRNSLLEVNEASSVSEAGPDQTFEVPKDIIRRAKKIPKINILHKQTSGYIVYGLFMLHTKIVNRKTTIYEIQDKTGSMAVVGKGECHNIPCEKGDKLRLFCFRLRKRENMSKLMSEMHSFIQIQKNTNQRSHDSRSMALPQEQSQHPKPSEASTTLPESHLKTPQMPPTTPSSSSFTKKDETHPGAQSSPANFRITSPTVAPPLSSDTSTNRHPAVP

SEQ ID NO: 1221 - DNA, 1749 bp, Homo sapiens
aggaagccagcactagtcaagtgactctaagaagggccattttcccttgttgtctttgaaaatacttcattttcttagcatttcaggagattataacatcctgtatttcagtttctgagagctttactgactgatttccctattcaaaacaatcctcatttcctacatttctgaagatctcaagatctggactactgttgaagaaattcccagtaaggctcacttatatctttagagatggcaaataactacaagaaaattgttctactgaaaggattagaggtcatcaatgattatcattttagaattgttaagtccttactgagtaacgatttaaaacttaatccaaaaatgaaagaagagtatgacaaaattcagattgctgacttgatggaggaaaagttcccaggtgatgccggtttgggcaaactaatagaattcttcaaagaaataccaacactgggagaccttgctgaaactcttaaaagagaaaagttaaaagttgcaaataaaattgaatccattccagtcaaaggaataatcccatctaaaaagacgaaacagaaagaagtgtatcctgctacacctgcatgcaccccaagcaaccgtctcacagctaaaggagcagaggagactcttggacctcagaaaagaaaaaaaccatctgaagaagagactggaaccaaaaggagtaagatgtccaaagagcagactcggccttcctgctctgcaggagccagcacgtccacagccatgggccgttccccacctccccagacctcatcatcagctccacccaacacttcctcaactgagagcctaaaaccattggccaaccgtcacgcaactgccagtaaaaatattttccgagaagacccaataatcgcgatggtactaaatgcaacaaaagtatttaaatatgaatcctcagaaaatgagcaaagaagaatgtttcatgctacagtggctacgcagacacagttctttcatgtgaaggttttaaacatcaacttgaagaggaaattcattaaaaagagaatcatcattatatcaaattattccaaacgtaatagtctcctagaggtgaatgaagcctcttctgtatctgaagctggtcctgaccaaacgtttgaggttccaaaggacatcatcagaagagcaaagaaaattccgaagatcaatattcttcacaaacaaacttcaggatatattgtatatggattatttatgctacatacgaaaattgtaaataggaagacgacaatctatgaaattcaggataaaacaggaagtatggctgtagtaggaaaaggagaatgccacaatatcccctgtgaaaaaggagataagcttcgactcttctgctttcgactgagaaagagggaaaatatgtcaaaactgatgtcagaaatgcatagtttcatccagatacagaaaaatacaaaccagagaagccatgactccaggagcatggcactaccccaggaacagagtcagcatccaaaaccttcagaggccagcacaaccctacctgaaagccatctcaagactcctcagatgccaccaacaaccccatccagcagttccttcaccaagaaggatgaaacccacccaggagcacagtcatcgcctgcaaactttagaatcacctcaccaactgtggcccctcctctttcttctgacacttccaccaaccgccatccagcagttccttaaataaggtcaccaaggacaaggatatcaaataac

SEQ ID NO: 1222 - protein, 492 aa, Homo sapiens
MANNYKKIVLLKGLEVINDYHFRIVKSLLSNDLKLNPKMKEEYDKIQIADLMEEKFPGDAGLGKLIEFFKEIPTLGDLAETLKREKLKVANKIESIPVKGIIPSKKTKQKEVYPATPACTPSNRLTAKGAEETLGPQKRKKPSEEETGTKRSKMSKEQTRPSCSAGASTSTAMGRSPPPQTSSSAPPNTSSTESLKPLANRHATASKNIFREDPIIAMVLNATKVFKYESSENEQRRMFHATVATQTQFFHVKVLNINLKRKFIKKRIIIISNYSKRNSLLEVNEASSVSEAGPDQTFEVPKDIIRRAKKIPKINILHKQTSGYIVYGLFMLHTKIVNRKTTIYEIQDKTGSMAVVGKGECHNIPCEKGDKLRLFCFRLRKRENMSKLMSEMHSFIQIQKNTNQRSHDSRSMALPQEQSQHPKPSEASTTLPESHLKTPQMPPTTPSSSSFTKKDETHPGAQSSPANFRITSPTVAPPLSSDTSTNRHPAVP

SEQ ID NO: 1223 - DNA, 1631 bp, Homo sapiens
agcactagtcaagtgactctaagaagggccattttcccttgttgtctttgaaaatacttcattttcttagcatttcaggagattataacatcctgtatttcagtttctgagagctttactgactgatttccctattcaaaacaatcctcatttcctacatttctgaagatctcaagatctggactactgttgaagaaattcccagtaaggctcacttatatctttagagatggcaaataactacaagaaaattgttctactgaaaggattagaggtcatcaatgattatcattttagaattgttaagtccttactgagtaacgatttaaaacttaatccaaaaatgaaagaagagtatgacaaaattcagattgctgacttgatggaggaaaagttcccaggtgatgccggtttgggcaaactaatagaattcttcaaagaaataccaacactgggagaccttgctgaaactcttaaaagagaaaagttaaaagttgcaaataaaattgaatccattccagtcaaaggaataatcccatctaaaaagacgaaacagaaagaagtgtatcctgctacacctgcatgcaccccaagcaaccgtctcacagctaaaggagcagaggagactcttggacctcagaaaagaaaaaaaccatctgaagaagagactggaaccaaaaggagtaagatgtccaaagagcagactcggccttcctgctctgcaggagccagcacgtccacagccatgggccgttccccacctccccagacctcatcatcagctccacccaacacttcctcaactgaggcatatttgatgaacttgacattatctctgactgcaggaagttttctgtcctgtgctgtttggggaagagacagagaactgcggaatctggaactttcagcaacagactcactgtctactgcccccatctattatacacccattccctttgctcactaatttgttcaagtttctctgacatacaccatgctcctttttcctttaggattttcacacaccatatttctttcacctttaaactcttacctggccaaccctatccaccctctggatcccaatattgagatcttatcctcagggaatcctcacttagacccctgtaacaggttaaatcttcatggtgttctgtttcctaggaacttctttcttttctactgtttatgacaactgaagttaataagtgtttatctttcccacctactcaaagtagttccaagattagggctagtttgtaattctgtggaccactgtaaacgagggcctagttcagtgtctgcctcatgggaagcttccaataaatacctttgctcaacgaaaaaatgaaaacccagtggctcacgcctgtaatcccagcactttgggaggccgaggcaggtggattgcctgaggtcaggagtttgagactagtctggccaacatggtgaaacactatctctactaaaaatacaaaaaaattagctgggtatggtggcttacgcctataatcccagctactcaggaggctgaggcaggggaattgcttgaaccagggaggtggaggttgcagtgagctgagatcgcaccactgcactccagcctgggtgacagagcgagactccatctc

SEQ ID NO: 1224 - protein, 245 aa, Homo sapiens
MANNYKKIVLLKGLEVINDYHFRIVKSLLSNDLKLNPKMKEEYDKIQIADLMEEKFPGDAGLGKLIEFFKEIPTLGDLAETLKREKLKVANKIESIPVKGIIPSKKTKQKEVYPATPACTPSNRLTAKGAEETLGPQKRKKPSEEETGTKRSKMSKEQTRPSCSAGASTSTAMGRSPPPQTSSSAPPNTSSTEAYLMNLTLSLTAGSFLSCAVWGRDRELRNLELSATDSLSTAPIYYTPIPFAH

SEQ ID NO: 1225 - DNA, 1778 bp, Homo sapiens
agaaccccgcggggtctgagcagcccagcgtgcccattccagcgcccgcgtccccgcagcatgccgcgcccccgcctgctggccgcgctgtgcggcgcgctgctctgcgcccccagcctcctcgtcgccctggatatctgttccaaaaacccctgccacaacggtggtttatgcgaggagatttcccaagaagtgcgaggagatgtcttcccctcgtacacctgcacgtgccttaagggctacgcgggcaaccactgtgagacgaaatgtgtcgagccactgggcctggagaatgggaacattgccaactcacagatcgccgcctcgtctgtgcgtgtgaccttcttgggtttgcagcattgggtcccggagctggcccgcctgaaccgcgcaggcatggtcaatgcctggacacccagcagcaatgacgataacccctggatccaggtgaacctgctgcggaggatgtgggtaacaggtgtggtgacgcagggtgccagccgcttggccagtcatgagtacctgaaggccttcaaggtggcctacagccttaatggacacgaattcgatttcatccatgatgttaataaaaaacacaaggagtttgtgggtaactggaacaaaaacgcggtgcatgtcaacctgtttgagacccctgtggaggctcagtacgtgagattgtaccccacgagctgccacacggcctgcactctgcgctttgagctactgggctgtgagctgaacggatgcgccaatcccctgggcctgaagaataacagcatccctgacaagcagatcacggcctccagcagctacaagacctggggcttgcatctcttcagctggaacccctcctatgcacggctggacaagcagggcaacttcaacgcctgggttgcggggagctacggtaacgatcagtggctgcagatcttccctggcaactgggacaaccactcccacaagaagaacttgtttgagacgcccatcctggctcgctatgtgcgcatcctgcctgtagcctggcacaaccgcatcgccctgcgcctggagctgctgggctgttagtggccacctgccacccccaggtcttcctgctttccatgggcccgctgcctcttggcttctcagcccctttaaatcaccatagggctggggactggggaaggggagggtgttcagaggcagcaccaccacacagtcacccctccctccctctttcccaccctccacctctcacgggccctgccccagcccctaagccccgtcccctaacccccagtcctcactgtcctgttttcttaggcactgagggatctgagtaggtctgggatggacaggaaagggcaaagtagggcgtgtggtttccctgcccctgtccggaccgccgatcccaggtgcgtgtgtctctgtctctcctagcccctctctcacacatcacattcccatggtggcctcaagaaaggcccggaagcgccaggctggagataacagcctcttgcccgtcggccctgcgtcggccctggggtaccatgtggccacaactgctgtggccccctgtccccaagacacttccccttgtctccctggttgcctctcttgccccttgtcctgaagcccagcgacacagaagggggtggggcgggtctatggggagaaagggagcgaggtcagaggagggcatgggttggcagggtgggcgtttggggccctctatgctggcttttcaccccagaggacacaggcagcttccaaaatatatttatcttcttcacggg

SEQ ID NO: 1226 - protein, 335 aa, Homo sapiens
MPRPRLLAALCGALLCAPSLLVALDICSKNPCHNGGLCEEISQEVRGDVFPSYTCTCLKGYAGNHCETKCVEPLGLENGNIANSQIAASSVRVTFLGLQHWVPELARLNRAGMVNAWTPSSNDDNPWIQVNLLRRMWVTGVVTQGASRLASHEYLKAFKVAYSLNGHEFDFIHDVNKKHKEFVGNWNKNAVHVNLFETPVEAQYVRLYPTSCHTACTLRFELLGCELNGCANPLGLKNNSIPDKQITASSSYKTWGLHLFSWNPSYARLDKQGNFNAWVAGSYGNDQWLQIFPGNWDNHSHKKNLFETPILARYVRILPVAWHNRIALRLELLGC

SEQ ID NO: 1227 - DNA, 1935 bp, Homo sapiens
cagaaccccgcggggtctgagcagcccagcgtgcccattccagcgcccgcgtccccgcagcatgccgcgcccccgcctgctggccgcgctgtgcggcgcgctgctctgcgcccccagcctcctcgtcgccctggatatctgttccaaaaacccctgccacaacggtggtttatgcgaggagatttcccaagaagtgcgaggagatgtcttcccctcgtacacctgcacgtgccttaagggctacgcgggcaaccactgtgagacgaaatgtgtcgagccactgggcctggagaatgggaacattgccaactcacagatcgccgcctcgtctgtgcgtgtgaccttcttgggtttgcagcattgggtcccggagctggcccgcctgaaccgcgcaggcatggtcaatgcctggacacccagcagcaatgacgataacccctggatccaggtgaacctgctgcggaggatgtgggtaacaggtgtggtgacgcagggtgccagccgcttggccagtcatgagtacctgaaggccttcaaggtggcctacagccttaatggacacgaattcgatttcatccatgatgttaataaaaaacacaaggagtttgtgggtaactggaacaaaaacgcggtgcatgtcaacctgtttgagacccctgtggaggctcagtacgtgagattgtaccccacgagctgccacacggcctgcactctgcgctttgagctactgggctgtgagctgaacggatgcgccaatcccctgggcctgaagaataacagcatccctgacaagcagatcacggcctccagcagctacaagacctggggcttgcatctcttcagctggaacccctcctatgcacggctggacaagcagggcaacttcaacgcctgggttgcggggagctacggtaacgatcagtggctgcaggtggacctgggctcctcgaaggaggtgacaggcatcatcacccagggggcccgtaactttggctctgtccagtttgtggcatcctacaaggttgcctacagtaatgacagtgcgaactggactgagtaccaggaccccaggactggcagcagtaagatcttccctggcaactgggacaaccactcccacaagaagaacttgtttgagacgcccatcctggctcgctatgtgcgcatcctgcctgtagcctggcacaaccgcatcgccctgcgcctggagctgctgggctgttagtggccacctgccacccccaggtcttcctgctttccatgggcccgctgcctcttggcttctcagcccctttaaatcaccatagggctggggactggggaaggggagggtgttcagaggcagcaccaccacacagtcacccctccctccctctttcccaccctccacctctcacgggccctgccccagcccctaagccccgtcccctaacccccagtcctcactgtcctgttttcttaggcactgagggatctgagtaggtctgggatggacaggaaagggcaaagtagggcgtgtggtttccctgcccctgtccggaccgccgatcccaggtgcgtgtgtctctgtctctcctagcccctctctcacacatcacattcccatggtggcctcaagaaaggcccggaagcgccaggctggagataacagcctcttgcccgtcggccctgcgtcggccctggggtaccatgtggccacaactgctgtggccccctgtccccaagacacttccccttgtctccctggttgcctctcttgccccttgtcctgaagcccagcgacacagaagggggtggggcgggtctatggggagaaagggagcgaggtcagaggagggcatgggttggcagggtgggcgtttggggccctctatgctggcttttcaccccagaggacacaggcagcttccaaaatatatttatcttcttcacggg

SEQ ID NO: 1228 - protein, 387 aa, Homo sapiens
MPRPRLLAALCGALLCAPSLLVALDICSKNPCHNGGLCEEISQEVRGDVFPSYTCTCLKGYAGNHCETKCVEPLGLENGNIANSQIAASSVRVTFLGLQHWVPELARLNRAGMVNAWTPSSNDDNPWIQVNLLRRMWVTGVVTQGASRLASHEYLKAFKVAYSLNGHEFDFIHDVNKKHKEFVGNWNKNAVHVNLFETPVEAQYVRLYPTSCHTACTLRFELLGCELNGCANPLGLKNNSIPDKQITASSSYKTWGLHLFSWNPSYARLDKQGNFNAWVAGSYGNDQWLQVDLGSSKEVTGIITQGARNFGSVQFVASYKVAYSNDSANWTEYQDPRTGSSKIFPGNWDNHSHKKNLFETPILARYVRILPVAWHNRIALRLELLGC

SEQ ID NO: 1229 - DNA, 2570 bp, Homo sapiens
gcgtggggggcggggcgggccgtgggacgggcggaggcgcccgagtcccgcttccccggcgcccttccaccccgagcccgactcagcccgcggccacctgcgccccgcccctgtcggccgcgcccgagcccagcgccgcgagccgctccccggcgggctggctcctggccccggaagcgcgagcgttcacttagcggcgagtggctccgtctccgcggacagagcgcgcgccccctggcccggcccgcgaggggctcccggcgcggtccccgagcatttcccgccgggtggagcgggccgagcccggcaggatgaccagccccgcggccgctcaaagccgggagatcgactgtttgagcccggaagcgcagaagctggcggaagcccggctcgctgcaaaacgggcggcccgcgcggaggctcgcgagatccgcatgaaggagctggagcggcagcagaaggaggtagaagagagaccagaaaaagattttactgagaaggggtctcgtaacatgccgggcctgtctgcagccacgctggcctctctgggtgggacttcctctcggagaggcagcggagacacctccatctccatcgacaccgaggcatccatcagggaaatcaaggactctctagcagaagttgaagagaaatataagaaggctatggtttccaatgctcagctagacaatgaaaagacaaacttcatgtaccaggttgataccctaaaagatatgttgctggagcttgaagaacagctggctgaatctaggcggcagtacgaagagaaaaacaaagaatttgaaagggaaaaacacgcccacagtatactgcaatttcagtttgctgaagtcaaggaggccctgaagcaaagagaggaaatgctcgagaaacatggaataatcctaaattcagaaatagctaccaatggagagacttccgacaccctcaataatgttggataccaaggtcctaccaagatgacaaaagaagagttaaatgccctcaagtcgacaggggatgggaccctaggaagagccagtgaagtggaggtgaaaaatgaaatcgtggcgaatgtggggaaaagagaaatcttgcacaatactgagaaagaacaacacacagaggacacagtgaaggactgtgtggacatagaggtattccctgctggtgagaataccgaggaccagaaatcctctgaagacactgccccattcctaggaaccttagcaggtgctacctatgaggaacaggttcaaagccaaattcttgagagcagttctctccctgaaaacacagtacaggttgagtcaaatgaggtcatgggtgcaccagatgacaggaccagaactccccttgagccatccaactgttggagtgacttagatggtgggaaccacacagagaatgtgggagaggcagcagtgactcaggttgaagagcaggcaggcacagtggcctcgtgtcctttagggcatagtgatgacacagtttatcatgatgacaaatgtatggtagaggtcccccaagagttagagacaagcacagggcatagtttagagaaagaattcaccaaccaggaagcagctgagcccaaggaggttccagcgcacagtacagaagtaggtagggatcacaacgaagaagagggtgaagaaacaggattaagggacgagaaaccaatcaagacagaagttcctggttctccagcaggaactgagggcaactgtcaggaagcgacaggtccaagtacagtagacactcaaaatgaacccttagatatgaaagagcccgatgaagaaaagagtgaccaacagggagaggcattggactcatcgcagaagaagacaaagaacaagaaaaagaaaaacaagaagaaaaaatccccagtacccgtagaaacccttaaagatgttaaaaaagagttaacgtatcagaacacagatttaagtgaaattaaggaagaagagcaggtaaagtctactgacagaaagtcagcagtggaagcccaaaacgaggtgactgaaaatccaaaacagaaaattgcagcagaaagcagtgaaaatgttgattgtccggagaatcctaaaattaagttggatggaaaacttgaccaagaaggtgatgatgtacaaacagcagctgaggaggtactagctgatggagacacattagattttgaggatgacaccgttcaatcatcaggcccgagggctggtggtgaagaattagatgaaggtgttgcaaaagataatgctaaaatagatggtgccactcaaagcagtcctgcagaaccaaagagcgaagacgcagatcgctgcaccctgcccgaacatgaaagtccctcacaggacattagtgatgcctgtgaagcagaaagtacagagaggtgtgagatgtcagaacatccaagtcagaccgtcaggaaagctttagacagcaatagcctagagaacgatgacttgtcggcaccaggaagagagccagggcacttcaatccagaaagcagagaagataccagaggagggaatgagaagggcaaaagcaaagaagactgtaccatgtcctaa

SEQ ID NO: 1230 - protein, 752 aa, Homo sapiens
MTSPAAAQSREIDCLSPEAQKLAEARLAAKRAARAEAREIRMKELERQQKEVEERPEKDFTEKGSRNMPGLSAATLASLGGTSSRRGSGDTSISIDTEASIREIKDSLAEVEEKYKKAMVSNAQLDNEKTNFMYQVDTLKDMLLELEEQLAESRRQYEEKNKEFEREKHAHSILQFQFAEVKEALKQREEMLEKHGIILNSEIATNGETSDTLNNVGYQGPTKMTKEELNALKSTGDGTLGRASEVEVKNEIVANVGKREILHNTEKEQHTEDTVKDCVDIEVFPAGENTEDQKSSEDTAPFLGTLAGATYEEQVQSQILESSSLPENTVQVESNEVMGAPDDRTRTPLEPSNCWSDLDGGNHTENVGEAAVTQVEEQAGTVASCPLGHSDDTVYHDDKCMVEVPQELETSTGHSLEKEFTNQEAAEPKEVPAHSTEVGRDHNEEEGEETGLRDEKPIKTEVPGSPAGTEGNCQEATGPSTVDTQNEPLDMKEPDEEKSDQQGEALDSSQKKTKNKKKKNKKKKSPVPVETLKDVKKELTYQNTDLSEIKEEEQVKSTDRKSAVEAQNEVTENPKQKIAAESSENVDCPENPKIKLDGKLDQEGDDVQTAAEEVLADGDTLDFEDDTVQSSGPRAGGEELDEGVAKDNAKIDGATQSSPAEPKSEDADRCTLPEHESPSQDISDACEAESTERCEMSEHPSQTVRKALDSNSLENDDLSAPGREPGHFNPESREDTRGGNEKGKSKEDCTMS

SEQ ID NO: 1231 - DNA, 3655 bp, Homo sapiens
gccgcgagccgctccccggcgggctggctcctggccccggaagcgcgagcgttcacttagcggcgagtggctccgtctccgcggacagagcgcgcgccccctggcccggcccgcgaggggctcccggcgcggtccccgagcatttcccgccgggtggagcgggccgagcccggcaggatgaccagccccgcggccgctcaaagccgggagatcgactgtttgagcccggaagcgcagaagctggcggaagcccggctcgctgcaaaacgggcggcccgcgcggaggctcgcgagatccgcatgaaggagctggagcggcagcagaaggaggaagacagtgagcgctactctcgtagatccagaagaaacacatcggcttctgatgaagacgagcgcatgtcagtgggtagtcgtggaagcctgagggtagaagagagaccagaaaaagattttactgagaaggggtctcgtaacatgccgggcctgtctgcagccacgctggcctctctgggtgggacttcctctcggagaggcagcggagacacctccatctccatcgacaccgaggcatccatcagggaaatcaaggactctctagcagaagttgaagagaaatataagaaggctatggtttccaatgctcagctagacaatgaaaagacaaacttcatgtaccaggttgataccctaaaagatatgttgctggagcttgaagaacagctggctgaatctaggcggcagtacgaagagaaaaacaaagaatttgaaagggaaaaacacgcccacagtatactgcaatttcagtttgctgaagtcaaggaggccctgaagcaaagagaggaaatgctcgagaaacatggaataatcctaaattcagaaatagctaccaatggagagacttccgacaccctcaataatgttggataccaaggtcctaccaagatgacaaaagaagagttaaatgccctcaagtcgacaggggatgggaccctaggaagagccagtgaagtggaggtgaaaaatgaaatcgtggcgaatgtggggaaaagagaaatcttgcacaatactgagaaagaacaacacacagaggacacagtgaaggactgtgtggacatagaggtattccctgctggtgagaataccgaggaccagaaatcctctgaagacactgccccattcctaggaaccttagcaggtgctacctatgaggaacaggttcaaagccaaattcttgagagcagttctctccctgaaaacacagtacaggttgagtcaaatgaggtcatgggtgcaccagatgacaggaccagaactccccttgagccatccaactgttggagtgacttagatggtgggaaccacacagagaatgtgggagaggcagcagtgactcaggttgaagagcaggcaggcacagtggcctcgtgtcctttagggcatagtgatgacacagtttatcatgatgacaaatgtatggtagaggtcccccaagagttagagacaagcacagggcatagtttagagaaagaattcaccaaccaggaagcagctgagcccaaggaggttccagcgcacagtacagaagtaggtagggatcacaacgaagaagagggtgaagaaacaggattaagggacgagaaaccaatcaagacagaagttcctggttctccagcaggaactgagggcaactgtcaggaagcgacaggtccaagtacagtagacactcaaaatgaacccttagatatgaaagagcccgatgaagaaaagagtgaccaacagggagaggcattggactcatcgcagaagaagacaaagaacaagaaaaagaaaaacaagaagaaaaaatccccagtacccgtagaaacccttaaagatgttaaaaaagagttaacgtatcagaacacagatttaagtgaaattaaggaagaagagcaggtaaagtctactgacagaaagtcagcagtggaagcccaaaacgaggtgactgaaaatccaaaacagaaaattgcagcagaaagcagtgaaaatgttgattgtccggagaatcctaaaattaagttggatggaaaacttgaccaagaaggtgatgatgtacaaacagcagctgaggaggtactagctgatggagacacattagattttgaggatgacaccgttcaatcatcaggcccgagggctggtggtgaagaattagatgaaggtgttgcaaaagataatgctaaaatagatggtgccactcaaagcagtcctgcagaaccaaagagcgaagacgcagatcgctgcaccctgcccgaacatgaaagtccctcacaggacattagtgatgcctgtgaagcagaaagtacagagaggtgtgagatgtcagaacatccaagtcagaccgtcaggaaagctttagacagcaatagcctagagaacgatgacttgtcggcaccaggaagagagccagggcacttcaatccagaaagcagagaagataccagaggagggaatgagaagggcaaaagcaaagaagactgtaccatgtcctaagctgaggcaggcggcaggcgcggtgcacaggaagtctcagtgtgaaggggtcttttctctccactgccaatgtaagtagaatgttctaaattcatagagaggcactgtatgacaattaccaggtgctctactgctttaagttatagactgttacttgtagatttccatgtaatcattgaggttatcacccagattagaaagacatatttgttatcagtgtacgttctaattgagagcattccagtagtatcaaacaataatgtctactgtttatagtccacttaataaaaatagaggcatttactatttgccttaggctgataggaatgtgggttttcttgaccaaatatatcagcatctaattgaaatgaccaaatagcattcttagacttctgtattatgaatataattgatatttaaattaatgtcttgttcacatatgtgtactttcatatttgattttaaaatgtacattataacctgtatggtattttatttaaaggagataaacagccaaatagcaaataggtcactgaatgataagatttgcaccttagaacaataatcattttaaggataacaagtaaatgtctgaaagcatgaggggctttatttgcctttacctcatatgagtctttgatcttgaaccgatacttttggatctcattgttgatatacctgaatttactttgtaagagattttaacttcacttcatgctgatgatgtatcaaattcattttatagaaagatttaaagtttttttctggaagtgatatatgtcaaattacatttcctactgcagtatttgagcagggacagtcattttttaaatgtttttggccgggcgtggtggctcatgcctgtaatctcagtacattgggaggccaaggcaggtggatcacctgaggtcaagagttcgaggccagcctggccaacatggtgaaaccctgtctctactaaaaatacaaaaaattggccgggcgtgatggtgggcgcctgtaatcccagccactccagaggctgaggcaggagaatcgcttgaacctgcgaggcagagattgcagtgagccaagatcaagccattgtactccagcctggacaacaagagcgaaactctgtcta

SEQ ID NO: 1232 - protein, 784 aa, Homo sapiens
MTSPAAAQSREIDCLSPEAQKLAEARLAAKRAARAEAREIRMKELERQQKEEDSERYSRRSRRNTSASDEDERMSVGSRGSLRVEERPEKDFTEKGSRNMPGLSAATLASLGGTSSRRGSGDTSISIDTEASIREIKDSLAEVEEKYKKAMVSNAQLDNEKTNFMYQVDTLKDMLLELEEQLAESRRQYEEKNKEFEREKHAHSILQFQFAEVKEALKQREEMLEKHGIILNSEIATNGETSDTLNNVGYQGPTKMTKEELNALKSTGDGTLGRASEVEVKNEIVANVGKREILHNTEKEQHTEDTVKDCVDIEVFPAGENTEDQKSSEDTAPFLGTLAGATYEEQVQSQILESSSLPENTVQVESNEVMGAPDDRTRTPLEPSNCWSDLDGGNHTENVGEAAVTQVEEQAGTVASCPLGHSDDTVYHDDKCMVEVPQELETSTGHSLEKEFTNQEAAEPKEVPAHSTEVGRDHNEEEGEETGLRDEKPIKTEVPGSPAGTEGNCQEATGPSTVDTQNEPLDMKEPDEEKSDQQGEALDSSQKKTKNKKKKNKKKKSPVPVETLKDVKKELTYQNTDLSEIKEEEQVKSTDRKSAVEAQNEVTENPKQKIAAESSENVDCPENPKIKLDGKLDQEGDDVQTAAEEVLADGDTLDFEDDTVQSSGPRAGGEELDEGVAKDNAKIDGATQSSPAEPKSEDADRCTLPEHESPSQDISDACEAESTERCEMSEHPSQTVRKALDSNSLENDDLSAPGREPGHFNPESREDTRGGNEKGKSKEDCTMS

SEQ ID NO: 1233 - DNA, 1791 bp, Homo sapiens
caggcggaagcccggctcgctgcaaaacgggcggcccgcgcggaggctcgcgagatccgcatgaaggagctggagcggcagcagaaggaggtaacgcttggggctccttgttggaaatattatgggctggatacaaaatggggtgacatcgagcagtggatggaagacagtgagcgctactctcgtagatccagaagaaacacatcggcttctgatgaagacgagcgcatgtcagtgggtagtcgtggaagcctgaggtcgcagcctgacttggagtatgggggtccttacgcctggacaaatggttatgatggagaattgtatggatcacagtccctgaatagaagatctggcaggccctcctgtctgtacagcgctgcccggccttcggggagttaccgggcgtctgtgttggatgaaggcagcttcggtgggacccgacggggcagcacctccggctcccgtgctccctcggagtacagcggccacctcaactccagctcccgcgcctcctccagggccagctcggcccgggccagccctgtggtagaagagagaccagaaaaagattttactgagaaggggtctcgtaacatgccgggcctgtctgcagccacgctggcctctctgggtgggacttcctctcggagaggcagcggagacacctccatctccatcgacaccgaggcatccatcagggaaatcaaggaactcaatgagttaaaggaccagattcaggatgtagaaggcaaatacatgcagggattgaaagagatgaaggactctctagcagaagttgaagagaaatataagaaggctatggtttccaatgctcagctagacaatgaaaagacaaacttcatgtaccaggttgataccctaaaagatatgttgctggagcttgaagaacagctggctgaatctaggcggcagtacgaagagaaaaacaaagaatttgaaagggaaaaacacgcccacagtatactgcaatttcagtttgctgaagtcaaggaggccctgaagcaaagagaggaaatgctcgaggaaatccgacagctacagcagaaacaggcgagttctatcagggagatttctgatcttcaggaaacaatagagtggaaagacaaaaagataggggcattagagaggcagaaagagttctttgattccgtaaggagtgaacgggatgatcttagagaagaagtagtcatgctgaaagaggaattaaagaaacatggaataatcctaaattcagaaatagctaccaatggagagacttccgacaccctcaataatgttggataccaaggtcctaccaagatgacaaaagaagagttaaatgccctcaagtcgacaggggatgggaccctagatattaggttgaaaaagctggttgatgaacgggaatgcttattggaacagattaagaaactcaaagggcagctggaggagagacagaagattggcaaactagacaatcttcgatctgaagatgatgtcttggaaaacgggacagacatgcatgtaatggacctacaaagggatgccaacagacagatcagcgacctcaaatttaaacttgcaaaatctgagcaagagataactgcattagaacaaaatgtaataaggttagagagtcaagtatcacgttacaaatcagcggctgaaaatgcagaaaaaatagaagatgaacttaaggcagaaaaacggaaactccaaagagagctccgctctgcattggataaaacagaagagctcgaggtgagcaacggccacttagtgaagcgtctg

SEQ ID NO: 1234 - protein, 597 aa, Homo sapiens
QAEARLAAKRAARAEAREIRMKELERQQKEVTLGAPCWKYYGLDTKWGDIEQWMEDSERYSRRSRRNTSASDEDERMSVGSRGSLRSQPDLEYGGPYAWTNGYDGELYGSQSLNRRSGRPSCLYSAARPSGSYRASVLDEGSFGGTRRGSTSGSRAPSEYSGHLNSSSRASSRASSARASPVVEERPEKDFTEKGSRNMPGLSAATLASLGGTSSRRGSGDTSISIDTEASIREIKELNELKDQIQDVEGKYMQGLKEMKDSLAEVEEKYKKAMVSNAQLDNEKTNFMYQVDTLKDMLLELEEQLAESRRQYEEKNKEFEREKHAHSILQFQFAEVKEALKQREEMLEEIRQLQQKQASSIREISDLQETIEWKDKKIGALERQKEFFDSVRSERDDLREEVVMLKEELKKHGIILNSEIATNGETSDTLNNVGYQGPTKMTKEELNALKSTGDGTLDIRLKKLVDERECLLEQIKKLKGQLEERQKIGKLDNLRSEDDVLENGTDMHVMDLQRDANRQISDLKFKLAKSEQEITALEQNVIRLESQVSRYKSAAENAEKIEDELKAEKRKLQRELRSALDKTEELEVSNGHLVKRL

SEQ ID NO: 1235 - DNA, 2006 bp, Homo sapiens
aggaggctatgatgaagcctacccatagggcttctggggctgaaacgagctaatgatgtcgaagctgctagaactgtacctgtgtcagagcgagtgtgcagcatacgttatcatcactgtcatcactccagcattctgactgtgcctttaaactagtgtgggattttgcccaaacctctaaaccctcccctagccgtggtttcccccgcagtctgaagactctaatacttgacactcgttcagagagatgtttggggaatttatagacacttaacatttatgcatccttatatatcgggtccaggaggaattacagacacttaaaccattactgccttcttcctcaaaagaataacagctttggtaactgggttagcagaggtgttagtggacttagggttgtaaacagatactcatggcactgacatcgatgagtctatgagggaaattagaaagataaatacatctgggatgtaaactcggaaaggcgaggctgttcaaaatgttggtgctattgaattgtgattctcggtgtttgtacattgctaataatgttaaaccatgaagcctgtgagatcttgtgttgcagcgtggtttggccctagcgttcttgcatgctaacctaaggtagaagattagcagcctgtttgcatgcagccggatgctgcccctgacgtgaagcatgttctgggaggttgacccaacctcctttggctgtggcctcattcaccccgtcctgtctgtggcctcattcaccgtgatattaggttgaaaaagctggttgatgaacgggaatgcttattggaacagattaagaaactcaaagggcagctggaggagagacagaagattggcaaactagacaatcttcgatctgaagatgatgtcttggaaaacgggacagacatgcatgtaatggacctacaaagggatgccaacagacagatcagcgacctcaaatttaaacttgcaaaatctgagcaagagataactgcattagaacaaaatgtaataaggttagagagtcaagtatcacgttacaaatcagcggctgaaaatgcagaaaaaatagaagatgaacttaaggcagaaaaacggaaactccaaagagagctccgctctgcattggataaaacagaagagctcgaggtgagcaacggccacttagtgaagcgtctggaaaaaatgaaagcaaatcggagtgcactcttgtcccagcagtaaattccagctctgatcaggcaactggttggtgactggagagcattgtttcataggcttttctctgtcctatctgggagcgctgcttcttcccctgccttccgagagacgaagaccgtggcgagcttggcgcttaggggctcccgtgccatggctcaccccagggagccccagcagccaccaggtgcctctgtctgcagacccctggcccgggctggcgccgacgctcagaacctgcaggtacttcataagcacacaggggcctcgagggagctctgtgtctgaccgcacagcagcctctgaatgccgctggaagtgatgatcaaagtaaagattcagttgggacttgagttttttttttttttcatgtgtcttgctgaagattaaggggaaatgttacagtgttgggacttcctttcatggcagaatctacaatttgagcgacttcagtagtatctcttagtctacgcttttcatacacaaaacactgtggaaccacaagccattaccaagcaaaactctttcactggaaacaagggggcagtctagaagtaaaagtgaccttaagaagactctttacaggcaacaaatgaagcttttctaagggatttttgcatcagttcagtcataagaatacttttttccagggtaattaggcaatagcttcactgaaaatgacagcttttcattgcattatttaatccttatatttggaattgaagtcgttaacttcttttaaagaatgtactattagaaaaattaaaaatgaaatgttgagagacttc

SEQ ID NO: 1236 - protein, 105 aa, Homo sapiens
MHVMDLQRDANRQISDLKFKLAKSEQEITALEQNVIRLESQVSRYKSAAENAEKIEDELKAEKRKLQRELRSALDKTEELEVSNGHLVKRLEKMKANRSALLSQQ

SEQ ID NO: 1237 - DNA, 1733 bp, Homo sapiens
acagagctccctcccaggcccgcgaacttggccattcagccgccgctgtccccgctgcgcgccctcgcgcctctgcctgagaagccaggcgctgttcccccaccccagaagaggatggcaaaggtggctaaggacctcaacccaggagttaaaaagatgtccctgggccagctgcagtcagcaagaggtgtggcatgtttgggatgcaaggggacgtgttcgggcttcgagccacattcatggaggaaaatatgcaagtcttgcaaatgcagccaagaggaccactgcctaacatctgacctagaagacgatcggaaaattggccgcttgctgatggactccaagtattccaccctcactgctcgggtgaaaggcggggacggcatccggatttacaagaggaaccggatgatcatgaccaaccctattgctactgggaaagatcccacttttgacaccatcacctacgagtgggctccccctggagtcacccagaaactgggactgcagtacatggagctcatccccaaggagaagcagccagtgacaggcacagagggtgccttttaccgccgccgccagctcatgcaccagctccccatctatgaccaggatccctcgcgctgccgtggacttttggagaatgagttgaaactgatggaagaatttgtcaagcaatataagagcgaggccctcggcgtgggagaagtggccctcccggggcagggtggcttgcccaaggaggaggggaagcagcaggaaaagccagagggggcagagaccactgctgctaccaccaacggcagtctcagtgacccgtccaaagaagtggaatacgtctgcgagctctgcaagggagcggcccctcctgacagccccgtggtctactcggacagggcaggctacaacaagcagtggcaccccacctgctttgtgtgtgccaagtgctccgagccgctggtggacctcatctacttctggaaggatggtgcaccctggtgcggccgccattactgcgagagtctgcggccccggtgctccggctgcgatgagataatattcgctgaggactaccagcgtgtggaagatctggcctggcaccgaaagcactttgtctgtgagggttgtgagcagctgctgagcggccgggcgtacatcgtcaccaagggtcagcttctgtgcccaacttgcagcaagtccaaacgctcctgaagggctgcccacccacagccagaatccacaggatcccaccgagaaggagagccaggtgtgccgagaccatcctaagggtccgatgtgacagcaagcaagtgaaataaacaatgatttgcttttcagtgagaatatatatatgagatatatatagatatatattctaggttgggtggtggtagatccttgagggtcagtagtttcaaaaccaaaaatattctaagaagtcttaggatggagttccttttctttctgttgttgtttcccagctacaaccaactaaagacacaaatggcgttctgcaaggggactctgggaggagttttccagaatgcaattccgagtgagcaaatcgcatagctgtagaatgtgcgtgcttttttgtggacacaggagctcctccaggagcaggctgggatcccaactatcgcttgttgcctctttttcaagtggaatttgaattttaaataaacaactttttttggcatgataaacagatcaataaaagttttgtgaattcc

SEQ ID NO: 1238 - protein, 365 aa, Homo sapiens
MAKVAKDLNPGVKKMSLGQLQSARGVACLGCKGTCSGFEPHSWRKICKSCKCSQEDHCLTSDLEDDRKIGRLLMDSKYSTLTARVKGGDGIRIYKRNRMIMTNPIATGKDPTFDTITYEWAPPGVTQKLGLQYMELIPKEKQPVTGTEGAFYRRRQLMHQLPIYDQDPSRCRGLLENELKLMEEFVKQYKSEALGVGEVALPGQGGLPKEEGKQQEKPEGAETTAATTNGSLSDPSKEVEYVCELCKGAAPPDSPVVYSDRAGYNKQWHPTCFVCAKCSEPLVDLIYFWKDGAPWCGRHYCESLRPRCSGCDEIIFAEDYQRVEDLAWHRKHFVCEGCEQLLSGRAYIVTKGQLLCPTCSKSKRS

SEQ ID NO: 1239 - DNA, 6309 bp, Homo sapiens
ggaaagaagtggaataattaggaacctagggtggggtagggtagcaggacatttcaaacattaatgagcatatgagattccaggtcttgttaaaatgcaaattctgattcagctggtaggtgaggtctgagattgtgcatttctaacaagcactcagataatcttaaggctgttggccccagggtcacacttatagtgattttctagaacccagttggggaagtgaatcttgggcaggagaaatacacacctcttgcattgagtttggagatctcatctgatataactttttaagaaagaaaaataattttccaaatatccaattgataagctttcccactaagtggctttcccactaagtggctgcgttatgaaaattgcttcactttgaaacttctggtcttggtaatatagaatttctgtgttctcacagtgcttgattgagaatatgatattgagattatggcataaaatatagtggctgtacaaaaaaaaatacattattaggatctctaacaattatgtaaaagtcattgcttcatgggtagagctcaaactttggtgtgagacctggttttattcttggcacttactctgagttgtcttaggcaaattaataccttaagcaaaaatattctcatgtacattttacatgagaattataaatgaagtacataaagtccagcagtcacaaatgttatctattattaccatcgtcctaagactgcaatcagctatagtgaaagtagtctcaaagattgtttcataaatcatcagattcacctaattttctaaagaatttaaataaggagatggaatgaatagattgcattttgtttccatgcacaggggaactgtgcatatttcttctgtgactcggaaatggtttaacttttaaaaatcccaaaatagctgaagttagcagacatgcaatttaccaaggatgattggaatttttatctttcctgtaataatactatacccaagcacactgctcatgaggaaaacatttttatgtgaatcttttactcttgggggcaaagaatgctgtttttctttttgataactatgtttatagaatctaaatcaccctgagcaattatttcaacatctaaagttattattaccattcatgtttcatttatagctatttgaattttgatgaatttcaatatggtgctacagtgatagggcaagtgcaaataagttcaatatatgggtacggtctaaagctattttaatttttttattacaactgctatgaagaaaattaggatatgccatattttcacgttttacagttggatgtcctatgatgttctcttccagagaacagagctcggagctctggaaatttggaggcaactgatatgtgctcatgtctgcatctgtgtgggttggctgtatctcagggacagagtctgcagcaaaaaagatataattttgaggactgaacaaaattcaggaaggactattctcattaaggcagtaacagagaagaattttgaaacaaaagattttcgagcctctctagaaaatggtgttctgctgtgtgatttgattaataagcttaaacctggcgtcattaagaagatcaatagactgtctacaccaatagcaggattggataatataaacgttttcttgaaagcttgtgaacagattggattgaaagaagcccagcttttccatcctggagatctacaggatttatcaaatcgagtcactgtcaagcaagaagagactgacaggagagtgaaaaatgttttgataacattgtactggctgggaagaaaagcacaaagcaacccgtactataatggtccccatcttaatttgaaagcgtttgagaatcttttaggacaagcactgacgaaggcactcgaagactccagcttcctgaaaagaagtggcagggacagtggctacggtgacatctggtgtcctgaacgtggagaatttcttgctcctccaaggcaccataagagagaagattcctttgaaagcttggactctttgggctcgaggtcattgacaagctgctcctctgatatcacgttgagaggggggcgtgaaggttttgaaagtgacacagattcggaatttacatttaagatgcaggattataataaagatgatatgtcgtatcgaaggatttcggctgttgagccaaagactgcgttacccttcaatcgttttttacccaacaaaagtagacagccatcctatgtaccagcacctctgagaaagaaaaagccagacaaacatgaggataacagaagaagttgggcaagcccggtttatacagaagcagatggaacattttcaagtaatcagaggaggatttggggcaccaatgtggagaactggccaactgtacaaggaacttcaaagtcctcttgttatttggaagaggaaaaagcaaagacaagaagcatacccaacattgtaaaggatgatctttatgtgcgcaagctcagtccagtcatgccaaacccagggaatgcttttgatcagtttcttcccaaatgttggaccccagaagatgtgaactggaaaagaataaaaagggaaacttataagccatggtataaagaatttcagggattcagtcagtttttactgcttcaggccctccaaacatactctgatgacatcttgtcttctgaaacacataccaaaattgatcccacttctggcccaaggctcataacccgcaggaagaatctctcttatgcaccaggctatagaagagatgacctcgagatggcagccctggatcctgacttagagaatgatgatttctttgtcagaaagactggggctttccatgcaaatccatatgttctccgagcttttgaagactttagaaagttctctgagcaagatgattctgtagagcgagatataattttacagtgtagagaaggtgaacttgtacttccggatttggaaaaagatgatatgattgttcgccgaattccagcacagaagaaagaagtgccgctgtctggggccccagatagataccacccagtcccttttcccgaaccctggactcttcctccagaaattcaagcaaaatttctctgtgtacttgaaaggacatgcccatccaaagaaaaaagtaatagctgtagaatattagttccttcatatcggcagaagaaagatgacatgctgacacgtaagattcagtcctggaaactgggaactaccgtgcctcccatcagtttcacccctggcccctgcagtgaggctgacttgaagagatgggaggccatccgggaggccagcagacttaggcacaagaaaaggctgatggtggagagactctttcaaaagatttatggtgagaatgggagtaagtccatgagtgatgtcagcgcagaagatgttcaaaacttgcgtcagctgcgttacgaggagatgcagaaaataaaatcacaattaaaagaacaagatcagaaatggcaggatgaccttgcaaaatggaaagatcgtcgaaaaagttacacttcagatctgcagaagaaaaaagaagagagagaagaaattgaaaagcaggcacttgagaagtctaagagaagctctaagacgtttaaggaaatgctgcaggacagggaatcccaaaatcaaaagtctacagttccgtcaagaaggagaatgtattcttttgatgatgtgctggaggaaggaaagcgaccccctacaatgactgtgtcagaagcaagttaccagagtgagagagtagaagagaagggagcaacttatccttcagaaattcccaaagaagattctaccacttttgcaaaaagagaggaccgtgtaacaactgaaattcagcttccttctcaaagtcctgtggaagaacaaagcccagcctctttgtcttctctgcgttcacggagcacacaaatggaatcaactcgtgtttcagcttctctccccagaagttaccggaaaactgatacagtcaggttaacatctgtggtcacaccaagaccctttggctctcagacaaggggaatctcatcactccccagatcttacacgatggatgatgcttggaagtataatggagatgttgaagacattaagagaactccaaacaatgtggtcagcacccctgcaccaagcccggacgcaagccaactggcttcaagcttatctagccagaaagaggtagcagcaacagaagaagatgtgacaaggctgccctctcctacatcccccttctcatctctttcccaagaccaggctgccacttctaaagccacattgtcttccacatctggtcttgatttaatgtctgaatctggagaaggggaaatctccccacaaagagaagtctcaagatcccaggatcagttcagtgatatgagaatcagcataaaccagacgcctgggaagagtcttgactttgggtttacaataaaatgggatattcctgggatcttcgtagcatcagttgaagcaggtagcccagcagaattttctcagctacaagtagatgatgaaattattgctattaacaacaccaagttttcatataacgattcaaaagagtgggaggaagccatggctaaggctcaagaaactggacacctagtgatggatgtgaggcgctatggaaaggctggttcacctgaaacaaagtggattgatgcaacttctggaatttacaactcagaaaaatcttcaaatctatctgtaacaactgatttctccgaaagccttcagagttctaatattgaatccaaagaaatcaatggaattcatgatgaaagcaatgcttttgaatcaaaagcatctgaatccatttctttgaaaaacttaaaaaggcgatcacaattttttgaacaaggaagctctgattcggtggttcctgatcttccagttccaaccatcagtgccccgagtcgctgggtgtgggatcaagaggaggagcggaagcggcaggagaggtggcagaaggagcaggaccgcctactgcaggaaaaatatcaacgtgagcaggagaaactgagggaagagtggcaaagggccaaacaggaggcagagagagagaattccaagtacttggatgaggaactgatggtcctaagctcaaacagcatgtctctgaccacacgggagccctctcttgccacctgggaagctacctggagtgaagggtccaagtcttcagacagagaaggaacccgagcaggagaagaggagaggagacagccacaagaggaagttgttcatgaggaccaaggaaagaagccgcaggatcagcttgttattgagagagagaggaaatgggagcaacagcttcaggaagagcaagagcaaaagcggcttcaggctgaggctgaggagcagaagcgtcctgcggaggagcagaagcgccaggcagagatagagcgggaaacatcagtcagaatataccagtacaggaggcctgttgattcctatgatataccaaagacagaagaagcatcttcaggttttcttcctggtgacaggaataaatccagatctactactgaactggatgattactccacaaataaaaatggaaacaataaatatttagaccaaattgggaacatgacctcttcacagaggagatccaagaaagaacaagtaccatcaggagcagaattggagaggcaacaaatccttcaggaaatgaggaagagaacaccccttcacaatgacaacagctggatccgacagcgcagtgccagtgtcaacaaagagcctgttagtcttcctgggatcatgagaagaggcgaatctttagataacctggactccccccgatccaattcttggagacagcctccttggctcaatcagcccacaggattctatgcttcttcctctgtgcaagactttagtcgcccaccacctcagctggtgtccacatcaaaccgtgcctacatgcggaacccctcctccagcgtgcccccaccttcagctggctccgtgaagacctccaccacaggtgtggccaccacacagtcccccaccccgagaagccattccccttcagcttcacagtcaggctctcagctgcgtaacaggtcagtcagtgggaagcgcatatgctcctactgcaataacattctgggcaaaggagccgccatgatcatcgagtccctgggtctttgttatcatttgcattgttttaagtgtgttgcctgtgagtgtgacctcggaggctcttcctcaggagctgaagtcaggatcagaaaccaccaactgtactgcaacgactgctatctcagattcaaatacaataagccaacggccttt

SEQ ID NO: 1240 - protein, 1683 aa, Homo sapiens
MKKIRICHIFTFYSWMSYDVLFQRTELGALEIWRQLICAHVCICVGWLYLRDRVCSKKDIILRTEQNSGRTILIKAVTEKNFETKDFRASLENGVLLCDLINKLKPGVIKKINRLSTPIAGLDNINVFLKACEQIGLKEAQLFHPGDLQDLSNRVTVKQEETDRRVKNVLITLYWLGRKAQSNPYYNGPHLNLKAFENLLGQALTKALEDSSFLKRSGRDSGYGDIWCPERGEFLAPPRHHKREDSFESLDSLGSRSLTSCSSDITLRGGREGFESDTDSEFTFKMQDYNKDDMSYRRISAVEPKTALPFNRFLPNKSRQPSYVPAPLRKKKPDKHEDNRRSWASPVYTEADGTFSSNQRRIWGTNVENWPTVQGTSKSSCYLEEEKAKTRSIPNIVKDDLYVRKLSPVMPNPGNAFDQFLPKCWTPEDVNWKRIKRETYKPWYKEFQGFSQFLLLQALQTYSDDILSSETHTKIDPTSGPRLITRRKNLSYAPGYRRDDLEMAALDPDLENDDFFVRKTGAFHANPYVLRAFEDFRKFSEQDDSVERDIILQCREGELVLPDLEKDDMIVRRIPAQKKEVPLSGAPDRYHPVPFPEPWTLPPEIQAKFLCVLERTCPSKEKSNSCRILVPSYRQKKDDMLTRKIQSWKLGTTVPPISFTPGPCSEADLKRWEAIREASRLRHKKRLMVERLFQKIYGENGSKSMSDVSAEDVQNLRQLRYEEMQKIKSQLKEQDQKWQDDLAKWKDRRKSYTSDLQKKKEEREEIEKQALEKSKRSSKTFKEMLQDRESQNQKSTVPSRRRMYSFDDVLEEGKRPPTMTVSEASYQSERVEEKGATYPSEIPKEDSTTFAKREDRVTTEIQLPSQSPVEEQSPASLSSLRSRSTQMESTRVSASLPRSYRKTDTVRLTSVVTPRPFGSQTRGISSLPRSYTMDDAWKYNGDVEDIKRTPNNVVSTPAPSPDASQLASSLSSQKEVAATEEDVTRLPSPTSPFSSLSQDQAATSKATLSSTSGLDLMSESGEGEISPQREVSRSQDQFSDMRISINQTPGKSLDFGFTIKWDIPGIFVASVEAGSPAEFSQLQVDDEIIAINNTKFSYNDSKEWEEAMAKAQETGHLVMDVRRYGKAGSPETKWIDATSGIYNSEKSSNLSVTTDFSESLQSSNIESKEINGIHDESNAFESKASESISLKNLKRRSQFFEQGSSDSVVPDLPVPTISAPSRWVWDQEEERKRQERWQKEQDRLLQEKYQREQEKLREEWQRAKQEAERENSKYLDEELMVLSSNSMSLTTREPSLATWEATWSEGSKSSDREGTRAGEEERRQPQEEVVHEDQGKKPQDQLVIERERKWEQQLQEEQEQKRLQAEAEEQKRPAEEQKRQAEIERETSVRIYQYRRPVDSYDIPKTEEASSGFLPGDRNKSRSTTELDDYSTNKNGNNKYLDQIGNMTSSQRRSKKEQVPSGAELERQQILQEMRKRTPLHNDNSWIRQRSASVNKEPVSLPGIMRRGESLDNLDSPRSNSWRQPPWLNQPTGFYASSSVQDFSRPPPQLVSTSNRAYMRNPSSSVPPPSAGSVKTSTTGVATTQSPTPRSHSPSASQSGSQLRNRSVSGKRICSYCNNILGKGAAMIIESLGLCYHLHCFKCVACECDLGGSSSGAEVRIRNHQLYCNDCYLRFKYNKPTAF

SEQ ID NO: 1241 - DNA, 8125 bp, Homo sapiens
ggaaagaagtggaataattaggaacctagggtggggtagggtagcaggacatttcaaacattaatgagcatatgagattccaggtcttgttaaaatgcaaattctgattcagctggtaggtgaggtctgagattgtgcatttctaacaagcactcagataatcttaaggctgttggccccagggtcacacttatagtgattttctagaacccagttggggaagtgaatcttgggcaggagaaatacacacctcttgcattgagtttggagatctcatctgatataactttttaagaaagaaaaataattttccaaatatccaattgataagctttcccactaagtggctttcccactaagtggctgcgttatgaaaattgcttcactttgaaacttctggtcttggtaatatagaatttctgtgttctcacagtgcttgattgagaatatgatattgagattatggcataaaatatagtggctgtacaaaaaaaaatacattattaggatctctaacaattatgtaaaagtcattgcttcatgggtagagctcaaactttggtgtgagacctggttttattcttggcacttactctgagttgtcttaggcaaattaataccttaagcaaaaatattctcatgtacattttacatgagaattataaatgaagtacataaagtccagcagtcacaaatgttatctattattaccatcgtcctaagactgcaatcagctatagtgaaagtagtctcaaagattgtttcataaatcatcagattcacctaattttctaaagaatttaaataaggagatggaatgaatagattgcattttgtttccatgcacaggggaactgtgcatatttcttctgtgactcggaaatggtttaacttttaaaaatcccaaaatagctgaagttagcagacatgcaatttaccaaggatgattggaatttttatctttcctgtaataatactatacccaagcacactgctcatgaggaaaacatttttatgtgaatcttttactcttgggggcaaagaatgctgtttttctttttgataactatgtttatagaatctaaatcaccctgagcaattatttcaacatctaaagttattattaccattcatgtttcatttatagctatttgaattttgatgaatttcaatatggtgctacagtgatagggcaagtgcaaataagttcaatatatgggtacggtctaaagctattttaatttttttattacaactgctatgaagaaaattaggatatgccatattttcacgttttacagttggatgtcctatgatgttctcttccagagaacagagctcggagctctggaaatttggaggcaactgatatgtgctcatgtctgcatctgtgtgggttggctgtatctcagggacagagtctgcagcaaaaaagatataattttgaggactgaacaaaattcaggaaggactattctcattaaggcagtaacagagaagaattttgaaacaaaagattttcgagcctctctagaaaatggtgttctgctgtgtgatttgattaataagcttaaacctggcgtcattaagaagatcaatagactgtctacaccaatagcaggattggataatataaacgttttcttgaaagcttgtgaacagattggattgaaagaagcccagcttttccatcctggagatctacaggatttatcaaatcgagtcactgtcaagcaagaagagactgacaggagagtgaaaaatgttttgataacattgtactggctgggaagaaaagcacaaagcaacccgtactataatggtccccatcttaatttgaaagcgtttgagaatcttttaggacaagcactgacgaaggcactcgaagactccagcttcctgaaaagaagtggcagggacagtggctacggtgacatctggtgtcctgaacgtggagaatttcttgctcctccaaggcaccataagagagaagattcctttgaaagcttggactctttgggctcgaggtcattgacaagctgctcctctgatatcacgttgagaggggggcgtgaaggttttgaaagtgacacagattcggaatttacatttaagatgcaggattataataaagatgatatgtcgtatcgaaggatttcggctgttgagccaaagactgcgttacccttcaatcgttttttacccaacaaaagtagacagccatcctatgtaccagcacctctgagaaagaaaaagccagacaaacatgaggataacagaagaagttgggcaagcccggtttatacagaagcagatggaacattttcaagtaatcagaggaggatttggggcaccaatgtggagaactggccaactgtacaaggaacttcaaagtcctcttgttatttggaagaggaaaaagcaaagacaagaagcatacccaacattgtaaaggatgatctttatgtgcgcaagctcagtccagtcatgccaaacccagggaatgcttttgatcagtttcttcccaaatgttggaccccagaagatgtgaactggaaaagaataaaaagggaaacttataagccatggtataaagaatttcagggattcagtcagtttttactgcttcaggccctccaaacatactctgatgacatcttgtcttctgaaacacataccaaaattgatcccacttctggcccaaggctcataacccgcaggaagaatctctcttatgcaccaggctatagaagagatgacctcgagatggcagccctggatcctgacttagagaatgatgatttctttgtcagaaagactggggctttccatgcaaatccatatgttctccgagcttttgaagactttagaaagttctctgagcaagatgattctgtagagcgagatataattttacagtgtagagaaggtgaacttgtacttccggatttggaaaaagatgatatgattgttcgccgaattccagcacagaagaaagaagtgccgctgtctggggccccagatagataccacccagtcccttttcccgaaccctggactcttcctccagaaattcaagcaaaatttctctgtgtacttgaaaggacatgcccatccaaagaaaaaagtaatagctgtagaatattagttccttcatatcggcagaagaaagatgacatgctgacacgtaagattcagtcctggaaactgggaactaccgtgcctcccatcagtttcacccctggcccctgcagtgaggctgacttgaagagatgggaggccatccgggaggccagcagacttaggcacaagaaaaggctgatggtggagagactctttcaaaagatttatggtgagaatgggagtaagtccatgagtgatgtcagcgcagaagatgttcaaaacttgcgtcagctgcgttacgaggagatgcagaaaataaaatcacaattaaaagaacaagatcagaaatggcaggatgaccttgcaaaatggaaagatcgtcgaaaaagttacacttcagatctgcagaagaaaaaagaagagagagaagaaattgaaaagcaggcacttgagaagtctaagagaagctctaagacgtttaaggaaatgctgcaggacagggaatcccaaaatcaaaagtctacagttccgtcaagaaggagaatgtattcttttgatgatgtgctggaggaaggaaagcgaccccctacaatgactgtgtcagaagcaagttaccagagtgagagagtagaagagaagggagcaacttatccttcagaaattcccaaagaagattctaccacttttgcaaaaagagaggaccgtgtaacaactgaaattcagcttccttctcaaagtcctgtggaagaacaaagcccagcctctttgtcttctctgcgttcacggagcacacaaatggaatcaactcgtgtttcagcttctctccccagaagttaccggaaaactgatacagtcaggttaacatctgtggtcacaccaagaccctttggctctcagacaaggggaatctcatcactccccagatcttacacgatggatgatgcttggaagtataatggagatgttgaagacattaagagaactccaaacaatgtggtcagcacccctgcaccaagcccggacgcaagccaactggcttcaagcttatctagccagaaagaggtagcagcaacagaagaagatgtgacaaggctgccctctcctacatcccccttctcatctctttcccaagaccaggctgccacttctaaagccacattgtcttccacatctggtcttgatttaatgtctgaatctggagaaggggaaatctccccacaaagagaagtctcaagatcccaggatcagttcagtgatatgagaatcagcataaaccagacgcctgggaagagtcttgactttgggtttacaataaaatgggatattcctgggatcttcgtagcatcagttgaagcaggtagcccagcagaattttctcagctacaagtagatgatgaaattattgctattaacaacaccaagttttcatataacgattcaaaagagtgggaggaagccatggctaaggctcaagaaactggacacctagtgatggatgtgaggcgctatggaaaggctggttcacctgaaacaaagtggattgatgcaacttctggaatttacaactcagaaaaatcttcaaatctatctgtaacaactgatttctccgaaagccttcagagttctaatattgaatccaaagaaatcaatggaattcatgatgaaagcaatgcttttgaatcaaaagcatctgaatccatttctttgaaaaacttaaaaaggcgatcacaattttttgaacaaggaagctctgattcggtggttcctgatcttccagttccaaccatcagtgccccgagtcgctgggtgtgggatcaagaggaggagcggaagcggcaggagaggtggcagaaggagcaggaccgcctactgcaggaaaaatatcaacgtgagcaggagaaactgagggaagagtggcaaagggccaaacaggaggcagagagagagaattccaagtacttggatgaggaactgatggtcctaagctcaaacagcatgtctctgaccacacgggagccctctcttgccacctgggaagctacctggagtgaagggtccaagtcttcagacagagaaggaacccgagcaggagaagaggagaggagacagccacaagaggaagttgttcatgaggaccaaggaaagaagccgcaggatcagcttgttattgagagagagaggaaatgggagcaacagcttcaggaagagcaagagcaaaagcggcttcaggctgaggctgaggagcagaagcgtcctgcggaggagcagaagcgccaggcagagatagagcgggaaacatcagtcagaatataccagtacaggaggcctgttgattcctatgatataccaaagacagaagaagcatcttcaggttttcttcctggtgacaggaataaatccagatctactactgaactggatgattactccacaaataaaaatggaaacaataaatatttagaccaaattgggaacatgacctcttcacagaggagatccaagaaagaacaagtaccatcaggagcagaattggagaggcaacaaatccttcaggaaatgaggaagagaacaccccttcacaatgacaacagctggatccgacagcgcagtgccagtgtcaacaaagagcctgttagtcttcctgggatcatgagaagaggcgaatctttagataacctggactccccccgatccaattcttggagacagcctccttggctcaatcagcccacaggattctatgcttcttcctctgtgcaagactttagtcgcccaccacctcagctggtgtccacatcaaaccgtgcctacatgcggaacccctcctccagcgtgcccccaccttcagctggctccgtgaagacctccaccacaggtgtggccaccacacagtcccccaccccgagaagccattccccttcagcttcacagtcaggctctcagctgcgtaacagtgtgttgcctgtgagtgtgacctcggaggctcttcctcaggagctgaagtcaggatcagaaaccaccaactgtactgcaacgactgctatctcagattcaaatctggacggccaaccgccatgtgatgtaagcctccatacgaaagcactgttgcagatagaagaagaggtggttgctgctcatgtagatctataaatatgtgttgtatgtcttttttgctttttttttaaaaaaaagaataactttttttgcctctttagattacatagaagcattgtagtcttggtagaaccagtatttttgttgtttatttataaggtaattgtgtgtggggaaaagtgcagtatttacctgttgaattcagcatcttgagagcacaagggaaaaaataagaacctacgaatatttttgaggcagataatgatctagtttgactttctagttagtggtgttttgaagagggtattttattgttttttaaaaaaaggttcttaaacattatttgaaatagttaatataaatacataattgcatttgctctgtttattgtaatgtattctaaattaatgcagaaccatatggaaaatttcattaaaatctatccccaaatgtgctttctgtatccttccttctacctattattctgatttttaaaaatgcagttaatgtaccatttatttgcttgatgaagggagctctattttctttaccagaaatgttgctaagtaattcccaatagaaagctgcttattttcattaatgaaaaataaccatggtttgtatactagaagtcttcttcagaaactggtgagcctttctgttcaattgcatttgtaaataaacttgctgatgcatttaacgagtgggtcgtctttttcttaggtgtatgtgtctgacctcaggccttttagccatatttcagtatgtggccttttttgatgttatgttttatccagtagctttactaaggtataattgatgtaataaactgcatatatttaaagtgtatactttgacaaattttgacatggtgtataccttcgaaactatgccacagtctggatgtgtttactgaaacattttaataaggaagtttatttttgataaagttatgtttttggatacaatatatttgtatggtgagagtgatgaattgttggatcatttgaataaaatcttttactaaccccatgataaaaggagaagacaacagtgagcttagaatatctataaagcaaaaaatgtagtctcttgtttaaaaaatctggagcgggaatgcaaggatacaaaactttagcatgctttgagcaaaaatttaaacttactggaatcttttataataatgtaagtggaatggaggattctaggaactgagaactgtattggaataggttcaaaatatgtaagaaatgctaatgtgggagataaaaattttatttagtacttattctgattattattaaagtaataatgtgttccttgaggataacttgtcaaatgccccaaagcataaagaatataattctgaatcccaaattccaaagacaagaactctgtgtttgaattcattctgcatataattatttataagtatagattgtgaatttttccatgttcttaaaattatttttatcttttttcatggttgcatagtgctccattgtttggccttggtaatatttagttgataattccattactgtgtatttttcacttgtttctaagatcaaacattttaatatgtgcatgttatatataaatatgtaaattctgtgatactctatgatcatctctttctttatattattttcatagacatgaaatagttgctcagagattatgcattttaagacactcatagtatatattgccaaagtggtttccagaaaggcactgctggcttcgactcctataagcagcacgtgggcttgttcatctcactgcatgtttatgaagatacagttcttttgccttgttctctgcctgatgtgtatgcagaggcagccctcaatatgcagtggttgaataaatgaatgaagaaaccact

SEQ ID NO: 1242 - protein, 1670 aa, Homo sapiens
MKKIRICHIFTFYSWMSYDVLFQRTELGALEIWRQLICAHVCICVGWLYLRDRVCSKKDIILRTEQNSGRTILIKAVTEKNFETKDFRASLENGVLLCDLINKLKPGVIKKINRLSTPIAGLDNINVFLKACEQIGLKEAQLFHPGDLQDLSNRVTVKQEETDRRVKNVLITLYWLGRKAQSNPYYNGPHLNLKAFENLLGQALTKALEDSSFLKRSGRDSGYGDIWCPERGEFLAPPRHHKREDSFESLDSLGSRSLTSCSSDITLRGGREGFESDTDSEFTFKMQDYNKDDMSYRRISAVEPKTALPFNRFLPNKSRQPSYVPAPLRKKKPDKHEDNRRSWASPVYTEADGTFSSNQRRIWGTNVENWPTVQGTSKSSCYLEEEKAKTRSIPNIVKDDLYVRKLSPVMPNPGNAFDQFLPKCWTPEDVNWKRIKRETYKPWYKEFQGFSQFLLLQALQTYSDDILSSETHTKIDPTSGPRLITRRKNLSYAPGYRRDDLEMAALDPDLENDDFFVRKTGAFHANPYVLRAFEDFRKFSEQDDSVERDIILQCREGELVLPDLEKDDMIVRRIPAQKKEVPLSGAPDRYHPVPFPEPWTLPPEIQAKFLCVLERTCPSKEKSNSCRILVPSYRQKKDDMLTRKIQSWKLGTTVPPISFTPGPCSEADLKRWEAIREASRLRHKKRLMVERLFQKIYGENGSKSMSDVSAEDVQNLRQLRYEEMQKIKSQLKEQDQKWQDDLAKWKDRRKSYTSDLQKKKEEREEIEKQALEKSKRSSKTFKEMLQDRESQNQKSTVPSRRRMYSFDDVLEEGKRPPTMTVSEASYQSERVEEKGATYPSEIPKEDSTTFAKREDRVTTEIQLPSQSPVEEQSPASLSSLRSRSTQMESTRVSASLPRSYRKTDTVRLTSVVTPRPFGSQTRGISSLPRSYTMDDAWKYNGDVEDIKRTPNNVVSTPAPSPDASQLASSLSSQKEVAATEEDVTRLPSPTSPFSSLSQDQAATSKATLSSTSGLDLMSESGEGEISPQREVSRSQDQFSDMRISINQTPGKSLDFGFTIKWDIPGIFVASVEAGSPAEFSQLQVDDEIIAINNTKFSYNDSKEWEEAMAKAQETGHLVMDVRRYGKAGSPETKWIDATSGIYNSEKSSNLSVTTDFSESLQSSNIESKEINGIHDESNAFESKASESISLKNLKRRSQFFEQGSSDSVVPDLPVPTISAPSRWVWDQEEERKRQERWQKEQDRLLQEKYQREQEKLREEWQRAKQEAERENSKYLDEELMVLSSNSMSLTTREPSLATWEATWSEGSKSSDREGTRAGEEERRQPQEEVVHEDQGKKPQDQLVIERERKWEQQLQEEQEQKRLQAEAEEQKRPAEEQKRQAEIERETSVRIYQYRRPVDSYDIPKTEEASSGFLPGDRNKSRSTTELDDYSTNKNGNNKYLDQIGNMTSSQRRSKKEQVPSGAELERQQILQEMRKRTPLHNDNSWIRQRSASVNKEPVSLPGIMRRGESLDNLDSPRSNSWRQPPWLNQPTGFYASSSVQDFSRPPPQLVSTSNRAYMRNPSSSVPPPSAGSVKTSTTGVATTQSPTPRSHSPSASQSGSQLRNSVLPVSVTSEALPQELKSGSETTNCTATTAISDSNLDGQPPCDVSLHTKALLQIEEEVVAAHVDL

SEQ ID NO: 1243 - DNA, 7232 bp, Homo sapiens
ggaaagaagtggaataattaggaacctagggtggggtagggtagcaggacatttcaaacattaatgagcatatgagattccaggtcttgttaaaatgcaaattctgattcagctggtaggtgaggtctgagattgtgcatttctaacaagcactcagataatcttaaggctgttggccccagggtcacacttatagtgattttctagaacccagttggggaagtgaatcttgggcaggagaaatacacacctcttgcattgagtttggagatctcatctgatataactttttaagaaagaaaaataattttccaaatatccaattgataagctttcccactaagtggctttcccactaagtggctgcgttatgaaaattgcttcactttgaaacttctggtcttggtaatatagaatttctgtgttctcacagtgcttgattgagaatatgatattgagattatggcataaaatatagtggctgtacaaaaaaaaatacattattaggatctctaacaattatgtaaaagtcattgcttcatgggtagagctcaaactttggtgtgagacctggttttattcttggcacttactctgagttgtcttaggcaaattaataccttaagcaaaaatattctcatgtacattttacatgagaattataaatgaagtacataaagtccagcagtcacaaatgttatctattattaccatcgtcctaagactgcaatcagctatagtgaaagtagtctcaaagattgtttcataaatcatcagattcacctaattttctaaagaatttaaataaggagatggaatgaatagattgcattttgtttccatgcacaggggaactgtgcatatttcttctgtgactcggaaatggtttaacttttaaaaatcccaaaatagctgaagttagcagacatgcaatttaccaaggatgattggaatttttatctttcctgtaataatactatacccaagcacactgctcatgaggaaaacatttttatgtgaatcttttactcttgggggcaaagaatgctgtttttctttttgataactatgtttatagaatctaaatcaccctgagcaattatttcaacatctaaagttattattaccattcatgtttcatttatagctatttgaattttgatgaatttcaatatggtgctacagtgatagggcaagtgcaaataagttcaatatatgggtacggtctaaagctattttaatttttttattacaactgctatgaagaaaattaggatatgccatattttcacgttttacagttggatgtcctatgatgttctcttccagagaacagagctcggagctctggaaatttggaggcaactgatatgtgctcatgtctgcatctgtgtgggttggctgtatctcagggacagagtctgcagcaaaaaagatataattttgaggactgaacaaaattcaggaaggactattctcattaaggcagtaacagagaagaattttgaaacaaaagattttcgagcctctctagaaaatggtgttctgctgtgtgatttgattaataagcttaaacctggcgtcattaagaagatcaatagactgtctacaccaatagcaggattggataatataaacgttttcttgaaagcttgtgaacagattggattgaaagaagcccagcttttccatcctggagatctacaggatttatcaaatcgagtcactgtcaagcaagaagagactgacaggagagtgaaaaatgttttgataacattgtactggctgggaagaaaagcacaaagcaacccgtactataatggtccccatcttaatttgaaagcgtttgagaatcttttaggacaagcactgacgaaggcactcgaagactccagcttcctgaaaagaagtggcagggacagtggctacggtgacatctggtgtcctgaacgtggagaatttcttgctcctccaaggcaccataagagagaagattcctttgaaagcttggactctttgggctcgaggtcattgacaagctgctcctctgatatcacgttgagaggggggcgtgaaggttttgaaagtgacacagattcggaatttacatttaagatgcaggattataataaagatgatatgtcgtatcgaaggatttcggctgttgagccaaagactgcgttacccttcaatcgttttttacccaacaaaagtagacagccatcctatgtaccagcacctctgagaaagaaaaagccagacaaacatgaggataacagaagaagttgggcaagcccggtttatacagaagcagatggaacattttcaagactctttcaaaagatttatggtgagaatgggagtaagtccatgagtgatgtcagcgcagaagatgttcaaaacttgcgtcagctgcgttacgaggagatgcagaaaataaaatcacaattaaaagaacaagatcagaaatggcaggatgaccttgcaaaatggaaagatcgtcgaaaaagttacacttcagatctgcagaagaaaaaagaagagagagaagaaattgaaaagcaggcacttgagaagtctaagagaagctctaagacgtttaaggaaatgctgcaggacagggaatcccaaaatcaaaagtctacagttccgtcaagaaggagaatgtattcttttgatgatgtgctggaggaaggaaagcgaccccctacaatgactgtgtcagaagcaagttaccagagtgagagagtagaagagaagggagcaacttatccttcagaaattcccaaagaagattctaccacttttgcaaaaagagaggaccgtgtaacaactgaaattcagcttccttctcaaagtcctgtggaagaacaaagcccagcctctttgtcttctctgcgttcacggagcacacaaatggaatcaactcgtgtttcagcttctctccccagaagttaccggaaaactgatacagtcaggttaacatctgtggtcacaccaagaccctttggctctcagacaaggggaatctcatcactccccagatcttacacgatggatgatgcttggaagtataatggagatgttgaagacattaagagaactccaaacaatgtggtcagcacccctgcaccaagcccggacgcaagccaactggcttcaagcttatctagccagaaagaggtagcagcaacagaagaagatgtgacaaggctgccctctcctacatcccccttctcatctctttcccaagaccaggctgccacttctaaagccacattgtcttccacatctggtcttgatttaatgtctgaatctggagaaggggaaatctccccacaaagagaagtctcaagatcccaggatcagttcagtgatatgagaatcagcataaaccagacgcctgggaagagtcttgactttgggtttacaataaaatgggatattcctgggatcttcgtagcatcagttgaagcaggtagcccagcagaattttctcagctacaagtagatgatgaaattattgctattaacaacaccaagttttcatataacgattcaaaagagtgggaggaagccatggctaaggctcaagaaactggacacctagtgatggatgtgaggcgctatggaaaggctggttcacctgaaacaaagtggattgatgcaacttctggaatttacaactcagaaaaatcttcaaatctatctgtaacaactgatttctccgaaagccttcagagttctaatattgaatccaaagaaatcaatggaattcatgatgaaagcaatgcttttgaatcaaaagcatctgaatccatttctttgaaaaacttaaaaaggcgatcacaattttttgaacaaggaagctctgattcggtggttcctgatcttccagttccaaccatcagtgccccgagtcgctgggtgtgggatcaagaggaggagcggaagcggcaggagaggtggcagaaggagcaggaccgcctactgcaggaaaaatatcaacgtgagcaggagaaactgagggaagagtggcaaagggccaaacaggaggcagagagagagaattccaagtacttggatgaggaactgatggtcctaagctcaaacagcatgtctctgaccacacgggagccctctcttgccacctgggaagctacctggagtgaagggtccaagtcttcagacagagaaggaacccgagcaggagaagaggagaggagacagccacaagaggaagttgttcatgaggaccaaggaaagaagccgcaggatcagcttgttattgagagagagaggaaatgggagcaacagcttcaggaagagcaagagcaaaagcggcttcaggctgaggctgaggagcagaagcgtcctgcggaggagcagaagcgccaggcagagatagagcgggaaacatcagtcagaatataccagtacaggaggcctgttgattcctatgatataccaaagacagaagaagcatcttcaggttttcttcctggtgacaggaataaatccagatctactactgaactggatgattactccacaaataaaaatggaaacaataaatatttagaccaaattgggaacatgacctcttcacagaggagatccaagaaagaacaagtaccatcaggagcagaattggagaggcaacaaatccttcaggaaatgaggaagagaacaccccttcacaatgacaacagctggatccgacagcgcagtgccagtgtcaacaaagagcctgttagtcttcctgggatcatgagaagaggcgaatctttagataacctggactccccccgatccaattcttggagacagcctccttggctcaatcagcccacaggattctatgcttcttcctctgtgcaagactttagtcgcccaccacctcagctggtgtccacatcaaaccgtgcctacatgcggaacccctcctccagcgtgcccccaccttcagctggctccgtgaagacctccaccacaggtgtggccaccacacagtcccccaccccgagaagccattccccttcagcttcacagtcaggctctcagctgcgtaacaggtcagtcagtgggaagcgcatatgctcctactgcaataacattctgggcaaaggagccgccatgatcatcgagtccctgggtctttgttatcatttgcattgttttaagtgtgttgcctgtgagtgtgacctcggaggctcttcctcaggagctgaagtcaggatcagaaaccaccaactgtactgcaacgactgctatctcagattcaaatctggacggccaaccgccatgtgatgtaagcctccatacgaaagcactgttgcagatagaagaagaggtggttgctgctcatgtagatctataaatatgtgttgtatgtcttttttgctttttttttaaaaaaaagaataactttttttgcctctttagattacatagaagcattgtagtcttggtagaaccagtatttttgttgtttatttataaggtaattgtgtgtggggaaaagtgcagtatttacctgttgaattcagcatcttgagagcacaagggaaaaaataagaacctacgaatatttttgaggcagataatgatctagtttgactttctagttagtggtgttttgaagagggtattttattgttttttaaaaaaaggttcttaaacattatttgaaatagttaatataaatacataattgcatttgctctgtttattgtaatgtattctaaattaatgcagaaccatatggaaaatttcattaaaatctatccccaaatgtgctttctgtatccttccttctacctattattctgatttttaaaaatgcagttaatgtaccatttatttgcttgatgaagggagctctattttctttaccagaaatgttgctaagtaattcccaatagaaagctgcttattttcattaatgaaaaataaccatggtttgtatactagaagtcttcttcagaaactggtgagcctttctgttcaattgcatttgtaaataaacttgctgatgcatttaacgagtgggtcgtctttttcttaggtgtatgtgtctgacctcaggccttttagccatatttcagtatgtggccttttttgatgttatgttttatccagtagctttactaaggtataattgatgtaataaactgcatatatttaaagtgtatactttgacaaattttgacatggtgtataccttcgaaactatgccacagtctggatgtgtttactgaaacattttaataaggaagtttatttttgataaagttatgtttttggatacaatatatttgtatggtgagagtgatgaattgttggatcatttgaataaaatcttttactaaccccatgataaaaggagaagacaacagtgagcttagaatatctataaagcaaaaaatgtagtctcttgtttaaaaaatctggagcgggaatgcaaggatacaaaactttagcatgctttgagcaaaaatttaaacttactggaatcttttataataatgtaagtggaatggaggattctaggaactgagaactgtattggaataggttcaaaatatgtaagaaatgctaatgtgggagataaaaattttatttagtacttattctgattattattaaagtaataatgtgttccttgaggataacttgtcaaatgccccaaagcataaagaatataattctgaatcccaaattccaaagacaagaactctgtgtttgaattcattctgcatataattatttataagtatagattgtgaatttttccatgttcttaaaattatttttatcttttttcatggttgcatagtgctccattgtttggccttggtaatatttagttgataattccattactgtgtatttttcacttgtttctaagatcaaacattttaatatgtgcatgttatatataaatatgtaaattctgtgatactctatgatcatctctttctttatattattttcatagacatgaaatagttgctcagagattatgcattttaagacactcatagtatatattgccaaagtggtttccagaaaggcactgctggcttcgactcctataagcagcacgtgggcttgttcatctcactgcatgtttatgaagatacagttcttttgccttgttctctgcctgatgtgtatgcagaggcagccctcaatatgcagtggttgaataaatgaatgaagaaaccact

SEQ ID NO: 1244 - protein, 1349 aa, Homo sapiens
MKKIRICHIFTFYSWMSYDVLFQRTELGALEIWRQLICAHVCICVGWLYLRDRVCSKKDIILRTEQNSGRTILIKAVTEKNFETKDFRASLENGVLLCDLINKLKPGVIKKINRLSTPIAGLDNINVFLKACEQIGLKEAQLFHPGDLQDLSNRVTVKQEETDRRVKNVLITLYWLGRKAQSNPYYNGPHLNLKAFENLLGQALTKALEDSSFLKRSGRDSGYGDIWCPERGEFLAPPRHHKREDSFESLDSLGSRSLTSCSSDITLRGGREGFESDTDSEFTFKMQDYNKDDMSYRRISAVEPKTALPFNRFLPNKSRQPSYVPAPLRKKKPDKHEDNRRSWASPVYTEADGTFSRLFQKIYGENGSKSMSDVSAEDVQNLRQLRYEEMQKIKSQLKEQDQKWQDDLAKWKDRRKSYTSDLQKKKEEREEIEKQALEKSKRSSKTFKEMLQDRESQNQKSTVPSRRRMYSFDDVLEEGKRPPTMTVSEASYQSERVEEKGATYPSEIPKEDSTTFAKREDRVTTEIQLPSQSPVEEQSPASLSSLRSRSTQMESTRVSASLPRSYRKTDTVRLTSVVTPRPFGSQTRGISSLPRSYTMDDAWKYNGDVEDIKRTPNNVVSTPAPSPDASQLASSLSSQKEVAATEEDVTRLPSPTSPFSSLSQDQAATSKATLSSTSGLDLMSESGEGEISPQREVSRSQDQFSDMRISINQTPGKSLDFGFTIKWDIPGIFVASVEAGSPAEFSQLQVDDEIIAINNTKFSYNDSKEWEEAMAKAQETGHLVMDVRRYGKAGSPETKWIDATSGIYNSEKSSNLSVTTDFSESLQSSNIESKEINGIHDESNAFESKASESISLKNLKRRSQFFEQGSSDSVVPDLPVPTISAPSRWVWDQEEERKRQERWQKEQDRLLQEKYQREQEKLREEWQRAKQEAERENSKYLDEELMVLSSNSMSLTTREPSLATWEATWSEGSKSSDREGTRAGEEERRQPQEEVVHEDQGKKPQDQLVIERERKWEQQLQEEQEQKRLQAEAEEQKRPAEEQKRQAEIERETSVRIYQYRRPVDSYDIPKTEEASSGFLPGDRNKSRSTTELDDYSTNKNGNNKYLDQIGNMTSSQRRSKKEQVPSGAELERQQILQEMRKRTPLHNDNSWIRQRSASVNKEPVSLPGIMRRGESLDNLDSPRSNSWRQPPWLNQPTGFYASSSVQDFSRPPPQLVSTSNRAYMRNPSSSVPPPSAGSVKTSTTGVATTQSPTPRSHSPSASQSGSQLRNRSVSGKRICSYCNNILGKGAAMIIESLGLCYHLHCFKCVACECDLGGSSSGAEVRIRNHQLYCNDCYLRFKSGRPTAM

SEQ ID NO: 1245 - DNA, 5572 bp, Homo sapiens
atgaagaaaattaggatatgccatattttcacgttttacagttggatgtcctatgatgttctcttccagagaacagagctcggagctctggaaatttggaggcaactgatatgtgctcatgtctgcatctgtgtgggttggctgtatctcagggacagagtctgcagcaaaaaagatataattttgaggactgaacaaaattcaggaaggactattctcattaaggcagtaacagagaagaattttgaaacaaaagattttcgagcctctctagaaaatggtgttctgctgtgtgatttgattaataagcttaaacctggcgtcattaagaagatcaatagactgtctacaccaatagcaggattggataatataaacgttttcttgaaagcttgtgaacagattggattgaaagaagcccagcttttccatcctggagatctacaggatttatcaaatcgagtcactgtcaagcaagaagagactgacaggagagtgaaaaatgttttgataacattgtactggctgggaagaaaagcacaaagcaacccgtactataatggtccccatcttaatttgaaagcgtttgagaatcttttaggacaagcactgacgaaggcactcgaagactccagcttcctgaaaagaagtggcagggacagtggctacggtgacatctggtgtcctgaacgtggagaatttcttgctcctccaaggcaccataagagagaagattcctttgaaagcttggactctttgggctcgaggtcattgacaagctgctcctctgatatcacgttgagaggggggcgtgaaggttttgaaagtgacacagattcggaatttacatttaagatgcaggattataataaagatgatatgtcgtatcgaaggatttcggctgttgagccaaagactgcgttacccttcaatcgttttttacccaacaaaagtagacagccatcctatgtaccagcacctctgagaaagaaaaagccagacaaacatgaggataacagaagaagttgggcaagcccggtttatacagaagcagatggaacattttcaagtaatcagaggaggatttggggcaccaatgtggagaactggccaactgtacaaggaacttcaaagtcctcttgttatttggaagaggaaaaagcaaagacaagaagcatacccaacattgtaaaggatgatctttatgtgcgcaagctcagtccagtcatgccaaacccagggaatgcttttgatcagtttcttcccaaatgttggaccccagaagatgtgaactggaaaagaataaaaagggaaacttataagccatggtataaagaatttcagggattcagtcagtttttactgcttcaggccctccaaacatactctgatgacatcttgtcttctgaaacacataccaaaattgatcccacttctggcccaaggctcataacccgcaggaagaatctctcttatgcaccaggctatagaagagatgacctcgagatggcagccctggatcctgacttagagaatgatgatttctttgtcagaaagactggggctttccatgcaaatccatatgttctccgagcttttgaagactttagaaagttctctgagcaagatgattctgtagagcgagatataattttacagtgtagagaaggtgaacttgtacttccggatttggaaaaagatgatatgattgttcgccgaattccagcacagaagaaagaagtgccgctgtctggggccccagatagataccacccagtcccttttcccgaaccctggactcttcctccagaaattcaagcaaaatttctctgtgtacttgaaaggacatgcccatccaaagaaaaaagtaatagctgtagaatattagttccttcatatcggcagaagaaagatgacatgctgacacgtaagattcagtcctggaaactgggaactaccgtgcctcccatcagtttcacccctggcccctgcagtgaggctgacttgaagagatgggaggccatccgggaggccagcagacttaggcacaagaaaaggctgatggtggagagactctttcaaaagatttatggtgagaatgggagtaagtccatgagtgatgtcagcgcagaagatgttcaaaacttgcgtcagctgcgttacgaggagatgcagaaaataaaatcacaattaaaagaacaagatcagaaatggcaggatgaccttgcaaaatggaaagatcgtcgaaaaagttacacttcagatctgcagaagaaaaaagaagagagagaagaaattgaaaagcaggcacttgagaagtctaagagaagctctaagacgtttaaggaaatgctgcaggacagggaatcccaaaatcaaaagtctacagttccgtcaagaaggagaatgtattcttttgatgatgtgctggaggaaggaaagcgaccccctacaatgactgtgtcagaagcaagttaccagagtgagagagtagaagagaagggagcaacttatccttcagaaattcccaaagaagattctaccacttttgcaaaaagagaggaccgtgtaacaactgaaattcagcttccttctcaaagtcctgtggaagaacaaagcccagcctctttgtcttctctgcgttcacggagcacacaaatggaatcaactcgtgtttcagcttctctccccagaagttaccggaaaactgatacagtcaggttaacatctgtggtcacaccaagaccctttggctctcagacaaggggaatctcatcactccccagatcttacacgatggatgatgcttggaagtataatggagatgttgaagacattaagagaactccaaacaatgtggtcagcacccctgcaccaagcccggacgcaagccaactggcttcaagcttatctagccagaaagaggtagcagcaacagaagaagatgtgacaaggctgccctctcctacatcccccttctcatctctttcccaagaccaggctgccacttctaaagccacattgtcttccacatctggtcttgatttaatgtctgaatctggagaaggggaaatctccccacaaagagaagtctcaagatcccaggatcagttcagtgatatgagaatcagcataaaccagacgcctgggaagagtcttgactttgggtttacaataaaatgggatattcctgggatcttcgtagcatcagttgaagcaggtagcccagcagaattttctcagctacaagtagatgatgaaattattgctattaacaacaccaagttttcatataacgattcaaaagagtgggaggaagccatggctaaggctcaagaaactggacacctagtgatggatgtgaggcgctatggaaaggctggttcacctgaaacaaagtggattgatgcaacttctggaatttacaactcagaaaaatcttcaaatctatctgtaacaactgatttctccgaaagccttcagagttctaatattgaatccaaagaaatcaatggaattcatgatgaaagcaatgcttttgaatcaaaagcatctgaatccatttctttgaaaaacttaaaaaggcgatcacaattttttgaacaaggaagctctgattcggtggttcctgatcttccagttccaaccatcagtgccccgagtcgctgggtgtgggatcaagaggaggagcggaagcggcaggagaggtggcagaaggagcaggaccgcctactgcaggaaaaatatcaacgtgagcaggagaaactgagggaagagtggcaaagggccaaacaggaggcagagagagagaattccaagtacttggatgaggaactgatggtcctaagctcaaacagcatgtctctgaccacacgggagccctctcttgccacctgggaagctacctggagtgaagggtccaagtcttcagacagagaaggaacccgagcaggagaagaggagaggagacagccacaagaggaagttgttcatgaggaccaaggaaagaagccgcaggatcagcttgttattgagagagagaggaaatgggagcaacagcttcaggaagagcaagagcaaaagcggcttcaggctgaggctgaggagcagaagcgtcctgcggaggagcagaagcgccaggcagagatagagcgggaaacatcagtcagaatataccagtacaggaggcctgttgattcctatgatataccaaagacagaagaagcatcttcaggttttcttcctggtgacaggaataaatccagatctactactgaactggatgattactccacaaataaaaatggaaacaataaatatttagaccaaattgggaacatgacctcttcacagaggagatccaagaaagaacaagtaccatcaggagcagaattggagaggcaacaaatccttcaggaaatgaggaagagaacaccccttcacaatgacaacagctggatccgacagcgcagtgccagtgtcaacaaagagcctgttagtcttcctgggatcatgagaagaggcgaatctttagataacctggactccccccgatccaattcttggagacagcctccttggctcaatcagcccacaggattctatgcttcttcctctgtgcaagactttagtcgcccaccacctcagctggtgtccacatcaaaccgtgcctacatgcggaacccctcctccagcgtgcccccaccttcagctggctccgtgaagacctccaccacaggtgtggccaccacacagtcccccaccccgagaagccattccccttcagcttcacagtcaggctctcagctgcgtaacagctggacggccaaccgccatgtgatgtaagcctccatacgaaagcactgttgcagatagaagaagaggtggttgctgctcatgtagatctataaatatgtgttgtatgtcttttttgctttttttttaaaaaaaagaataactttttttgcctctttagattacatagaagcattgtagtcttggtagaaccagtatttttgttgtttatttataaggtaattgtgtgtggggaaaagtgcagtatttacctgttgaattcagcatcttgagagcacaagggaaaaaataagaacctacgaatatttttgaggcagataatgatctagtttgactttctagttagtggtgttttgaagagggtattttattgttttttaaaaaaaggttcttaaacattatttgaaatagttaatataaatacataattgcatttgctctgtttattgtaatgtattctaaattaatgcagaaccatatggaaaatttcattaaaatctatccccaaatgtgctttctgtatccttccttctacctattattctgatttttaaaaatgcagttaatgtaccatttatttgcttgatgaagggagctctattttctttaccagaaatgttgctaagtaattcccaatagaaagctgcttattttcattaatgaaaaataaccatggtttgtatactagaagtcttcttcagaaactggtgagcctttctgttcaattgcatttgtaaataaacttgctgatgcattt

SEQ ID NO: 1246 - protein, 1614 aa, Homo sapiens
MKKIRICHIFTFYSWMSYDVLFQRTELGALEIWRQLICAHVCICVGWLYLRDRVCSKKDIILRTEQNSGRTILIKAVTEKNFETKDFRASLENGVLLCDLINKLKPGVIKKINRLSTPIAGLDNINVFLKACEQIGLKEAQLFHPGDLQDLSNRVTVKQEETDRRVKNVLITLYWLGRKAQSNPYYNGPHLNLKAFENLLGQALTKALEDSSFLKRSGRDSGYGDIWCPERGEFLAPPRHHKREDSFESLDSLGSRSLTSCSSDITLRGGREGFESDTDSEFTFKMQDYNKDDMSYRRISAVEPKTALPFNRFLPNKSRQPSYVPAPLRKKKPDKHEDNRRSWASPVYTEADGTFSSNQRRIWGTNVENWPTVQGTSKSSCYLEEEKAKTRSIPNIVKDDLYVRKLSPVMPNPGNAFDQFLPKCWTPEDVNWKRIKRETYKPWYKEFQGFSQFLLLQALQTYSDDILSSETHTKIDPTSGPRLITRRKNLSYAPGYRRDDLEMAALDPDLENDDFFVRKTGAFHANPYVLRAFEDFRKFSEQDDSVERDIILQCREGELVLPDLEKDDMIVRRIPAQKKEVPLSGAPDRYHPVPFPEPWTLPPEIQAKFLCVLERTCPSKEKSNSCRILVPSYRQKKDDMLTRKIQSWKLGTTVPPISFTPGPCSEADLKRWEAIREASRLRHKKRLMVERLFQKIYGENGSKSMSDVSAEDVQNLRQLRYEEMQKIKSQLKEQDQKWQDDLAKWKDRRKSYTSDLQKKKEEREEIEKQALEKSKRSSKTFKEMLQDRESQNQKSTVPSRRRMYSFDDVLEEGKRPPTMTVSEASYQSERVEEKGATYPSEIPKEDSTTFAKREDRVTTEIQLPSQSPVEEQSPASLSSLRSRSTQMESTRVSASLPRSYRKTDTVRLTSVVTPRPFGSQTRGISSLPRSYTMDDAWKYNGDVEDIKRTPNNVVSTPAPSPDASQLASSLSSQKEVAATEEDVTRLPSPTSPFSSLSQDQAATSKATLSSTSGLDLMSESGEGEISPQREVSRSQDQFSDMRISINQTPGKSLDFGFTIKWDIPGIFVASVEAGSPAEFSQLQVDDEIIAINNTKFSYNDSKEWEEAMAKAQETGHLVMDVRRYGKAGSPETKWIDATSGIYNSEKSSNLSVTTDFSESLQSSNIESKEINGIHDESNAFESKASESISLKNLKRRSQFFEQGSSDSVVPDLPVPTISAPSRWVWDQEEERKRQERWQKEQDRLLQEKYQREQEKLREEWQRAKQEAERENSKYLDEELMVLSSNSMSLTTREPSLATWEATWSEGSKSSDREGTRAGEEERRQPQEEVVHEDQGKKPQDQLVIERERKWEQQLQEEQEQKRLQAEAEEQKRPAEEQKRQAEIERETSVRIYQYRRPVDSYDIPKTEEASSGFLPGDRNKSRSTTELDDYSTNKNGNNKYLDQIGNMTSSQRRSKKEQVPSGAELERQQILQEMRKRTPLHNDNSWIRQRSASVNKEPVSLPGIMRRGESLDNLDSPRSNSWRQPPWLNQPTGFYASSSVQDFSRPPPQLVSTSNRAYMRNPSSSVPPPSAGSVKTSTTGVATTQSPTPRSHSPSASQSGSQLRNSWTANRHVM

SEQ ID NO: 1247 - DNA, 2288 bp, Homo sapiens
agagacttagagccgagtgggacaaagcctggggctgggcgggggccatggcgctgccatcccgaatcctgctttggaaacttgtgcttctgcagagctctgctgttctcctgcactcagggtcctcggtacccgccgctgctggcagctccgtggtgtccgagtccgcggtgagctgggaggcgggcgcccgggcggtgctgcgctgccagagcccgcgcatggtgtggacccaggaccggctgcacgaccgccagcgcgtgctccactgggacctgcgcggccccgggggtggccccgcgcggcgcctgctggacttgtactcggcgggcgagcagcgcgtgtacgaggcgcgggaccgcggccgcctggagctctcggcctcggccttcgacgacggcaacttctcgctgctcatccgcgcggtggaggagacggacgcggggctgtacacctgcaacctgcaccatcactactgccacctctacgagagcctggccgtccgcctggaggtcaccgacggccccccggccacccccgcctactgggacggcgagaaggaggtgctggcggtggcgcgcggcgcacccgcgcttctgacctgcgtgaaccgcgggcacgtgtggaccgaccggcacgtggaggaggctcaacaggtggtgcactgggaccggcagccgcccggggtcccgcacgaccgcgcggaccgcctgctggacctctacgcgtcgggcgagcgccgcgcctacgggcccctttttctgcgcgaccgcgtggctgtgggcgcggatgcctttgagcgcggtgacttctcactgcgtatcgagccgctggaggtcgccgacgagggcacctactcctgccacctgcaccaccattactgtggcctgcacgaacgccgcgtcttccacctgacggtcgccgaaccccacgcggagccgcccccccggggctctccgggcaacggctccagccacagcggcgccccaggcccagaccccacactggcgcgcggccacaacgtcatcaatgtcatcgtccccgagagccgagcccacttcttccagcagctgggctacgtgctggccacgctgctgctcttcatcctgctactggtcactgtcctcctggccgcccgcaggcgccgcggaggctacgaatactcggaccagaagtcgggaaagtcaaaggggaaggatgttaacttggcggagttcgctgtggctgcaggggaccagatgctttacaggagtgaggacatccagctagattacaaaaacaacatcctgaaggagagggcggagctggcccacagccccctgcctgccaagtacatcgacctagacaaagggttccggaaggagaactgcaaatagggaggccctgggctcctggctgggccagcagctgcacctctcctgtctgtgctcctcggggcatctcctgatgctccggggctcaccccccttccagcggctggtcccgctttcctggaatttggcctgggcgtatgcagaggccgcctccacacccctctcccaggggcttggtggcagcatagcccccacccctgcggcctttgctcacgggtggccctgcccacccctggcacaaccaaaatcccactgatgcccatcatgccctcagacccttctgggctctgcccgctgggggcctgaagacattcctggaggacactcccatcagaacctggcagccccaaaactggggtcagcctcagggcaggagtcccactcctccagggctctgctcgtcgggggctgggagatgttcctggaggaggacactcccatcagaacttggcagccttgaagttggggtcagcctcggcaggagtcccactcctcctggggtgctgcctgccaccgagagctcccccacctgtaccaccatgtgggactccaggcaccatctgttctccccagggacctgctgacttgaatgccagcccttgctcctctgtgttgctttgggccacctggggctgcaccccttgccctttctctgccccatccctaccctagccttgctctcagccaccttgatagtcactgggctccctgtgacttctgaccctgacacccctcccttggactctgcctgggctggagtctagggctggggctacatttggcttctgtactggctgaggacaggggagggagtgaagttggtttggggtggcctgtgttgccactctcagcaccccacatttgcatctgctggtggacctgccaccatcacaataaagtccccatctgattttt

SEQ ID NO: 1248 - protein, 442 aa, Homo sapiens
MALPSRILLWKLVLLQSSAVLLHSGSSVPAAAGSSVVSESAVSWEAGARAVLRCQSPRMVWTQDRLHDRQRVLHWDLRGPGGGPARRLLDLYSAGEQRVYEARDRGRLELSASAFDDGNFSLLIRAVEETDAGLYTCNLHHHYCHLYESLAVRLEVTDGPPATPAYWDGEKEVLAVARGAPALLTCVNRGHVWTDRHVEEAQQVVHWDRQPPGVPHDRADRLLDLYASGERRAYGPLFLRDRVAVGADAFERGDFSLRIEPLEVADEGTYSCHLHHHYCGLHERRVFHLTVAEPHAEPPPRGSPGNGSSHSGAPGPDPTLARGHNVINVIVPESRAHFFQQLGYVLATLLLFILLLVTVLLAARRRRGGYEYSDQKSGKSKGKDVNLAEFAVAAGDQMLYRSEDIQLDYKNNILKERAELAHSPLPAKYIDLDKGFRKENCK

SEQ ID NO: 1249 - DNA, 3550 bp, Homo sapiens
cccctcttcctcctcctcaagggaaagctgcccacttctagctgccctgccatcccctttaaagggcgacttgctcagcgccaaaccgcggctccagccctctccagcctccggctcagccggctcatcagtcggtccgcgccttgcagctcctccagagggacgcgccccgagatggagagcaaagccctgctcgtgctgactctggccgtgtggctccagagtctgaccgcctcccgcggaggggtggccgccgccgaccaaagaagagattttatcgacatcgaaagtaaatttgccctaaggacccctgaagacacagctgaggacacttgccacctcattcccggagtagcagagtccgtggctacctgtcatttcaatcacagcagcaaaaccttcatggtgatccatggctggacggtaacaggaatgtatgagagttgggtgccaaaacttgtggccgccctgtacaagagagaaccagactccaatgtcattgtggtggactggctgtcacgggctcaggagcattacccagtgtccgcgggctacaccaaactggtgggacaggatgtggcccggtttatcaactggatggaggaggagtttaactaccctctggacaatgtccatctcttgggatacagccttggagcccatgctgctggcattgcaggaagtctgaccaataagaaagtcaacagaattactggcctcgatccagctggacctaactttgagtatgcagaagccccgagtcgtctttctcctgatgatgcagattttgtagacgtcttacacacattcaccagagggtcccctggtcgaagcattggaatccagaaaccagttgggcatgttgacatttacccgaatggaggtacttttcagccaggatgtaacattggagaagctatccgcgtgattgcagagagaggacttggagatgtggaccagctagtgaagtgctcccacgagcgctccattcatctcttcatcgactctctgttgaatgaagaaaatccaagtaaggcctacaggtgcagttccaaggaagcctttgagaaagggctctgcttgagttgtagaaagaaccgctgcaacaatctgggctatgagatcaataaagtcagagccaaaagaagcagcaaaatgtacctgaagactcgttctcagatgccctacaaagtcttccattaccaagtaaagattcatttttctgggactgagagtgaaacccataccaatcaggcctttgagatttctctgtatggcaccgtggccgagagtgagaacatcccattcactctgcctgaagtttccacaaataagacctactccttcctaatttacacagaggtagatattggagaactactcatgttgaagctcaaatggaagagtgattcatactttagctggtcagactggtggagcagtcccggcttcgccattcagaagatcagagtaaaagcaggagagactcagaaaaaggtgatcttctgttctagggagaaagtgtctcatttgcagaaaggaaaggcacctgcggtatttgtgaaatgccatgacaagtctctgaataagaagtcaggctgaaactgggcgaatctacagaacaaagaacggcatgtgaattctgtgaagaatgaagtggaggaagtaacttttacaaaacatacccagtgtttggggtgtttcaaaagtggattttcctgaatattaatcccagccctacccttgttagttattttaggagacagtctcaagcactaaaaagtggctaattcaatttatggggtatagtggccaaatagcacatcctccaacgttaaaagacagtggatcatgaaaagtgctgttttgtcctttgagaaagaaataattgtttgagcgcagagtaaaataaggctccttcatgtggcgtattgggccatagcctataattggttagaacctcctattttaattggaattctggatctttcggactgaggccttctcaaactttactctaagtctccaagaatacagaaaatgcttttccgcggcacgaatcagactcatctacacagcagtatgaatgatgttttagaatgattccctcttgctattggaatgtggtccagacgtcaaccaggaacatgtaacttggagagggacgaagaaagggtctgataaacacagaggttttaaacagtccctaccattggcctgcatcatgacaaagttacaaattcaaggagatataaaatctagatcaattaattcttaataggctttatcgtttattgcttaatccctctctcccccttcttttttgtctcaagattatattataataatgttctctgggtaggtgttgaaaatgagcctgtaatcctcagctgacacataatttgaatggtgcagaaaaaaaaaaagaaaccgtaattttattattagattctccaaatgattttcatcaatttaaaatcattcaatatctgacagttactcttcagttttaggcttaccttggtcatgcttcagttgtacttccagtgcgtctcttttgttcctggctttgacatgaaaagataggtttgagttcaaattttgcattgtgtgagcttctacagattttagacaaggaccgtttttactaagtaaaagggtggagaggttcctggggtggattcctaagcagtgcttgtaaaccatcgcgtgcaatgagccagatggagtaccatgagggttgctatttgttgtttttaacaactaatcaagagtgagtgaacaactatttataaactagatctcctatttttcagaatgctcttctacgtataaatatgaaatgataaagatgtcaaatatctcagaggctatagctgggaacccgactgtgaaagtatgtgatatctgaacacatactagaaagctctgcatgtgtgttgtccttcagcataattcggaagggaaaacagtcgatcaagggatgtattggaacatgtcggagtagaaattgttcctgatgtgccagaacttcgaccctttctctgagagagatgatcgtgcctataaatagtaggaccaatgttgtgattaacatcatcaggcttggaatgaattctctctaaaaataaaatgatgtatgatttgttgttggcatcccctttattaattcattaaatttctggatttgggttgtgacccagggtgcattaacttaaaagattcactaaagcagcacatagcactgggaactctggctccgaaaaactttgttatatatatcaaggatgttctggctttacattttatttattagctgtaaatacatgtgtggatgtgtaaatggagcttgtacatattggaaaggtcattgtggctatctgcatttataaatgtgtggtgctaactgtatgtgtctttatcagtgatggtctcacagagccaactcactcttatgaaatgggctttaacaaaacaagaaagaaacgtacttaactgtgtgaagaaatggaatcagcttttaataaaattgacaacattttattaccac

SEQ ID NO: 1250 - protein, 475 aa, Homo sapiens
MESKALLVLTLAVWLQSLTASRGGVAAADQRRDFIDIESKFALRTPEDTAEDTCHLIPGVAESVATCHFNHSSKTFMVIHGWTVTGMYESWVPKLVAALYKREPDSNVIVVDWLSRAQEHYPVSAGYTKLVGQDVARFINWMEEEFNYPLDNVHLLGYSLGAHAAGIAGSLTNKKVNRITGLDPAGPNFEYAEAPSRLSPDDADFVDVLHTFTRGSPGRSIGIQKPVGHVDIYPNGGTFQPGCNIGEAIRVIAERGLGDVDQLVKCSHERSIHLFIDSLLNEENPSKAYRCSSKEAFEKGLCLSCRKNRCNNLGYEINKVRAKRSSKMYLKTRSQMPYKVFHYQVKIHFSGTESETHTNQAFEISLYGTVAESENIPFTLPEVSTNKTYSFLIYTEVDIGELLMLKLKWKSDSYFSWSDWWSSPGFAIQKIRVKAGETQKKVIFCSREKVSHLQKGKAPAVFVKCHDKSLNKKSG

SEQ ID NO: 1251 - DNA, 5405 bp, Homo sapiens
cccgggccaccgcctccgcccggctgcccgcccggactgtcgcggcccgcggtggcgacggcggccgctgcaaagtttccccggcggcggcggcccgggggcgcatcctcccgcaactgtcaagcgctggcggcggaaatgatgaggcgctggccattttccgagcccgggtttcctgcctgagccccgctcgagcgagccgcgagcgaggagccggcgggcgggagaggacgcgcccagggcgggggcccgcccgccccctcgggatttcgagggcccgggggcgcgcgacgccatgggccggccgggcccagagctcctgtctctcagcccggccgcaccacctgggtctccgccatgaacgggcctgccctgcagccctcctcgccctcttccgcgccctcagcctccccggcggcggccccgcggggctggagcgagttctgtgagttgcacgccgtagcggcggcccgggagctggcccgccagtactggctgttcgcccgggagcatccgcagcacgcgccgctgcgcgccgagctggtgtcgctgcagttcaccgacctcttccagcgctacttctgccgcgaggtgcgcgacggacgggcgccgggccgcgactaccgggacacaggccgtgggcccccagccaaggccgaggcgtccccggagccaggccccggccccgccgcccctggcctgcccaaggcccgcagctctgaggagctggccccgccgcggccgcccgggccctgctccttccagcactttcgccgcagcctccgccacatcttccgccgccgctcggccggggagctgccagcggcccacaccgctgccgcccccgggacccccggagaggctgctgagacccccgcccggcctggcctggccaagaagttcctgccctggagcctggcccgggagccgccacccgaggcgctgaaggaggcggtgctgcgctacagcctggccgacgaggcctccatggacagcggggcacgctggcagcgcgggaggctggcgctgcgccgggccccgggccccgatggccccgaccgcgtgctggagctcttcgacccacccaagagttcaaggcccaagctacaagcagcttgctccagcatccaggaggtccggtggtgcacacggcttgagatgcctgacaacctttacacctttgtgctgaaggtgaaggaccggacagacatcatctttgaggtgggagacgagcagcagctgaattcatggatggctgagctctcggagtgcacaggccgagggctggagagcacagaagcagagatgcatattccctcagccctagagcctagcacgtccagctccccaaggggcagcacagattcccttaaccaaggtgcttctcctggggggctgctggacccggcctgccagaagacggaccatttcctgtcctgctacccctggttccacggccccatctccagagtgaaagcagctcagctggttcagctgcagggccctgatgctcatggagtgttcctggtgcggcagagcgagacgcggcgtggggaatacgtgctcactttcaactttcaggggatagccaagcacctgcgcctgtcgctgacagagcggggccagtgccgtgtgcagcacctccactttccctcggtcgtggacatgctccaccacttccagcgctcgcccatcccactcgagtgcggcgccgcctgtgatgtccggctctccagctacgtggtagtcgtctcccaaccaccaggttcctgcaacacggtcctcttccctttctcccttcctcactgggattcagagtcccttcctcactggggttcagagttgggccttccccaccttagttcttctggctgtccccgggggctcagcccagagggtctcccagggcgatcctcaccccccgagcagatcttccacctggtgccttcgcccgaagaactggccaacagcctgcagcacctggagcatgagcctgtgaatcgagcccgggactcggactacgaaatggactcatcctcccggagccacctgcgggccatagacaatcagtacacacctctctgaccagtgaggaattccaggcctcaacagctgcccttgaggagcacaggcagaagtgtgaacttgtgaatgtaattgatctttccttccttccagagaaagatttaagggacactgttaactgctcgtgccagtttggaagtgacccttctattaggcctgttgaagggccctcctgtaggtttcatctatccacctggctttctccttattgtttacagatgtagttcttgttagaggatgccgctagctcctgcccggggtccctatgcccagtccccgttactcttagagaaaggagttggggtgagggccagagctggcagtggaaacttgttctctttttcactgacactgtcacagcggatgacagactttctacggggaggagggggggatcatcaggaagcccagaacactaacaagcggttctcccatctaccgtcagtccacatggcaggtctgctgtgtccacaccacagatgaccacatctaatcctgcttctactctcagctttaggacaaaagctctgtcagaggcacaagctgaaggtcaaaaatgatttaaaacattttacctcagactaatttctttaaaggattcaggttcaaaacttaaccactgcttatttcagtgcactgtttcaactaacacccatgctatttttgtagtcagaaacagctatgcaaaccctacctaatttacagtctgagccagcatgctggcttgtctactgcatcctcgggacagtcacctgccactgagtggccactgtccttcctaaatgtcaagaagtgaagtatgtcaccctttcagggaaattcaggcaattactgaaataggagggtggcaagaacagttctatcctggtgccttacgaataaaaaactggattctggtttacagcagctttacagtgatagttaaattaactggggctaggggaagagcaagcaaaaagggaagaaggactcctaggccctttctagtaaatccttcagcaacaaggctggcttggtgccctccaagcatctaatggcttattaaattatcccacaagtgggttttaggctccttttttgagccaaaatggaagctgggaatctggtgccataactaatgagaaactcctttaatagcccacaatcagtgttctgttctagctggctactgcttcactggattgagaatctatctatctccttgcacacatgggcacacacaatctccaccatccagggaggtcctgaagtcaaatctctatctatacaagtgatacaattcatagggggctggctcctcccagaacctgtctggaggctcagaaacgggggcagtgacagtggagtcagctgctcttgggtgccagcagagccattcagtacaacccccaggctcacagcagtggcttctaggaaactgggagtttagatcagctttacagatacatcgatcagaggctaaaatgaaacctcagcctaaaactcataggactgactgcctgggaggagggttaggtctgcttcttccacttatacttagtctctgtgctccaagaggtcaaatttttgcttctagaatttccttggggtctttcagagggtgggggaacaaacccctatgcacttttcttttttttttttttgagatggagtttctcttgtcaaccgggctggagtgcagtggtgcaatcttggctcactgcaacctccaccttcctggttcaagcgattctgcctcgacctctcaagtagctgggattacaagcaccagccaccatgcctggctaattttgtatttttagtagagacagggtttcaccatgttggccaggctggtctcgaatgtctgacctcaggtgatccacccgccttggcctcccaaagtgctgggattacaggcgcgagccaccgcgcccagcctacaccacttttagtaccaacactcttgggtgatttcatggaccctaaagcagacctgacactgatccagatttgcagtccatttttaaggacacctgtctttatttcctcaaagtcaagcagctttctctggaaaatgaatgctaattagtgtgaaccaaaagagtaagtaagagtctgaagtttttttaaaggagaaagcttattatggaaagtcactggtcctcccctccgcacaggaaaggtacccagtagataatgaaccaaattaagttccctccctccagccagaagttaaacatctgggatatgacgtcttcatgccaggggcactcatttcttagcagcctctctacatacatctctcaggtggtgccaagaggcacaccaggtagagcaaacttagcagctctgactaacaggctgcaaagtgcaagttcagattctgtggcagagatttggaaggcacccacctccagactgcttcccgtccaagttaccaggacagctcaaaaacatgctgacagaaaactcccatggctctaggaagaagtgacactaagccaacacctttctttatgtgggagcagaatcagctgatgaaggggtgggcagcagtgtggggcaggcaccccactggctgcagctagcccaccataggcacagcacatcccaccactctccttccagtcctgaccaggccccagccggcaacttctaccgagagccatggctcaacaccaaactggacagtagacatcatgatccctccagttagctctaattacagaccccaccagtacagcttgacagctcccggcaccatcccttccttcatctgacttattgaacttttacaaactaacagtcaccagcaccaaagaattaagtcaactaacctgccttgaattttagaccagcaatccatatggctttatctggtataaatcttctgcctttgatcatttctggaccgtaggaaaaaggaatagcaatcattaaaatcttgggccagagaacactatttttacataacagtttcttaacctaaagtcaaggccttggactcttccctgagggttgcctgagattccttcatgctttctattcaggactaagtcccttactgcaaatgtgttagctctaacatctcccacaagctagaggaacttgcgagtatattaacaaggacacatctgacatcctgtgtttggttagaatatacagcacattgtgataacataaagtggattcatcttgtatcattataggcagaaggtatttggcaaatttttatgtattgttttatgtactgtacaagtaacttattcttgaataatgcaaattttgctataatgtacaaattgctatatgtgaattaaaaagttttcagaatcttg

SEQ ID NO: 1252 - protein, 575 aa, Homo sapiens
MNGPALQPSSPSSAPSASPAAAPRGWSEFCELHAVAAARELARQYWLFAREHPQHAPLRAELVSLQFTDLFQRYFCREVRDGRAPGRDYRDTGRGPPAKAEASPEPGPGPAAPGLPKARSSEELAPPRPPGPCSFQHFRRSLRHIFRRRSAGELPAAHTAAAPGTPGEAAETPARPGLAKKFLPWSLAREPPPEALKEAVLRYSLADEASMDSGARWQRGRLALRRAPGPDGPDRVLELFDPPKSSRPKLQAACSSIQEVRWCTRLEMPDNLYTFVLKVKDRTDIIFEVGDEQQLNSWMAELSECTGRGLESTEAEMHIPSALEPSTSSSPRGSTDSLNQGASPGGLLDPACQKTDHFLSCYPWFHGPISRVKAAQLVQLQGPDAHGVFLVRQSETRRGEYVLTFNFQGIAKHLRLSLTERGQCRVQHLHFPSVVDMLHHFQRSPIPLECGAACDVRLSSYVVVVSQPPGSCNTVLFPFSLPHWDSESLPHWGSELGLPHLSSSGCPRGLSPEGLPGRSSPPEQIFHLVPSPEELANSLQHLEHEPVNRARDSDYEMDSSSRSHLRAIDNQYTPL

SEQ ID NO: 1253 - DNA, 3441 bp, Homo sapiens
actccagcgcgcggctacctacgcttggtgcttgctttctccagccatcggagaccagagccgccccctctgctcgagaaaggggctcagcggcggcggaagcggagggggaccaccgtggagagcgcggtcccagcccggccactgcggatccctgaaaccaaaaagctcctgctgcttctgtaccccgcctgtccctcccagctgcgcagggccccttcgtgggatcatcagcccgaagacagggatggagaggcctctgtgctcccacctctgcagctgcctggctatgctggccctcctgtcccccctgagcctggcacagtatgacagctggccccattaccccgagtacttccagcaaccggctcctgagtatcaccagccccaggcccccgccaacgtggccaagattcagctgcgcctggctgggcagaagaggaagcacagcgagggccgggtggaggtgtactatgatggccagtggggcaccgtgtgcgatgacgacttctccatccacgctgcccacgtcgtctgccgggagctgggctacgtggaggccaagtcctggactgccagctcctcctacggcaagggagaagggcccatctggttagacaatctccactgtactggcaacgaggcgacccttgcagcatgcacctccaatggctggggcgtcactgactgcaagcacacggaggatgtcggtgtggtgtgcagcgacaaaaggattcctgggttcaaatttgacaattcgttgatcaaccagatagaggcaagtcataacctgaatatccaggtggaggacattcggattcgagccatcctctcaacctaccgcaagcgcaccccagtgatggagggctacgtggaggtgaaggagggcaagacctggaagcagatctgtgacaagcactggacggccaagaattcccgcgtggtctgcggcatgtttggcttccctggggagaggacatacaataccaaagtgtacaaaatgtttgcctcacggaggaagcagcgctactggccattctccatggactgcaccggcacagaggcccacatctccagctgcaagctgggcccccaggtgtcactggaccccatgaagaatgtcacctgcgagaatgggctaccggccgtggtgagttgtgtgcctgggcaggtcttcagccctgacggaccctcaagattccggaaagcgtacaagccagagcaacccctggtgcgactgagaggcggtgcctacatcggggagggccgcgtggaggtgctcaaaaatggagaatgggggaccgtctgcgacgacaagtgggacctggtgtcggccagtgtggtctgcagagagctgggctttgggagtgccaaagaggcagtcactggctcccgactggggcaagggatcggacccatccacctcaacgagatccagtgcacaggcaatgagaagtccattatagactgcaagttcaatgccgagtctcagggctgcaaccacgaggaggatgctggtgtgagatgcaacacccctgccatgggcttgcagaagaagctgcgcctgaacggcggccgcaatccctacgagggccgagtggaggtgctggtggagagaaacgggtcccttgtgtgggggatggtgtgtggccaaaactggggcatcgtggaggccatggtggtctgccgccagctgggcctgggattcgccagcaacgccttccaggagacctggtattggcacggagatgtcaacagcaacaaagtggtcatgagtggagtgaagtgctcgggaacggagctgtccctggcgcactgccgccacgacggggaggacgtggcctgcccccagggcggagtgcagtacggggccggagttgcctgctcagaaaccgcccctgacctggtcctcaatgcggagatggtgcagcagaccacctacctggaggaccggcccatgttcatgctgcagtgtgccatggaggagaactgcctctcggcctcagccgcgcagaccgaccccaccacgggctaccgccggctcctgcgcttctcctcccagatccacaacaatggccagtccgacttccggcccaagaacggccgccacgcgtggatctggcacgactgtcacaggcactaccacagcatggaggtgttcacccactatgacctgctgaacctcaatggcaccaaggtggcagagggccacaaggccagcttctgcttggaggacacagaatgtgaaggagacatccagaagaattacgagtgtgccaacttcggcgatcagggcatcaccatgggctgctgggacatgtaccgccatgacatcgactgccagtgggttgacatcactgacgtgccccctggagactacctgttccaggttgttattaaccccaacttcgaggttgcagaatccgattactccaacaacatcatgaaatgcaggagccgctatgacggccaccgcatctggatgtacaactgccacataggtggttccttcagcgaagagacggaaaaaaagtttgagcacttcagcgggctcttaaacaaccagctgtccccgcagtaaagaagcctgcgtggtcaactcctgtcttcaggccacaccacatcttccatgggacttccccccaacaactgagtctgaacgaatgccacgtgccctcacccagcccggcccccaccctgtccagacccctacagctgtgtctaagctcaggaggaaagggaccctcccatcattcatggggggctgctacctgacccttggggcctgagaaggccttgcgggggtggggtttgtccacagagctgctggagcagcaccaagagccagtcttgaccgggatgaggcccacagacaggttgtcatcagcttgtcccattcaagccaccgagctcaccacagacacagtggagccgcgctcttctccagtgacacgtggacaaatgcgggctcatcagcccccccagagagggtcaggccgaaccccatttctcctcctcttaggtcattttcagcaaacttgaatatctagacctctcttccaatgaaaccctccagtctattatagtcacatagataatggtgccacgtgttttctgatttggtgagctcagacttggtgcttccctatccacagcccccaccccttgtttttcaagatactattattatattttcacagacttttgaagcacaaatttattggcatttaatattggacatctgggcccttggaagtacaaatctaaggaaaaaccaacccactgtgtaagtgactcatcttcctgttgttccaattctgtgggtttttgattcaacggtgctataaccagggtcctgggtgacagggcgctcactgagcaccatgtgtcatcacagacacttacacatacttgaaacttggaataaaagaaagatttatg

SEQ ID NO: 1254 - protein, 777 aa, Homo sapiens
MERPLCSHLCSCLAMLALLSPLSLAQYDSWPHYPEYFQQPAPEYHQPQAPANVAKIQLRLAGQKRKHSEGRVEVYYDGQWGTVCDDDFSIHAAHVVCRELGYVEAKSWTASSSYGKGEGPIWLDNLHCTGNEATLAACTSNGWGVTDCKHTEDVGVVCSDKRIPGFKFDNSLINQIEASHNLNIQVEDIRIRAILSTYRKRTPVMEGYVEVKEGKTWKQICDKHWTAKNSRVVCGMFGFPGERTYNTKVYKMFASRRKQRYWPFSMDCTGTEAHISSCKLGPQVSLDPMKNVTCENGLPAVVSCVPGQVFSPDGPSRFRKAYKPEQPLVRLRGGAYIGEGRVEVLKNGEWGTVCDDKWDLVSASVVCRELGFGSAKEAVTGSRLGQGIGPIHLNEIQCTGNEKSIIDCKFNAESQGCNHEEDAGVRCNTPAMGLQKKLRLNGGRNPYEGRVEVLVERNGSLVWGMVCGQNWGIVEAMVVCRQLGLGFASNAFQETWYWHGDVNSNKVVMSGVKCSGTELSLAHCRHDGEDVACPQGGVQYGAGVACSETAPDLVLNAEMVQQTTYLEDRPMFMLQCAMEENCLSASAAQTDPTTGYRRLLRFSSQIHNNGQSDFRPKNGRHAWIWHDCHRHYHSMEVFTHYDLLNLNGTKVAEGHKASFCLEDTECEGDIQKNYECANFGDQGITMGCWDMYRHDIDCQWVDITDVPPGDYLFQVVINPNFEVAESDYSNNIMKCRSRYDGHRIWMYNCHIGGSFSEETEKKFEHFSGLLNNQLSPQ

SEQ ID NO: 1255 - DNA, 5167 bp, Homo sapiens
gggaacttggattaggtggagaggcagttggggggcctcgttgttttgcgtcttagttccgccctcctgtccatcaggagaaggaaaggataaaccctgggccatgaggctacccctgctcctggtttttgcctctgtcattccgggtgctgttctcctactggacaccaggcaatttttaatctataatgaagatcacaagcgctgcgtggatgcagtgagtcccagtgccgtccaaaccgcagcttgcaaccaggatgccgaatcacagaaattccgatgggtgtccgaatctcagattatgagtgttgcatttaaattatgcctgggagtgccatcaaaaacagactgggttgctatcactctctatgcctgtgactcaaaaagtgaatttcagaaatgggagtgcaaaaatgacacacttttggggatcaaaggagaagatttattttttaactacggcaacagacaagaaaagaatattatgctctacaagggatcgggtttatggagcaggtggaagatctatggaaccacagacaatctgtgctccagaggttatgaagccatgtatacgctactaggcaatgccaatggagcaacctgtgcattcccgttcaagtttgaaaacaagtggtacgcagattgcacgagtgctgggcggtcggatggatggctctggtgcggaaccactactgactatgacacagacaagctatttggatattgtccattgaaatttgagggcagtgaaagcttatggaataaagacccgctgaccagcgtttcctaccagataaactccaaatccgctttaacgtggcaccaagcgaggaaaagctgccaacaacagaacgctgagctcctgagcatcacagagatacatgagcaaacatacctgacaggattaaccagttccttgacctcaggactctggattggacttaacagtctgagcttcaacagcggttggcagtggagtgaccgcagtcctttccgatatttgaactggttaccaggaagtccatcagctgaacctggaaaaagctgtgtgtcactaaatcctggaaaaaatgctaaatgggaaaatctggaatgtgttcagaaactgggctatatttgcaaaaagggcaacaccactttaaattcttttgttattccctcagaaagtgatgtgcctactcactgtcctagtcagtggtggccgtatgccggtcactgttacaagattcacagagatgagaaaaaaatccagagggatgctctgaccacctgcaggaaggaaggcggtgacctcacaagtatccacaccatcgaggaattggactttattatctcccagctaggatatgagccaaatgacgaattgtggatcggcttaaatgacattaagattcaaatgtactttgagtggagtgatgggacccctgtaacgtttaccaaatggcttcgtggagaaccaagccatgaaaacaacagacaggaggattgtgtggtgatgaaaggcaaggatgggtactgggcagatcggggctgtgagtggcctcttggctacatctgcaagatgaaatcacgaagccaaggtccagaaatagtggaagtcgaaaaaggctgcaggaaaggctggaaaaaacatcacttttactgctatatgattggacatacgctttcaacatttgcagaagcaaaccaaacctgtaataatgagaatgcttatttaacaactattgaagacagatatgaacaagccttcctgactagtttcgttggcttaaggcctgaaaaatatttctggacaggactttcagatatacaaaccaaagggacttttcagtggaccatcgaggaagaggttcggttcacccactggaattcagatatgccagggcgaaagccagggtgtgttgccatgagaaccgggattgcagggggcttatgggatgttttgaaatgtgatgaaaaggcaaaatttgtgtgcaagcactgggcagaaggagtaacccacccaccgaagcccacgacgactcccgaacccaaatgtccggaggattggggcgccagcagtagaacaagcttgtgtttcaagctgtatgcaaaaggaaaacatgagaagaaaacgtggtttgaatctcgagatttttgtcgagctctgggtggagacttagctagcatcaataacaaagaggaacagcaaacaatatggcgattaataacagctagtggaagctaccacaaactgttttggttgggattgacatatggaagcccttcagaaggttttacttggagtgatggttctcctgtttcatatgaaaactgggcttatggagaacctaataattatcaaaatgttgaatactgtggtgagctgaaaggtgaccctactatgtcttggaatgatattaattgtgaacaccttaacaactggatttgccagatacaaaaaggacaaacaccaaaacctgagccaacaccagctcctcaagacaatccaccagttactgaagatgggtgggttatttacaaagactaccagtattatttcagcaaagagaaggaaaccatggacaatgcgcgagcgttttgcaagaggaattttggtgatcttgtttctattcaaagtgaaagtgaaaagaagtttctatggaaatatgtaaacagaaatgatgcacagtctgcatattttattggtttattgatcagcttggataaaaagtttgcttggatggatggaagcaaagtggattacgtgtcttgggccacaggtgaacccaattttgcaaatgaagatgaaaactgtgtgaccatgtattcaaattcagggttttggaatgacattaactgtggctatccaaacgccttcatttgccagcgacataacagtagtatcaatgctaccacagttatgcctaccatgccctcggtcccatcagggtgcaaggaaggttggaatttctacagcaacaagtgtttcaaaatctttggatttatggaagaagaaagaaaaaattggcaagaggcacgaaaagcttgtataggctttggagggaatctggtctccatacaaaatgaaaaagagcaagcatttcttacctatcacatgaaggactccactttcagtgcctggactgggctgaatgatgtcaattcagaacacacgttcctttggacggatggacgaggagtccattacacaaactgggggaaaggttaccctggtggaagaagaagcagtctttcttatgaagatgctgactgtgttgttattattggaggtgcatcaaatgaagcaggaaaatggatggatgatacctgcgacagtaaacgaggctacatatgccagacacgatccgacccttccttgactaatcctccagcaacgattcaaacagatggctttgttaaatatggcaaaagcagctattcactcatgagacaaaaatttcaatggcatgaagcggagacatactgcaagcttcacaattcccttatagccagcattctggatccctacagtaatgcatttgcgtggctgcagatggaaacatctaatgaacgtgtgtggatcgccctgaacagtaacttgactgataatcaatacacttggactgataagtggagggtgaggtacactaactgggctgctgatgagcccaaattgaaatcagcatgtgtttatctggatcttgatggctactggaagacagcacattgcaatgaaagtttttactttctctgtaaaagatcagatgaaatccctgctactgaacccccacaactgcctggcagatgcccggagtcagatcacacagcatggattcctttccatggtcactgttactatattgagtcctcatatacaagaaactggggccaagcttctctggaatgtcttcgaatgggttcctctctggtttccattgaaagtgctgcagaatccagttttctgtcatatcgggttgagccacttaaaagtaaaaccaatttttggataggattgttcagaaatgttgaagggacgtggctgtggataaataacagtccggtctcctttgtcaactggaacacaggagatccctctggtgaacggaatgattgtgtagctttacatgcgtcttctgggttttggagtaatattcactgttcatcctacaaaggatatatttgtaaaagaccaaaaattattgatgctaaacctactcatgaattacttacaacaaaagctgacacaaggaagatggacccttctaaaccgtcttccaacgtggccggagtagtcatcattgtgatcctcctgattttaacgggtgctggccttgccgcctatttcttttataagaaaagacgtgtgcacctacctcaagagggcgcctttgaaaacactctgtattttaacagtcagtcaagcccaggaactagtgatatgaaagatctcgtgggcaatattgaacagaatgaacactcggtcatctagtacctcaatgcgattctgagatatttgaatttcataaaattgtaactgaaatttaaaatttttagttcaatgtgattgttttctttaaaatgagtactgaattgtactggtctgtccttttttcctttgcctaattgaagaaataattgcttgttttctagcctggcaagatattttcataaaagagggataacaatgctgattactaccttttaaaatattttagataaatgcacagcaccacagcaccacatctaagcattagtgatgggtagctgatgtcagcttcatgtggattttaagcactctagaaacaatgaagcttcttggcatattttaaggagctcccaaaatgtgttacctattaaattgtaactcagcaagtagaagaccatttgaaaagtcaggtacaaatttcctcaagtggcataaaaatgtagtcagttttctcttttaccagtttttatttccactccaattatttagaactttatttgtacatgtgcagaagaataaggcagctgagaatcttgtttcccccaagagagttttacaggctgagtgttgcaaatgtgttctttgtcctgttatatgtatatcaggaatacaaggatgtgaaataaaactgtaaatttgcataactggatgtacttagataatgtgaaataaacattaaagacaaggtctattttt

SEQ ID NO: 1256 - protein, 1456 aa, Homo sapiens [sequence omitted]

SEQ ID NO: 1257 - DNA, 5167 bp, Homo sapiens
gggaacttggattaggtggagaggcagttggggggcctcgttgttttgcgtcttagttccgccctcctgtccatcaggagaaggaaaggataaaccctgggccatgaggctacccctgctcctggtttttgcctctgtcattccgggtgctgttctcctactggacaccaggcaatttttaatctataatgaagatcacaagcgctgcgtggatgcagtgagtcccagtgccgtccaaaccgcagcttgcaaccaggatgccgaatcacagaaattccgatgggtgtccgaatctcagattatgagtgttgcatttaaattatgcctgggagtgccatcaaaaacggactgggttgctatcactctctatgcctgtgactcaaaaagtgaatttcagaaatgggagtgcaaaaatgacacacttttggggatcaaaggagaagatttattttttaactacggcaacagacaagaaaagaatattatgctctacaagggatcgggtttatggagcaggtggaagatctatggaaccacagacaatctgtgctccagaggttatgaagccatgtatacgctactaggcaatgccaatggagcaacctgtgcattcccgttcaagtttgaaaacaagtggtacgcagattgcacgagtgctgggcggtcggatggatggctctggtgcggaaccactactgactatgacacagacaagctatttggatattgtccattgaaatttgagggcagtgaaagcttatggaataaagacccgctgaccagcgtttcctaccagataaactccaaatccgctttaacgtggcaccaggcgaggaaaagctgccaacaacagaacgctgagctcctgagcatcacagagattcatgagcaaacatacctgacaggattaaccagttccttgacctcaggactctggattggacttaacagtctgagcttcaacagcggttggcagtggagtgaccgcagtcctttccgatatttgaactggttaccaggaagtccatcagctgaacctggaaaaagctgtgtgtcactaaatcctggaaaaaatgctaaatgggaaaatctggaatgtgttcagaaactgggctatatttgcaaaaagggcaacaccactttaaattcttttgttattccctcagaaagtgatgtgcctactcactgtcctagtcagtggtggccgtatgccggtcactgttacaagattcacagagatgagaaaaaaatccagagggatgctctgaccacctgcaggaaggaaggcagtgacctcgcaagtatccacaccattgaggaattcgactttattatctcccagctaggatatgagccaaatgacgaattgtggatcggcttaaatgacattaagattcaaatgtactttgagtggagtgatgggacccctgtaacgtttaccaaatggcttcgtggagaaccaagccatgaaaacaacagacaggaggattgtgtggtgatgaaaggcaaggatgggtactgggcagatcggggctgtgagtggcctcttggctacatctgcaagatgaaatcacgaagccaaggtccagaaatagtggaagtcgaaaaaggctgcaggaaaggctggaaaaaacatcacttttactgctatatgattggacatacgctttcaacatttgcagaagcaaaccaaacctgtaataatgagaatgcttatttaacaactattgaagacagatatgaacaagccttcctgactagtttcgttggcttaaggcctgaaaaatatttctggacaggactttcagatatacaaaccaaagggacttttcagtggaccatcgaggaagaggttcggttcacccactggaattcagatatgccagggcgaaagccagggtgtgttgccatgagaaccgggattgcagggggcttatgggatgttttgaaatgtgatgaaaaggcaaaatttgtgtgcaagcactgggcagaaggagtaacccacccaccgaagcccacgacgactcccgaacccaaatgtccggaggattggggcgccagcagtagaacaagcttgtgtttcaagctgtatgcaaaaggaaaacatgagaagaaaacgtggtttgaatctcgagatttttgtcgagctctgggtggagacttagctagcatcaataacaaagaggaacagcaaacaatatggcgattaataacagctagtggaagctaccacaaactgttttggttgggattgacatatggaagcccttcagaaggttttacttggagtgatggttctcctgtttcatatgaaaactgggcttatggagaacctaataattatcaaaatgttgaatactgtggtgagctgaaaggtgaccctactatgtcttggaatgatattaattgtgaacaccttaacaactggatttgccagatacaaaaaggacaaacaccaaaacctgagccaacaccagctcctcaagacaatccaccagttactgaagatgggtgggttatttacaaagactaccagtattatttcagcaaagagaaggaaaccatggacaatgcgcgagcgttttgcaagaggaattttggtgatcttgtttctattcaaagtgaaagtgaaaagaagtttctatggaaatatgtaaacagaaatgatgcacagtctgcatattttattggtttattgatcagcttggataaaaagtttgcttggatggatggaagcaaagtggattacgtgtcttgggccacaggtgaacccaattttgcaaatgaagatgaaaactgtgtgaccatgtattcaaattcagggttttggaatgacattaactgtggctatccaaacgccttcatttgccagcgacataacagtagtatcaatgctaccacagttatgcctaccatgccctcggtcccatcagggtgcaaggaaggttggaatttctacagcaacaagtgtttcaaaatctttggatttatggaagaagaaagaaaaaattggcaagaggcacgaaaagcttgtataggctttggagggaatctggtctccatacaaaatgaaaaagagcaagcatttcttacctatcacatgaaggactccactttcagtgcctggactgggctgaatgatgtcaattcagaacacacgttcctttggacggatggacgaggagtccattacacaaactgggggaaaggttaccctggtggaagaagaagcagtctttcttatgaagatgctgactgtgttgttattattggaggtgcatcaaatgaagcaggaaaatggatggatgatacctgcgacagtaaacgaggctacatatgccagacacgatccgacccttccttgactaatcctccagcaacgattcaaacagatggctttgttaaatatggcaaaagcagctattcactcatgagacaaaaatttcaatggcatgaagcggagacatactgcaagcttcacaattcccttatagccagcattctggatccctacagtaatgcatttgcgtggctgcagatggaaacatctaatgaacgtgtgtggatcgccctgaacagtaacttgactgataatcaatacacttggactgataagtggagggtgaggtacactaactgggctgctgatgagcccaaattgaaatcagcatgtgtttatctggatcttgatggctactggaagacagcacattgcaatgaaagtttttactttctctgtaaaagatcagatgaaatccctgctactgaacccccacaactgcctggcagatgcccggagtcagatcacacagcatggattcctttccatggtcactgttactatattgagtcctcatatacaagaaactggggccaagcttctctggaatgtcttcgaatgggttcctctctggtttccattgaaagtgctgcagaatccagttttctgtcatatcgggttgagccacttaaaagtaaaaccaatttttggataggattgttcagaaatgttgaagggacgtggctgtggataaataacagtccggtctcctttgtcaactggaacacaggagatccctctggtgaacggaatgattgtgtagctttacatgcgtcttctgggttttggagtaatattcactgttcttcctacaaaggatatatttgtaaaagaccaaaaattattgatgctaaacctactcatgaattacttacaacaaaagctgacacaaggaagatggacccttctaaaccgtcttccaacgtggccggagtagtcatcattgtgatcctcctgattttaacgggtgctggccttgccgcctatttcttttataagaaaagacgtgtgcacctacctcaagagggcgcctttgaaaacactctgtattttaacagtcagtcaagcccaggaactagtgatatgaaagatctcgtgggcaatattgaacagaatgaacactcggtcatctagtacctcaatgcgattctgagatatttgaatttcataaaattgtaactgaaatttaaaatttttagttcaatgtgattgttttctttaaaatgagtactgaattgtactggtctgtccttttttcctttgcctaattgaagaaataattgcttgttttctagcctggcaagatattttcataaaagagggataacaatgctgattactaccttttaaaatattttagataaatgcacagcaccacagcaccacatctaagcattagtgatgggtagctgatgtcagcttcatgtggattttaagcactctagaaacaatgaagcttcttggcatattttaaggagctcccaaaatgtgttacctattaaattgtaactcagcaagtagaagaccatttgaaaagtcaggtacaaatatcctcaagtggcataaaaatgtagtcagttttctcttttaccagtttttatttccactccaattatttagaactttatttgtacatgtgcagaagaataaggcagctgagaatcttgtttcccccaagagagttttacaggctgagtgttgcaaatgtgttctttgtcctgttatatgtatatcaggaatacaaggatgtgaaataaaactgtaaatttgcataactggatgtacttagataatgtgaaataaacattaaagacaaggtctattttt

SEQ ID NO: 1258 - protein, 1456 aa, Homo sapiens
MRLPLLLVFASVIPGAVLLLDTRQFLIYNEDHKRCVDAVSPSAVQTAACNQDAESQKFRWVSESQIMSVAFKLCLGVPSKTDWVAITLYACDSKSEFQKWECKNDTLLGIKGEDLFFNYGNRQEKNIMLYKGSGLWSRWKIYGTTDNLCSRGYEAMYTLLGNANGATCAFPFKFENKWYADCTSAGRSDGWLWCGTTTDYDTDKLFGYCPLKFEGSESLWNKDPLTSVSYQINSKSALTWHQARKSCQQQNAELLSITEIHEQTYLTGLTSSLTSGLWIGLNSLSFNSGWQWSDRSPFRYLNWLPGSPSAEPGKSCVSLNPGKNAKWENLECVQKLGYICKKGNTTLNSFVIPSESDVPTHCPSQWWPYAGHCYKIHRDEKKIQRDALTTCRKEGSDLASIHTIEEFDFIISQLGYEPNDELWIGLNDIKIQMYFEWSDGTPVTFTKWLRGEPSHENNRQEDCVVMKGKDGYWADRGCEWPLGYICKMKSRSQGPEIVEVEKGCRKGWKKHHFYCYMIGHTLSTFAEANQTCNNENAYLTTIEDRYEQAFLTSFVGLRPEKYFWTGLSDIQTKGTFQWTIEEEVRFTHWNSDMPGRKPGCVAMRTGIAGGLWDVLKCDEKAKFVCKHWAEGVTHPPKPTTTPEPKCPEDWGASSRTSLCFKLYAKGKHEKKTWFESRDFCRALGGDLASINNKEEQQTIWRLITASGSYHKLFWLGLTYGSPSEGFTWSDGSPVSYENWAYGEPNNYQNVEYCGELKGDPTMSWNDINCEHLNNWICQIQKGQTPKPEPTPAPQDNPPVTEDGWVIYKDYQYYFSKEKETMDNARAFCKRNFGDLVSIQSESEKKFLWKYVNRNDAQSAYFIGLLISLDKKFAWMDGSKVDYVSWATGEPNFANEDENCVTMYSNSGFWNDINCGYPNAFICQRHNSSINATTVMPTMPSVPSGCKEGWNFYSNKCFKIFGFMEEERKNWQEARKACIGFGGNLVSIQNEKEQAFLTYHMKDSTFSAWTGLNDVNSEHTFLWTDGRGVHYTNWGKGYPGGRRSSLSYEDADCVVIIGGASNEAGKWMDDTCDSKRGYICQTRSDPSLTNPPATIQTDGFVKYGKSSYSLMRQKFQWHEAETYCKLHNSLIASILDPYSNAFAWLQMETSNERVWIALNSNLTDNQYTWTDKWRVRYTNWAADEPKLKSACVYLDLDGYWKTAHCNESFYFLCKRSDEIPATEPPQLPGRCPESDHTAWIPFHGHCYYIESSYTRNWGQASLECLRMGSSLVSIESAAESSFLSYRVEPLKSKTNFWIGLFRNVEGTWLWINNSPVSFVNWNTGDPSGERNDCVALHASSGFWSNIHCSSYKGYICKRPKIIDAKPTHELLTTKADTRKMDPSKPSSNVAGVVIIVILLILTGAGLAAYFFYKKRRVHLPQEGAFENTLYFNSQSSPGTSDMKDLVGNIEQNEHSVI

SEQ ID NO: 1259 - DNA, 5325 bp, Homo sapiens
attgctaagccatccttcagacagagagggagcggctgcaagaggtaatgagagatggcaagaaagaagctgaaaaaatttactactttggagattgtgctcagtgttcttctgcttgtgttgtttatcatcagtattgttctaattgtgcttttagccaaagagtcactgaaatcaacagccccagatcctgggacaactggtaccccagatcctgggacaactggtaccccagatcctggaacaactggtaccacacatgctaggacaacgggtcccccagatcctggaacaactggtaccactcctgtttctgctgaatgtccagtggtaaatgaattggaacgaattaattgcatccctgaccagccgccaacaaaggccacatgtgaccaacgtggctgttgctggaatccccagggagctgtaagtgttccctggtgctactattccaagaatcatagctaccatgtagagggcaaccttgtcaacacaaatgcaggattcacagcccggttgaaaaatctgccttcttcaccagtgtttggaagcaatgttgacaatgttcttctcacagcagaatatcagacatctaatcgtttccactttaagttgactgaccaaaccaataacaggtttgaagtgccccacgaacacgtgcagtccttcagtggaaatgctgctgcttctttgacctaccaagttgaaatctccagacagccatttagcatcaaagtgaccagaagaagcaacaatcgtgttttgtttgactcgagcattgggcccctactgtttgctgaccagttcttgcagctctccactcgactgcctagcactaacgtgtatggcctgggagagcatgtgcaccagcagtatcggcatgatatgaattggaagacctggcccatatttaacagagacacaactcccaatggaaacggaactaatttgtatggtgcgcagacattcttcttgtgccttgaagatgctagtggattgtcctttggggtgtttctgatgaacagcaatgccatggaggttgtccttcagcctgcgccagccatcacttaccgcaccattgggggcattctcgacttctatgtgttcttgggaaacactccagagcaagttgttcaagaatatctagagctcattgggcggccagcccttccctcctactgggcgcttggatttcacctcagtcgttacgaatatggaaccttagacaacatgagggaagtcgtggagagaaatcgcgcagcacagctcccttatgatgttcagcatgctgatattgattatatggatgagagaagggacttcacttatgattcagtggattttaaaggcttccctgaatttgtcaacgagttacacaataatggacagaagcttgtcatcattgtggatccagccatctccaacaactcttcctcaagtaaaccctatggcccatatgacaggggttcagatatgaagatatgggtgaatagttcagatggagtgactccactcattggggaggtctggcctggacaaactgtgtttcctgattataccaatcccaactgtgctgtttggtggacaaaggaatttgagctttttcacaatcaagtagagtttgatggaatctggattgatatgaatgaagtctccaactttgttgatggttcggtctcaggatgttccacaaacaacctaaataatcccccattcactcccagaatcctggatgggtacctgttctgcaagactctctgtatggatgcagtgcagcactggggcaagcagtatgacattcacaatctgtatggctactccatggcggtcgccacagcagaagctgccaagactgtgttccctaataagagaagcttcattctgacccgttctacctttgcgggctctggcaagtttgcagcacattggttaggagacaacactgccacctgggatgacctgagatggtccatccctggcgtgcttgagttcaacctttttggcatcccaatggtgggtcctgacatatgtggctttgctttggacacccctgaggagctctgtaggcggtggatgcagttgggtgcattttatccgttttctagaaatcacaatggccaaggctacaaggaccaggatcctgcctcctttggagctgactccctgctgttgaattcctccaggcactaccttaacatccgctatactctattgccctacctatacaccctcttcttccgtgctcacagccgaggggacacggtggccaggccccttttgcatgagttctacgaggacaacagcacttgggatgtgcaccaacagttcttatgggggcccggcctcctcatcactccagttctggatgaaggtgcagagaaagtgatggcatatgtgcctgatgctgtctggtatgactacgagactgggagccaagtgagatggaggaagcaaaaagtcgagatggaacttcctggagacaaaattggacttcaccttcgaggaggctacatcttccccacacagcagccaaatacaaccactctggccagtcgaaagaaccctcttggtcttatcattgccctagatgagaacaaagaagcaaaaggagaacttttctgggataatggggaaacgaaggatactgtggccaataaagtgtatcttttatgtgagttttctgtcactcaaaaccgcttggaggtgaatatttcacaatcaacctacaaggaccccaataatttagcatttaatgagattaaaattcttgggacggaggaacctagcaatgttacagtgaaacacaatggtgtcccaagtcagacttctcctacagtcacttatgattctaacctgaaggttgccattatcacagatattgatcttctcctgggagaagcatacacagtggaatggagcataaagataagggatgaagaaaaaatagactgttaccctgatgagaatggtgcttctgccgaaaactgcactgcccgtggctgtatctgggaggcatccaattcttctggagtccctttttgctattttgtcaacgacctatactctgtcagtgatgttcagtataattcccatggggccacagctgacatctccttaaagtcttccgtttatgccaatgccttcccctccacacccgtgaacccccttcgcctggatgtcacttaccataagaatgaaatgctgcagttcaagatttatgatcccaacaagaatcggtatgaagttccagtccctctgaacatacccagcatgccatccagcacccctgagggtcaactctatgatgtgctcattaagaagaatccatttgggattgaaattcgccggaagagtacaggcactataatttgggactctcagctccttggctttaccttcagtgacatgtttatccgcatctccacccgccttccctccaagtacctctatggctttggggaaactgagcacaggtcctataggagagacttggagtggcacacttgggggatgttctcccgagaccagcccccagggtacaagaagaattcctatggtgtccacccctactacatggggctggaggaggacggcagtgcccatggagtgctcctgctgaacagcaatgccatggatgtgacgttccagcccctgcctgccttgacataccgcaccacagggggagttctggacttttatgtgttcttggggccgactccagagcttgtcacccagcagtacactgagttgattggccggcctgtgatggtaccttactggtctttggggttccagctgtgtcgctatggctaccagaatgactctgagatcgccagcttgtatgatgagatggtggctgcccagatcccttatgatgtgcagtactcagacatcgactacatggagcggcagctggacttcaccctcagccccaagtttgctgggtttccagctctgatcaatcgcatgaaggctgatgggatgcgggtcatcctcattctggatccagccatttctggcaatgagacacagccttatcctgccttcactcggggcgtggaggatgacgtcttcatcaaatacccaaatgatggagacattgtctggggaaaggtctggcctgattttcctgatgttgttgtgaatgggtctctagactgggacagccaagtggagctatatcgagcttatgtggccttcccagactttttccgtaattcaactgccaagtggtggaagagggaaatagaagaactatacaacaatccacagaatccagagaggagcttgaagtttgatggcatgtggattgatatgaatgaaccatcaagcttcgtgaatggggcagtttctccaggctgcagggacgcctctctgaaccaccctccctacatgccacatttggagtccagggacaggggcctgagcagcaagaccctttgtatggagagtcagcagatcctcccagacggctccctggtgcagcactacaacgtgcacaacctgtatgggtggtcccagaccagacccacatacgaagccgtgcaggaggtgacgggacagcgaggggtcgtcatcacccgctccacatttccctcttctggccgctgggcaggacattggctgggagacaacacggccgcatgggatcagctgaagaagtctatcattggcatgatggagttcagcctctttggcatatcctatacgggagcagatatctgtgggttctttcaagacgctgagtacgagatgtgtgttcgctggatgcagctgggggccttttaccccttctcaagaaaccacaataccattgggaccaggagacaagaccctgtgtcctgggatgctgcttttgtgaatatttccagaaatgtcctgcagaccagatacaccctgttgccatatctgtataccttgatgcaaaaggcccacacggagggcgtcactgttgtgcggcctctgctccatgagtttgtgtcagaccaggtgacatgggacatagacagtcagttcctgctgggcccagccttcctggtcagccctgtcctggagcgcaatgccagaaatgtcactgcatatttccctagagcccgttggtacgattactacacgggtgtggatattaatgcaagaggagagtggaagaccttgccagcccctcttgaccacattaatcttcatgtccgtgggggctacatcctgccctggcaagagcctgcactgaacacccacttaagtcgaaagaaccctcttggtcttattattgccctagatgaaaacaaagaagcaaaaggagaacttttctgggatgatgggcaaaca

SEQ ID NO: 1260 - protein, 1757 aa, Homo sapiens
MARKKLKKFTTLEIVLSVLLLVLFIISIVLIVLLAKESLKSTAPDPGTTGTPDPGTTGTPDPGTTGTTHARTTGPPDPGTTGTTPVSAECPVVNELERINCIPDQPPTKATCDQRGCCWNPQGAVSVPWCYYSKNHSYHVEGNLVNTNAGFTARLKNLPSSPVFGSNVDNVLLTAEYQTSNRFHFKLTDQTNNRFEVPHEHVQSFSGNAAASLTYQVEISRQPFSIKVTRRSNNRVLFDSSIGPLLFADQFLQLSTRLPSTNVYGLGEHVHQQYRHDMNWKTWPIFNRDTTPNGNGTNLYGAQTFFLCLEDASGLSFGVFLMNSNAMEVVLQPAPAITYRTIGGILDFYVFLGNTPEQVVQEYLELIGRPALPSYWALGFHLSRYEYGTLDNMREVVERNRAAQLPYDVQHADIDYMDERRDFTYDSVDFKGFPEFVNELHNNGQKLVIIVDPAISNNSSSSKPYGPYDRGSDMKIWVNSSDGVTPLIGEVWPGQTVFPDYTNPNCAVWWTKEFELFHNQVEFDGIWIDMNEVSNFVDGSVSGCSTNNLNNPPFTPRILDGYLFCKTLCMDAVQHWGKQYDIHNLYGYSMAVATAEAAKTVFPNKRSFILTRSTFAGSGKFAAHWLGDNTATWDDLRWSIPGVLEFNLFGIPMVGPDICGFALDTPEELCRRWMQLGAFYPFSRNHNGQGYKDQDPASFGADSLLLNSSRHYLNIRYTLLPYLYTLFFRAHSRGDTVARPLLHEFYEDNSTWDVHQQFLWGPGLLITPVLDEGAEKVMAYVPDAVWYDYETGSQVRWRKQKVEMELPGDKIGLHLRGGYIFPTQQPNTTTLASRKNPLGLIIALDENKEAKGELFWDNGETKDTVANKVYLLCEFSVTQNRLEVNISQSTYKDPNNLAFNEIKILGTEEPSNVTVKHNGVPSQTSPTVTYDSNLKVAIITDIDLLLGEAYTVEWSIKIRDEEKIDCYPDENGASAENCTARGCIWEASNSSGVPFCYFVNDLYSVSDVQYNSHGATADISLKSSVYANAFPSTPVNPLRLDVTYHKNEMLQFKIYDPNKNRYEVPVPLNIPSMPSSTPEGQLYDVLIKKNPFGIEIRRKSTGTIIWDSQLLGFTFSDMFIRISTRLPSKYLYGFGETEHRSYRRDLEWHTWGMFSRDQPPGYKKNSYGVHPYYMGLEEDGSAHGVLLLNSNAMDVTFQPLPALTYRTTGGVLDFYVFLGPTPELVTQQYTELIGRPVMVPYWSLGFQLCRYGYQNDSEIASLYDEMVAAQIPYDVQYSDIDYMERQLDFTLSPKFAGFPALINRMKADGMRVILILDPAISGNETQPYPAFTRGVEDDVFIKYPNDGDIVWGKVWPDFPDVVVNGSLDWDSQVELYRAYVAFPDFFRNSTAKWWKREIEELYNNPQNPERSLKFDGMWIDMNEPSSFVNGAVSPGCRDASLNHPPYMPHLESRDRGLSSKTLCMESQQILPDGSLVQHYNVHNLYGWSQTRPTYEAVQEVTGQRGVVITRSTFPSSGRWAGHWLGDNTAAWDQLKKSIIGMMEFSLFGISYTGADICGFFQDAEYEMCVRWMQLGAFYPFSRNHNTIGTRRQDPVSWDAAFVNISRNVLQTRYTLLPYLYTLMQKAHTEGVTVVRPLLHEFVSDQVTWDIDSQFLLGPAFLVSPVLERNARNVTAYFPRARWYDYYTGVDINARGEWKTLPAPLDHINLHVRGGYILPWQEPALNTHLSRKNPLGLIIALDENKEAKGELFWDDGQT

SEQ ID NO: 1261 - DNA, 5641 bp, Homo sapiens
cggaggaggacgcgagccccttgcgggcggtcatcacagcccagcctcggggctgccacagcgcgttgcgcctgtgcgccctcggtccccgcgtccactgagcgccgcgctcggggatggggcccggccggccggcccccgcgccctggcctcgtcacctgctgcgctgcgtcctgctcctcgggtgcctgcacctcggccgtcccggcgcccctggggacgccgccctcccggaacccaacgtcttcctcatcttcagccatggactgcagggctgcctggaggcccagggcgggcaggtcagagtcaccccggcttgcaataccagcctccctgcccagcgctggaagtgggtctcccgaaaccggctattcaacctgggtaccatgcagtgcctgggcacaggctggccaggcaccaacaccacggcctccctgggcatgtatgagtgtgaccgggaagcactgaatcttcgctggcattgtcgtacactgggtgaccagctgtccttgctcctgggggcccgcaccagcaacatatccaagcctggcacccttgagcgtggtgaccagacccgcagtggccagtggcgcatctacggcagcgaggaggacctatgtgctctgccctaccacgaggtctacaccatccagggaaactcccacggaaagccgtgcaccatccccttcaaatatgacaaccagtggttccacggctgcaccagcacgggccgcgaggatggtcacctgtggtgtgccaccacccaggactacggcaaagacgagcgctggggcttctgccccatcaagagtaacgactgcgagaccttctgggacaaggaccagctgactgacagctgctaccagtttaacttccagtccacgctgtcgtggagggaggcctgggccagctgcgagcagcagggtgcggatctgctgagcatcacggagatccacgagcagacctacatcaacggcctcctcactgggtacagctccaccctgtggatcggcttgaatgacttggacacgagcggaggctggcagtggtcggacaactcgcccctcaagtacctcaactgggagagtgaccagccggacaaccccagtgaggagaactgtggagtgatccgcactgagtcctcgggcggctggcagaaccgtgactgcagcatcgcgctgccctatgtgtgcaagaagaagcccaacgccacggccgagcccacccctccagacaggtgggccaatgtgaaggtggagtgcgagccgagctggcagcccttccagggccactgctaccgcctgcaggccgagaagcgcagctggcaggagtccaagaaggcatgtctacggggcggtggcgacctggtcagcatccacagcatggcggagctggaattcatcaccaagcagatcaagcaagaggtggaggagctgtggatcggcctcaacgatttgaaactgcagatgaattttgagtggtctgacgggagccttgtgagcttcacccactggcacccctttgagcccaacaacttccgggacagtctggaggactgtgtcaccatctggggcccggaaggccgctggaacgacagtccctgtaaccagtccttgccatccatctgcaagaaggcaggccagctgagccagggggccgccgaggaggaccatggctgccggaagggttggacgtggcacagcccatcctgctactggctgggagaagaccaagtgacctacagtgaggcccggcgcctgtgcactgaccatggctctcagctggtcaccatcaccaacaggttcgagcaggccttcgtcagcagcctcatctacaactgggagggcgagtacttctggacggccctgcaggacctcaacagcaccggctccttcttctggctcagtggggatgaagtcatgtacacccactggaaccgggaccagcccgggtacagccgtgggggctgcgtggcgctggccactggcagcgccatggggctgtgggaggtgaagaactgtacctcgttccgggcccgctacatctgccggcagagcctgggcactccagtgacgccggagctgccggggccagatcccacgcccagcctcactggctcctgtccccagggctgggcctcggacaccaaactccggtattgctataaggtgttcagctcagagcggctgcaggacaagaagagctgggtccaggcccagggggcctgccaggagctgggggcccagctgctgagcctggccagctacgaggaggagcactttgtggccaacatgctcaacaagatcttcggtgaatcagaacccgagatccacgagcagcactggttctggatcggcctgaaccgtcgggatcccagagggggtcagagttggcgctggagcgacggcgtagggttctcttaccacaatttcgaccggagccggcacgacgacgacgacatccgaggctgtgcggtgctggacctggcctccctgcagtgggtggccatgcagtgcgacacacagctggactggatctgcaagatccccagaggtacggacgtgcgggagcccgacgacagccctcaaggccgacgggaatggctgcgcttccaggaggccgagtacaagttctttgagcaccactccacgtgggcgcaggcgcagcgcatctgcacgtggttccaggccgagctgacctcggtgcacagccaggcggagctagacttcctgagccacaacttgcagaagttctcccgggcccaggagcagcactggtggatcggcctgcacacctctgagagcgatgggcgcttcagatggacagatggttccattataaacttcatctcctgggcaccaggcaaacctcggcctgtcggcaaggacaagaagtgcgtgtacatgacagccagccgagaggactggggggaccagaggtgcctgacagccttgccctacatctgcaagcgcagcaacgtcaccaaagaaacgcagcccccagacctgccaactacagccctggggggctgcccctctgactggatccagttcctcaacaagtgttttcaggtccagggccaggaaccccagagccgggtgaagtggtcagaggcacagttctcctgtgaacagcaagaggcccagctggtcaccatcacaaaccccttagagcaagcattcatcacagccagcctgcccaatgtgacctttgacctttggattggcctccatgcctcgcagagggacttccagtgggtggagcaggagcctttgatgtatgccaactgggcacctggggagccctctggccctagccctgctcccagtggcaacaaaccgaccagctgtgcagtggtcctgcacagcccctcagcccacttcactggccgctgggacgatcggagctgcacggaggagacccatggcttcatctgccagaagggcacggacccctccctgagcccgtccccagcagcgctgccccccgccccgggcactgagctctcctacctcaacggcaccttccggctgcttcagaagccgctgcgctggcacgatgccctcctgctgtgtgagagccgcaatgccagcctggcctacgtgcccgacccctacacccaggccttcctcacgcaggctgcccgagggctgcgcacgccgctctggattgggctggctggcgaggagggctctcggcggtactcctgggtctcagaggagccgctgaactacgtgggctggcaggacggggagccgcagcagccggggggctgtacctacgtagatgtggacggggcctggcgcaccaccagctgtgacaccaagctgcagggggctgtgtgtggggttagcagtgggccccctcctccccgaagaataagctaccatggcagctgtccccagggactggcagactccgcgtggattcccttccgggagcactgctattctttccacatggagctgctgctgggccacaaggaggcgcgacagcgctgccagagagcgggtggggccgtcctgtctatcctggatgagatggagaatgtgtttgtctgggagcacctgcagagctatgagggccagagtcggggcgcctggctgggcatgaacttcaaccccaaaggaggcactctggtctggcaggacaacacagctgtgaactactccaactgggggcccccgggcttgggccccagcatgctgagccacaacagctgctactggattcagagcaacagcgggctatggcgccccggcgcttgcaccaacatcaccatgggtgtcgtctgcaagcttcctcgtgctgagcagagcagcttctccccatcagcgcttccagagaacccagcggccctggtggtggtgctgatggcggtgctgctgctcctggccttgctgaccgcagccctcatcctttaccggaggcgccagagcatcgagcgcggggcctttgagggtgcccgctacagccgcagcagctccagccccaccgaggccactgagaagaacatcctggtgtcagacatggaaatgaatgagcaacaagaatagagccaggcgcgtgggcagggccagggcgggaggagctggggagctggggccctgggtcagtctggccccccaccagctgcctgtccagttggcctatggaagggtgcccttgggagtcgctgttgggagccggagctgggcagagcctgggctggtggggtgccaccctcccacaagggctgggctgagacccagctgagtgcagcgtggcgtttccctttctgggggggcctgaggtcttgtcacctggtcctgtgcccccacaggaaccagaggtaggatgggagggggaacgagagcctctttctccccagagcccccggcccaggcctgttgatccgcgccccaggacccccttctttgcagagcccgaggagcctcccctgtcccctcgggcagatctgttgtgtctctcttcccacctggcagcctcagctctgtgcccctcaccctgctccctctcgccccttctctcccaccccttccttctgagccgggccctggggattggggagccctcttgttcctgatgagggtcagctgagggggctgagcatccatcactcctgtgcctgctggggtggctgtggggcgtggcaggaggggcctaggtgggttgggcctgagaaccagggcacgggtgtggtgtctgctgggctggagataagactggggagagacaccccaacctcccagggtgggagctgggccgggctgggatgtcatctcctgccgggcgggggagggctctgcccctggaagagtcccctgtggggaccaaaataagttccctaacatctccagctcctggctctggtttggagcaaggggaagggttgccagagtcctgggggccccagaggagcaggagtctgggagggcccagagttcaccctctagtggatccaggaggagcagcacccgagccctggagtggcccagtacccttccaagaggccacagtcccagccaggacaaagtatgcggcccatcctggtgcgacagcgtgggacaatgtgaacatggactcgaagacatggccctttctctgtagttgattttttaaatgtgccattattgttttt

SEQ ID NO: 1262 - protein, 1479 aa, Homo sapiens
MGPGRPAPAPWPRHLLRCVLLLGCLHLGRPGAPGDAALPEPNVFLIFSHGLQGCLEAQGGQVRVTPACNTSLPAQRWKWVSRNRLFNLGTMQCLGTGWPGTNTTASLGMYECDREALNLRWHCRTLGDQLSLLLGARTSNISKPGTLERGDQTRSGQWRIYGSEEDLCALPYHEVYTIQGNSHGKPCTIPFKYDNQWFHGCTSTGREDGHLWCATTQDYGKDERWGFCPIKSNDCETFWDKDQLTDSCYQFNFQSTLSWREAWASCEQQGADLLSITEIHEQTYINGLLTGYSSTLWIGLNDLDTSGGWQWSDNSPLKYLNWESDQPDNPSEENCGVIRTESSGGWQNRDCSIALPYVCKKKPNATAEPTPPDRWANVKVECEPSWQPFQGHCYRLQAEKRSWQESKKACLRGGGDLVSIHSMAELEFITKQIKQEVEELWIGLNDLKLQMNFEWSDGSLVSFTHWHPFEPNNFRDSLEDCVTIWGPEGRWNDSPCNQSLPSICKKAGQLSQGAAEEDHGCRKGWTWHSPSCYWLGEDQVTYSEARRLCTDHGSQLVTITNRFEQAFVSSLIYNWEGEYFWTALQDLNSTGSFFWLSGDEVMYTHWNRDQPGYSRGGCVALATGSAMGLWEVKNCTSFRARYICRQSLGTPVTPELPGPDPTPSLTGSCPQGWASDTKLRYCYKVFSSERLQDKKSWVQAQGACQELGAQLLSLASYEEEHFVANMLNKIFGESEPEIHEQHWFWIGLNRRDPRGGQSWRWSDGVGFSYHNFDRSRHDDDDIRGCAVLDLASLQWVAMQCDTQLDWICKIPRGTDVREPDDSPQGRREWLRFQEAEYKFFEHHSTWAQAQRICTWFQAELTSVHSQAELDFLSHNLQKFSRAQEQHWWIGLHTSESDGRFRWTDGSIINFISWAPGKPRPVGKDKKCVYMTASREDWGDQRCLTALPYICKRSNVTKETQPPDLPTTALGGCPSDWIQFLNKCFQVQGQEPQSRVKWSEAQFSCEQQEAQLVTITNPLEQAFITASLPNVTFDLWIGLHASQRDFQWVEQEPLMYANWAPGEPSGPSPAPSGNKPTSCAVVLHSPSAHFTGRWDDRSCTEETHGFICQKGTDPSLSPSPAALPPAPGTELSYLNGTFRLLQKPLRWHDALLLCESRNASLAYVPDPYTQAFLTQAARGLRTPLWIGLAGEEGSRRYSWVSEEPLNYVGWQDGEPQQPGGCTYVDVDGAWRTTSCDTKLQGAVCGVSSGPPPPRRISYHGSCPQGLADSAWIPFREHCYSFHMELLLGHKEARQRCQRAGGAVLSILDEMENVFVWEHLQSYEGQSRGAWLGMNFNPKGGTLVWQDNTAVNYSNWGPPGLGPSMLSHNSCYWIQSNSGLWRPGACTNITMGVVCKLPRAEQSSFSPSALPENPAALVVVLMAVLLLLALLTAALILYRRRQSIERGAFEGARYSRSSSSPTEATEKNILVSDMEMNEQQE

SEQ ID NO: 1263 - DNA, 3221 bp, Homo sapiens
gggaaaggaggagaggaagagaggactaagaggggagcaaggcgaggaggccgcggcgggcgcagcgggcacctgggccgtgctgcccccgcgagcaaggcgccgccattccgctgctcggggcgccgccgccgccgccaccgcgcccaggggccatgctcccgccgcccccgcgccagccgccgccccaggcgcgtgcggcccgcggcgcggtgcgcctgcagcggcccttcctgcgcagcccgctgggcgtgttgcggctgctgcagctgctggccggcgctgccttctggatcactatcgccaccagcaagtaccagggccccgtgcacttcgcgctcttcgtgtccgtgctcttctggctgctcaccctgggcctctacttcctcacgctgctgggcaagcacgagctggtccccgtgctgggctcgcgctggctcatggtcaacgtggcgcacgatgtgctggcggccgcgctctacggcgccgccaccggcatcatgagcgaccagatgcagcgccacagctactgcaacctcaaggattacccgctcccctgcgcctaccacgccttcctggcggccgccgtctgcggcggcgtctgccacggcctctacctgctttcggcgctctatggctgcgggcgtcgctgccagggcaagcaggaggtggcgtgaggccgcccgcgcccgccgcggccccgatcggggcgggggaatccccggagaccagcctccttaatcccttcccccgccgccgccccgcgcgggtgcgccctggcaccctctccctgccctccagcgtttccactgtcgcccgcgcccgggaaccctgacgctcagctcccgcccgacggcagcgccgccgccgcccagaatcccagcccagaatcccgaccgccgcgccggacgcgccgtctcccgggacaagcgcaggctgcgatccgaggggctgacacacactcgcagacgagccgccccgaggcgaaacctcgcggttcctcttcccttccctgctgagactaagacgtggacaggggccgcgcagatccgggggaggctcccaaattggaaccaggcttctggctgcccccttccctcccgccccgtggtcggaagagcactcccttccctggcccctcatccagcctccggtgctgtaaaacgcaggcgctgggccgcgggcggagctgaggacaggccttggctggtcccaggatgagcgacgagtttggttttagctggggattgtgctggcatcctgcgaagctcctcccagccggtctctctgtgctcggttgtcttggggtggggcccatccgccgaggtggggaccgataggagaagccggtgggttgtacccttacacttgtggagtctcctcttgcctctacctactccgcctttgtccttaaggtttttgcaggccagtgccaaacacacactaactgtcctggcctctccgtgacacaagtctcttcccagccttcctcacaggcttctgccgcccccctcatctccaccctcccccatatctgtttgcattaggagttccacgaccatggtggaatgttaaggtgaaccccaccccttcttacagatggggacccagagcctgctcttgggaacagccagagtaagattggaacccagacttgcagtccagcgctgtttgcattaaaagggtgggtgagtcaggacccctggctcaggagccgcctctcctaaaagagggtttcaaggccaaatgggtttgtcaacggtgctgtctccctttcttggagatgctcattagcttatcaaagactgagaagtcccgctgttacagaaataatttagtttgctgtattaactgctcctgggcctggagcagtattcccaccttaagattcccagcatccctgtgctgtcccggctctcattcatgccgaagggcccaacccattggctgtgttctgtttgaagatttggggggcgccttctctttcttccccagggaattctctagcagagggaggggacccaccccagtgaggaagtagattgctgcctctagccagagacctgaactggggaatttgaacattcctttacattgttggagaaatgaagccaaagttattcagatggttttcccaggctaaaggaaagtcacctgcaagagatcccggcactgatctggagcagctgacagggtgggtctcccttaccaaagagaagaaccactctctggcgctggggtgacctgctggctgggcctgtaaggtttccatgttgctgaggccatggagattcccagagctggtcacaccgaccgctctcagggcccgctgccctgggctggcaacaccattctggccttggcctgcagaagctttcagagtcttcactggcagtagggggagatggggagaggaatgatctctgcccagccccttcctttccaaaccatgcaatggaagagcccagatgggtgaagattgattttgccttaactcaagagaattcctgttctccttgtgctatgatttggacacaagattctggatacctggaacttagctgtgtactcctgtaccctaaacagtggatttgagttccagcgtttattcttttttccttttttcagatcaccatctaagttacatctttagctcaggtccatccttctcaagatctccttcttagccccccagcccctggtgctgtctgtggtcaggtgaccttactcaggagcagatatctccttggccgccatggagcctcatccatccacacgtgcctgtagcattccagagctcactgcccttctagatgtgccttcccgcttggcttccagcggcttgtgctcactctgtctgccaggtatgagaagaacacgtaagaccgccaccacactcaccctccctcaaggccctgtgccataggggtggccacccgacctgcccccagaacttttggatactggaggcagttgcataggtctccctctctgggcaccaggactcagtccagcccaagactactctgggcagctcccatcccagtctggggccatttgcagactcaggaaaggatttctacagtgttctataaaagccaaaagagagagtgggtttgggaagagtgagggtggttggggagaggggaccgatgtgcctcattgtttagtggtgattacaaatatgcttttctggataaagtttggttgtttgctcttgg

SEQ ID NO: 1264 - protein, 173 aa, Homo sapiens
MLPPPPRQPPPQARAARGAVRLQRPFLRSPLGVLRLLQLLAGAAFWITIATSKYQGPVHFALFVSVLFWLLTLGLYFLTLLGKHELVPVLGSRWLMVNVAHDVLAAALYGAATGIMSDQMQRHSYCNLKDYPLPCAYHAFLAAAVCGGVCHGLYLLSALYGCGRRCQGKQEVA

SEQ ID NO: 1265 - DNA, 1167 bp, Homo sapiens
atgggccgcggggcccgtgtcccctcggaggccccgggggcaggcgtcgagcgccgctggcttggagccgcgctggtcgccctgtgcctcctccccgcgctggtgctgctggcccggctgggggccccggcggtgccggcctggagcgcagcgcagggagacgtcgctgcgctgggcctctcggcggtcccccccacccgggtcccgggcccactggccccccgcagacgccgctacacgctgactccagccaggctgcgctgggaccacttcaacctcacctacaggatcctctccttcccgcggaacctgctgagcccgcgggagacgcggcgggccctagctgccgccttccgcatgtggagcgacgtgtcccccttcagcttccgcgaggtggcccccgagcagcccagcgacctccggataggcttctacccgatcaaccacacggactgcctggtctccgcgctgcaccactgcttcgacggccccacgggggagctggcccacgccttcttccccccgcacggcggcatccacttcgacgacagcgagtactgggtcctgggccccacgcgctacagctggaagaaaggcgtgtggctcacggacctggtgcacgtggcggcccacgagatcggccacgcgctgggcctgatgcactcacaacacggccgggcgctcatgcacctgaacgccacgctgcgcggctggaaggcgttgtcccaggacgagctgtgggggctgcaccggctctacggatgcctcgacaggctgttcgtgtgcgcgtcctgggcgcggaggggcttctgcgacgctcgccggcggctcatgaagaggctctgccccagcagctgcgacttctgctacgaattccccttccccacggtggccaccaccccaccgccccccaggaccaaaaccaggctggtgcccgagggcaggaacgtgaccttccgctgcggccagaagatcctccacaagaaagggaaagtgtactggtacaaggaccaggagcccctggagttctcccccggctacctggccctgggcgaggcgcacctgagcatcatcgccaacgccgtcgagggcacctacacctgcgtggtgctccgccagcagcgcgtgctgaccacctactcctggcgagtccgtgtgcggggctga

SEQ ID NO: 1266 - protein, 388 aa, Homo sapiens
MGRGARVPSEAPGAGVERRWLGAALVALCLLPALVLLARLGAPAVPAWSAAQGDVAALGLSAVPPTRVPGPLAPRRRRYTLTPARLRWDHFNLTYRILSFPRNLLSPRETRRALAAAFRMWSDVSPFSFREVAPEQPSDLRIGFYPINHTDCLVSALHHCFDGPTGELAHAFFPPHGGIHFDDSEYWVLGPTRYSWKKGVWLTDLVHVAAHEIGHALGLMHSQHGRALMHLNATLRGWKALSQDELWGLHRLYGCLDRLFVCASWARRGFCDARRRLMKRLCPSSCDFCYEFPFPTVATTPPPPRTKTRLVPEGRNVTFRCGQKILHKKGKVYWYKDQEPLEFSPGYLALGEAHLSIIANAVEGTYTCVVLRQQRVLTTYSWRVRVRG

SEQ ID NO: 1267 - DNA, 2411 bp, Homo sapiens
agtccggcgggggcgccgcggagagcggagggcgccgggctgcggaacgcgaagcggagggcgcgggaccctgcacgccgcccgcgggcccatgtgagcgccatgcggcgccgcgcagcccggggacccggcccgccgcccccagggcccggactctcgcggctgccgctgccgctgctgctgctgctggcgctggggacccgcgggggctgcgccgcgcccgcacccgcgccgcgcgccgaggacctcagcctgggagtggagtggctaagcaggttcggttacctgcccccggctgaccccacaacagggcagctgcagacgcaagaggagctgtctaaggccatcacagccatgcagcagtttggtggcctggaggccaccggcatcctggacgaggccaccctggccctgatgaaaaccccacgctgctccctgccagacctccctgtcctgacccaggctcgcaggagacgccaggctccagcccccaccaagtggaacaagaggaacctgtcgtggagggtccggacgttcccacgggactcaccactggggcacgacacggtgcgtgcactcatgtactacgccctcaaggtctggagcgacattgcgcccctgaacttccacgaggtggcgggcagcgccgccgacatccagatcgacttctccaaggccgaccataacgacggctaccccttcgacggccccggcggcaccgtggcccacgccttcttccccggccaccaccacaccgccggggacacccactttgacgatgacgaggcctggaccttccgctcctcggatgcccacgggatggacctgtttgcagtggctgtccacgagtttggccacgccattgggttaagccatgtggccgctgcacactccatcatgcggccgtactaccagggcccggtgggtgacccgctgcgctacgggctcccctacgaggacaaggtgcgcgtctggcagctgtacggtgtgcgggagtctgtgtctcccacggcgcagcccgaggagcctcccctgctgccggagcccccagacaaccggtccagcgccccgcccaggaaggacgtgccccacagatgcagcactcactttgacgcggtggcccagatccggggtgaagctttcttcttcaaaggcaagtacttctggcggctgacgcgggaccggcacctggtgtccctgcagccggcacagatgcaccgcttctggcggggcctgccgctgcacctggacagcgtggacgccgtgtacgagcgcaccagcgaccacaagatcgtcttctttaaaggagacaggtactgggtgttcaaggacaataacgtagaggaaggatacccgcgccccgtctccgacttcagcctcccgcctggcggcatcgacgctgccttctcctgggcccacaatgacaggacttatttctttaaggaccagctgtactggcgctacgatgaccacacgaggcacatggaccccggctaccccgcccagagccccctgtggaggggtgtccccagcacgctggacgacgccatgcgctggtccgacggtgcctcctacttcttccgtggccaggagtactggaaagtgctggatggcgagctggaggtggcacccgggtacccacagtccacggcccgggactggctggtgtgtggagactcacaggccgatggatctgtggctgcgggcgtggacgcggcagaggggccccgcgcccctccaggacaacatgaccagagccgctcggaggacggttacgaggtctgctcatgcacctctggggcatcctctcccccgggggccccaggcccactggtggctgccaccatgctgctgctgctgccgccactgtcaccaggcgccctgtggacagcggcccaggccctgacgctatgacacacagcgcgagcccatgagaggacagaggcggtgggacagcctggccacagagggcaaggactgtgccggagtccctgggggaggtgctggcgcgggatgaggacgggccaccctggcaccggaaggccagcagagggcactgtccgccagggctgggcaggctcaggtggcaaggacggagctgtcccctagtgagggactgtgttgactgacgagccgaggggtggccgctccagaagggtgcccagtcaggccgcaccgccgccagcctcctccggccctggagggagcatctcgggctgggggcccacccctctctgtgccggcgccaccaaccccacccacactgctgcctggtgctcccgccggcccacagggcctccgtccccaggtccccagtggggcagccctccccacagacgagccccccacatggtgccgcggcacgtcccccctgtgacgcgttccagaccaacatgacctctccctgcttt

SEQ ID NO: 1268 - protein, 603 aa, Homo sapiens
MRRRAARGPGPPPPGPGLSRLPLPLLLLLALGTRGGCAAPAPAPRAEDLSLGVEWLSRFGYLPPADPTTGQLQTQEELSKAITAMQQFGGLEATGILDEATLALMKTPRCSLPDLPVLTQARRRRQAPAPTKWNKRNLSWRVRTFPRDSPLGHDTVRALMYYALKVWSDIAPLNFHEVAGSAADIQIDFSKADHNDGYPFDGPGGTVAHAFFPGHHHTAGDTHFDDDEAWTFRSSDAHGMDLFAVAVHEFGHAIGLSHVAAAHSIMRPYYQGPVGDPLRYGLPYEDKVRVWQLYGVRESVSPTAQPEEPPLLPEPPDNRSSAPPRKDVPHRCSTHFDAVAQIRGEAFFFKGKYFWRLTRDRHLVSLQPAQMHRFWRGLPLHLDSVDAVYERTSDHKIVFFKGDRYWVFKDNNVEEGYPRPVSDFSLPPGGIDAAFSWAHNDRTYFFKDQLYWRYDDHTRHMDPGYPAQSPLWRGVPSTLDDAMRWSDGASYFFRGQEYWKVLDGELEVAPGYPQSTARDWLVCGDSQADGSVAAGVDAAEGPRAPPGQHDQSRSEDGYEVCSCTSGASSPPGAPGPLVAATMLLLLPPLSPGALWTAAQALTL

SEQ ID NO: 1269 - DNA, 2373 bp, Homo sapiens
ggccgcgcgtcccagagagccagccccggccgccgtcgcggggaagtgccgcctggtggggtcacggcgcctgaagcccacgtgcgccgccgagcccgaggtggcctcgagcgcggcggctgacagcacagcccgcctgagctgcctcccgcgctcctccccgaggaaaggattttgatttcaaagaaaggaaggaaggaaggacaactcccagcttccccgtcccgccctccccgctccgagggccgcgccaggccatgcccaagaaggcggcggcggcggcgaaccagcagaagggactttcctggcagcccggcgacgaggagcgcggacagtgagtttgctctgccccggttcatggttcctgcaagccctctaggaggccgaaagctgcagcccctccccttgccccgaagagccttccgcgttctctcgccctcgggcccaccccgcgccgcccgggctcccgccgccgcagcccagtgccctctgcccgcggcggtggatggcatgatggtgcggggaaggcaccgcggccttggccagctgagtcgcgacggccgccggggcggcggcagtggccgcggcagcggcggtggtagcgggctccccagcggcatgccagtgccccccgggcgcgatggctagcggcagcgccgggaagcccactggcgaggcggcttctccggctcctgcgagcgccatcggcggggccagctcgcagccgcggaagaggctggtatccgtctgcgaccactgcaagggcaagatgcagctggtggctgacctgctgctgctgtcgagcgaggcgcggcccgtgctcttcgagggccccgcctcctctggtgccggcgccgagtccttcgagcagtgccgggacaccatcatcgcgcgcaccaaggggctctccatcctcacccacgacgtgcagagccagctcaacatgggccgcttcggggaggcgggggacagcctggtggagctgggcgacctggtggtgtcgctgaccgagtgctcggcccacgcggcctatctggccgctgtggccacgccgggcgcccagcccgcgcagccgggcctggtggaccgctaccgcgtgacgcgatgccgccacgaggtggagcagggttgcgccgtgctgcgcgccacgccgctggccgacatgacgccgcagctgctgctggaggtgtcgcagggcctgtcgcgcaacctcaagttcctgacggacgcgtgcgccctggccagtgacaagtcacgggaccgcttttcgcgggagcagttcaagctgggcgtcaagtgcatgagcaccagcgcgtcggcgctgctggcctgcgtgcgcgaggtgaaggtggcgcccagtgagctggcgcgcagccgctgtgcgctcttcagcgggcccctggtgcaggcagtgagcgccctggtaggcttcgccaccgagccgcagttcctgggtcgcgcggcagctgtgagcgccgagggcaaggcggtgcagaccgccatcctgggcggcgccatgagcgtggtgtcggcctgcgtgctcctgacccagtgcctcagggatctggcgcagcaccccgacgggggcgccaagatgtcggaccacagggagaggctgaggaactcggcctgcgccgtgtctgaaggctgcaccctgctatctcaggctttaagggagaggtcttcgcccaggactttaccgccagtgaattccaattctgtgaattagcaccccacccccataccccttcttccacccccagactaaaggaagatacttactctctgcccctctccatttataccaaagaaatcataggtgaaaccccctaccctccccaacgttaaatgctcgagaggaatcttccacaaggcagggccatgcacgcaacctgcacacgcacttggagggcccaggtgtctctccaccagcccccatgcagtagggactggaagatatgtcatctgctggttgtgttatcactcccaccccctaccccagcccgtcttccggaatttctcaactaaatttcattattgggcaggaaggaggtcatgggttcatttcatttttgttttttgtgtttttaattaaaagaaaggttacctcagttttcactccttagacatggatgtagctacctttttttgtatgtcttttttttttttaagcaatcgtgttgaattaggagtatacttggtgtggaaagagtatgaatttgccatgtgatttgcaaatggggggaagctactgtgagcgtgtgtttttttaatttacactatagagtgatttttttttcccccaacgtcaagtttttaccttgcatgtactggagtatttatttcatctattaaaatgttatgtttctcaga

SEQ ID NO: 1270 - protein, 362 aa, Homo sapiens
MASGSAGKPTGEAASPAPASAIGGASSQPRKRLVSVCDHCKGKMQLVADLLLLSSEARPVLFEGPASSGAGAESFEQCRDTIIARTKGLSILTHDVQSQLNMGRFGEAGDSLVELGDLVVSLTECSAHAAYLAAVATPGAQPAQPGLVDRYRVTRCRHEVEQGCAVLRATPLADMTPQLLLEVSQGLSRNLKFLTDACALASDKSRDRFSREQFKLGVKCMSTSASALLACVREVKVAPSELARSRCALFSGPLVQAVSALVGFATEPQFLGRAAAVSAEGKAVQTAILGGAMSVVSACVLLTQCLRDLAQHPDGGAKMSDHRERLRNSACAVSEGCTLLSQALRERSSPRTLPPVNSNSVN

SEQ ID NO: 1271 - DNA, 1057 bp, Homo sapiens
tcttccctgaagggagacgtcgctgcgctgggcctctcggcggtcccccccacccgggtcccgggcccactggccccccgcagacgccgctacacgctgactccagccaggctgcgctgggaccacttcaacctcacctacaggatcctctccttcccgcggaacctgctgagcccgcgggagacgcggcgggccctagctgccgccttccgcatgtggagcgacgtgtcccccttcagcttccgcgaggtggcccccgagcagcccagcgacctccggataggcttctacccgatcaaccacacggactgcctggtctccgcgctgcaccactgcttcgacggccccacgggggagctggcccacgccttcttccccccgcacggcggcatccacttcgacgacagcgagtactgggtcctgggccccacgcgctacagctggaagaaaggcgtgtggctcacggacctggtgcacgtggcggcccacgagatcggccacgcgctgggcctgatgcactcacaacacggccgggcgctcatgcacctgaacgccacgctgcgcggctggaaggcgttgtcccaggacgagctgtgggggctgcaccggctctacggatgcctcgacaggctgttcgtgtgcgcgtcctgggcgcggaggggcttctgcgacgctcgccggcggctcatgaagaggctctgccccagcagctgcgacttctgctacgaattccccttccccacggtggccaccaccccaccgccccccaggaccaaaaccaggctggtgcccgagggcaggaacgtgaccttccgctgcggccagaagatcctccacaagaaagggaaagtgtactggtacaaggaccaggagcccctggagttctcctaccccggctacctggccctgggcgaggcgcacctgagcatcatcgccaacgccgtcaatgagggcacctacacctgcgtggtgcgccgccagcagcgcgtgctgaccacctactcctggcgagtccgtgtgcggggctgagcccggctgataaagcactttctctctg

SEQ ID NO: 1272 - protein, 342 aa, Homo sapiens
SSLKGDVAALGLSAVPPTRVPGPLAPRRRRYTLTPARLRWDHFNLTYRILSFPRNLLSPRETRRALAAAFRMWSDVSPFSFREVAPEQPSDLRIGFYPINHTDCLVSALHHCFDGPTGELAHAFFPPHGGIHFDDSEYWVLGPTRYSWKKGVWLTDLVHVAAHEIGHALGLMHSQHGRALMHLNATLRGWKALSQDELWGLHRLYGCLDRLFVCASWARRGFCDARRRLMKRLCPSSCDFCYEFPFPTVATTPPPPRTKTRLVPEGRNVTFRCGQKILHKKGKVYWYKDQEPLEFSYPGYLALGEAHLSIIANAVNEGTYTCVVRRQQRVLTTYSWRVRVRG

SEQ ID NO: 1273 - DNA, 786 bp, Homo sapiens
cacacggactgcctggtctccgcgctgcaccactgcttcgacggccccacgggggagctggcccacgccttcttccccccgcacggcggcatccacttcgacgacagcgagtactgggtcctgggccccacgcgctacagctggaagaaaggtgaccgtccaggctcctggaggcctctcctctgcagcacagtgggctgccgcggtcgggctttggggcagacggcaggagggaccttccggggtggtggctgccactggagcgtgtggctcacggacctggtgcacgtggcggcccacgagatcggccacgcgctgggcctgatgcactcacaacacggccgggcgctcatgcacctgaacgccacgctgcgcggctggaaggcgttgtcccaggacgagctgtgggggctgcaccggctctacggatgcctcgacaggctgttcgtgtgcgcgtcctgggcgcggaggggcttctgcgacgctcgccggcggctcatgaagaggctctgccccagcagctgcgacttctgctacgaattccccttccccacggtggccaccaccccaccgccccccaggaccaaaaccaggctggtgcccgagggcaggaacgtgaccttccgctgcggccagaagatcctccacaagaaagggaaagtgtactggtacaaggaccaggagcccctggagttctcctaccccggctacctggccctgggcgaggcgcacctgagcatcatcgccaacgccgtcaatgagggcacctacacctgcgtggtgcgc

SEQ ID NO: 1274 - protein, 262 aa, Homo sapiens
HTDCLVSALHHCFDGPTGELAHAFFPPHGGIHFDDSEYWVLGPTRYSWKKGDRPGSWRPLLCSTVGCRGRALGQTAGGTFRGGGCHWSVWLTDLVHVAAHEIGHALGLMHSQHGRALMHLNATLRGWKALSQDELWGLHRLYGCLDRLFVCASWARRGFCDARRRLMKRLCPSSCDFCYEFPFPTVATTPPPPRTKTRLVPEGRNVTFRCGQKILHKKGKVYWYKDQEPLEFSYPGYLALGEAHLSIIANAVNEGTYTCVVR

SEQ ID NO: 1275 - DNA, 1057 bp, Homo sapiens; identical to SEQ ID NO: 1271

SEQ ID NO: 1276 - protein, 342 aa, Homo sapiens; identical to SEQ ID NO: 1272

SEQ ID NO: 1277 - DNA, 786 bp, Homo sapiens; identical to SEQ ID NO: 1273

SEQ ID NO: 1278 - protein, 262 aa, Homo sapiens; identical to SEQ ID NO: 1274

SEQ ID NO: 1279 - DNA, 1644 bp, Homo sapiens
cgccaacatggcggcgcccagtggcgtccacctgctcgtccgcagaggttctcatagaattttctcttcaccactcaatcatatctacttacacaagcagtcaagcagtcaacaaagaagaaatttcttttttcggagacaaagagatatttcacacagtatagttttgccggctgcagtttcttcagctcatccggttcctaagcacataaagaagccagactatgtgacgacaggcattgtaccagactggggagacagcatagaagttaagaatgaagatcagattcaagggcttcatcaggcttgtcagctggcccgccacgtcctcctcttggctgggaagagtttaaaggttgacatgacaactgaagagatagatgctcttgttcatcgggaaatcatcagtcataatgcctatccctcacctctaggctatggaggttttccaaaatctgtttgtacctctgtaaacaacgtgctctgtcatggtattcctgacagtcgacctcttcaggatggagatattatcaacattgatgtcacagtctattacaatggctaccatggagacacctctgaaacatttttggtgggcaatgtggacgaatgtggtaaaaagttagtggaggttgccaggaggtgtagagatgaagcaattgcagcttgcagagcaggggctcccttctctgtaattggaaacacaatcagccacataactcatcagaatggttttcaagtctgtccacattttgtgggacatggaataggatcttactttcatggacatccagaaatttggcatcatgcaaacgacagtgatctacccatggaggagggcatggcattcactatagagccaatcatcacggagggatcccctgaatttaaagtcctggaggatgcatggactgtggtctccctagacaatcaaaggtcggcgcagttcgagcacacggttctgatcacgtcgaggggcgcgcagatcctgaccaaactaccccatgaggcctgaggagccgcccgaaggtcgcggtgacctggtgcctttttaaataaattgctgaaatttggctggagaacttttagaagaaacagggaaatgaccggtggtgcggtaacctgcgtggctcctgatagcgtttggaagaacgcgggggagactgaagagcaactgggaactcggatctgaagccctgctggggtcgcgcggctttggaaaaacaaatcctggccctggactcggtttcccagcgcggtcaacgcatctggaggggactggaggaaacccccttgttggaagagattccaagagaagcacggttttctctttcccttgccctgactgttggagtaaaaaacctcttaaatccattgtatcagaggtccttacctctctgacagttacagtgatctttgtatctgaactttgcacgtctgccgaaaaatccgaacctgttgactgggatttttaagaatccgtttctcccttttgtgtattccatattggccggccccaaggatgctcgcagaagccagcccccaaccccagcccttccgtatctttcccctccatcgcggctttgcgatgaaagattagcccgcgaacagaggcattgattacaaacatgtccttggcagtgg

SEQ ID NO: 1280 - protein, 335 aa, Homo sapiens
MAAPSGVHLLVRRGSHRIFSSPLNHIYLHKQSSSQQRRNFFFRRQRDISHSIVLPAAVSSAHPVPKHIKKPDYVTTGIVPDWGDSIEVKNEDQIQGLHQACQLARHVLLLAGKSLKVDMTTEEIDALVHREIISHNAYPSPLGYGGFPKSVCTSVNNVLCHGIPDSRPLQDGDIINIDVTVYYNGYHGDTSETFLVGNVDECGKKLVEVARRCRDEAIAACRAGAPFSVIGNTISHITHQNGFQVCPHFVGHGIGSYFHGHPEIWHHANDSDLPMEEGMAFTIEPIITEGSPEFKVLEDAWTVVSLDNQRSAQFEHTVLITSRGAQILTKLPHEA

SEQ ID NO: 1281 - DNA, 10113 bp, Homo sapiens
gctccataaaaatacagactcaccagttcctgctttgatgtgacatgtgactccccagaatacaccttgcttctgtagaccagctccaacaggattccatggtagctgggatgttagggctcagggaagaaaagtcagaagaccaggacctccagggcctcaaggacaaacccctcaagtttaaaaaggtgaagaaagataagaaagaagagaaagagggcaagcatgagcccgtgcagccatcagcccaccactctgctgagcccgcagaggcaggcaaagcagagacatcagaagggtcaggctccgccccggctgtgccggaagcttctgcctcccccaaacagcggcgctccatcatccgtgaccggggacccatgtatgatgaccccaccctgcctgaaggctggacacggaagcttaagcaaaggaaatctggccgctctgctgggaagtatgatgtgtatttgatcaatccccagggaaaagcctttcgctctaaagtggagttgattgcgtacttcgaaaaggtaggcgacacatccctggaccctaatgattttgacttcacggtaactgggagagggagcccctcccggcgagagcagaaaccacctaagaagcccaaatctcccaaagctccaggaactggcagaggccggggacgccccaaagggagcggcaccacgagacccaaggcggccacgtcagagggtgtgcaggtgaaaagggtcctggagaaaagtcctgggaagctccttgtcaagatgccttttcaaacttcgccagggggcaaggctgaggggggtggggccaccacatccacccaggtcatggtgatcaaacgccccggcaggaagcgaaaagctgaggccgaccctcaggccattcccaagaaacggggccgaaagccggggagtgtggtggcagccgctgccgccgaggccaaaaagaaagccgtgaaggagtcttctatccgatctgtgcaggagaccgtactccccatcaagaagcgcaagacccgggagacggtcagcatcgaggtcaaggaagtggtgaagcccctgctggtgtccaccctcggtgagaagagcgggaaaggactgaagacctgtaagagccctgggcggaaaagcaaggagagcagccccaaggggcgcagcagcagcgcctcctcaccccccaagaaggagcaccaccaccatcaccaccactcagagtccccaaaggcccccgtgccactgctcccacccctgcccccacctccacctgagcccgagagctccgaggaccccaccagcccccctgagccccaggacttgagcagcagcgtctgcaaagaggagaagatgcccagaggaggctcactggagagcgacggctgccccaaggagccagctaagactcagcccgcggttgccaccgccgccacggccgcagaaaagtacaaacaccgaggggagggagagcgcaaagacattgtttcatcctccatgccaaggccaaacagagaggagcctgtggacagccggacgcccgtgaccgagagagttagctgactttacacggagcggattgcaaagcaaaccaacaagaataaaggcagctgttgtctcttctccttatgggtagggctctgacaaagcttcccgattaactgaaataaaaaatatttttttttctttcagtaaacttagagtttcgtggcttcagggtgggagtagttggagcattggggatgtttttcttaccgacaagcacagtcaggttgaagacctaaccagggccagaagtagctttgcacttttctaaactaggctccttcaacaaggcttgctgcagatactactgaccagacaagctgttgaccaggcacctcccctcccgcccaaacctttcccccatgtggtcgttagagacagagcgacagagcagttgagaggacactcccgttttcggtgccatcagtgccccgtctacagctcccccagctccccccacctcccccactcccaaccacgttgggacagggaggtgtgaggcaggagagacagttggattctttagagaagatggatatgaccagtggctatggcctgtgcgatcccacccgtggtggctcaagtctggccccacaccagccccaatccaaaactggcaaggacgcttcacaggacaggaaagtggcacctgtctgctccagctctggcatggctaggaggggggagtcccttgaactactgggtgtagactggcctgaaccacaggagaggatggcccagggtgaggtggcatggtccattctcaagggacgtcctccaacgggtggcgctagaggccatggaggcagtaggacaaggtgcaggcaggctggcctggggtcaggccgggcagagcacagcggggtgagagggattcctaatcactcagagcagtctgtgacttagtggacaggggagggggcaaagggggaggagaagaaaatgttcttccagttactttccaattctcctttagggacagcttagaattatttgcactattgagtcttcatgttcccacttcaaaacaaacagatgctctgagagcaaactggcttgaattggtgacatttagtccctcaagccaccagatgtgacagtgttgagaactacctggatttgtatatatacctgcgcttgttttaaagtgggctcagcacatagggttcccacgaagctccgaaactctaagtgtttgctgcaattttataaggacttcctgattggtttctcttctccccttccatttctgccttttgttcatttcatcctttcacttctttcccttcctccatcctcctccttcctagttcatcccttctcttccaggcagccgcggtgcccaaccacacttgtcggctccagtccccagaactctgcctgccctttgtcctcctgctgccagtaccagccccaccctgttttgagccctgaggaggccttgggctctgctgagtccgacctggcctgtctgtgaagagcaagagagcagcaaggtcttgctctcctaggtagccccctcttccctggtaagaaaaagcaaaaggcatttcccaccctgaacaacgagccttttcacccttctactctagagaagtggactggaggagctgggcccgatttggtagttgaggaaagcacagaggcctcctgtggcctgccagtcatcgagtggcccaacaggggctccatgccagccgaccttgacctcactcagaagtccagagtctagcgtagtgcagcagggcagtagcggtaccaatgcagaactcccaagacccgagctgggaccagtacctgggtccccagcccttcctctgctcccccttttccctcggagttcttcttgaatggcaatgttttgcttttgctcgatgcagacagggggccagaacaccacacatttcactgtctgtctggtccatagctgtggtgtaggggcttagaggcatgggcttgctgtgggtttttaattgatcagttttcatgtgggatcccatctttttaacctctgttcaggaagtccttatctagctgcatatcttcatcatattggtatatccttttctgtgtttacagagatgtctcttatatctaaatctgtccaactgagaagtaccttatcaaagtagcaaatgagacagcagtcttatgcttccagaaacacccacaggcatgtcccatgtgagctgctgccatgaactgtcaagtgtgtgttgtcttgtgtatttcagttattgtccctggcttccttactatggtgtaatcatgaaggagtgaaacatcatagaaactgtctagcacttccttgccagtctttagtgatcaggaaccatagttgacagttccaatcagtagcttaagaaaaaaccgtgtttgtctcttctggaatggttagaagtgagggagtttgccccgttctgtttgtagagtctcatagttggactttctagcatatatgtgtccatttccttatgctgtaaaagcaagtcctgcaaccaaactcccatcagcccaatccctgatccctgatcccttccacctgctctgctgatgacccccccagcttcacttctgactcttccccaggaagggaaggggggtcagaagagagggtgagtcctccagaactcttcctccaaggacagaaggctcctgcccccatagtggcctcgaactcctggcactaccaaaggacacttatccacgagagcgcagcatccgaccaggttgtcactgagaagatgtttattttggtcagttgggtttttatgtattatacttagtcaaatgtaatgtggcttctggaatcattgtccagagctgcttccccgtcacctgggcgtcatctggtcctggtaagaggagtgcgtggcccaccaggcccccctgtcacccatgacagttcattcagggccgatggggcagtcgtggttgggaacacagcatttcaagcgtcactttatttcattcgggccccacctgcagctccctcaaagaggcagttgcccagcctctttcccttccagtttattccagagctgccagtggggcctgaggctccttagggttttctctctatttccccctttcttcctcattccctcgtctttcccaaaggcatcacgagtcagtcgcctttcagcaggcagccttggcggtttatcgccctggcaggcaggggccctgcagctctcatgctgcccctgccttggggtcaggttgacaggaggttggagggaaagccttaagctgcaggattctcaccagctgtgtccggcccagttttggggtgtgacctcaatttcaattttgtctgtacttgaacattatgaagatgggggcctctttcagtgaatttgtgaacagcagaattgaccgacagctttccagtacccatggggctaggtcattaaggccacatccacagtctcccccacccttgttccagttgttagttactacctcctctcctgacaatactgtatgtcgtcgagctccccccaggtctacccctcccggccctgcctgctggtgggcttgtcatagccagtgggattgccggtcttgacagctcagtgagctggagatacttggtcacagccaggcgctagcacagctcccttctgttgatgctgtattcccatatcaaaagacacaggggacacccagaaacgccacatcccccaatccatcagtgccaaactagccaacggccccagcttctcagctcgctggatggcggaagctgctactcgtgagcgccagtgcgggtgcagacaatcttctgttgggtggcatcattccaggcccgaagcatgaacagtgcacctgggacagggagcagccccaaattgtcacctgcttctctgcccagcttttcattgctgtgacagtgatggcgaaagagggtaataaccagacacaaactgccaagttgggtggagaaaggagtttctttagctgacagaatctctgaattttaaatcacttagtaagcggctcaagcccaggagggagcagagggatacgagcggagtcccctgcgcgggaccatctggaattggtttagcccaagtggagcctgacagccagaactctgtgtcccccgtctaaccacagctccttttccagagcattccagtcaggctctctgggctgactgggccaggggaggttacaggtaccagttctttaagaagatctttgggcatatacatttttagcctgtgtcattgccccaaatggattcctgtttcaagttcacacctgcagattctaggacctgtgtcctagacttcagggagtcagctgtttctagagttcctaccatggagtgggtctggaggacctgcccggtgggggggcagagccctgctccctccgggtcttcctactcttctctctgctctgacgggatttgttgattctctccattttggtgtctttctcttttagatattgtatcaatctttagaaaaggcatagtctacttgttataaatcgttaggatactgcctcccccagggtctaaaattacatattagaggggaaaagctgaacactgaagtcagttctcaacaatttagaaggaaaacctagaaaacatttggcagaaaattacatttcgatgtttttgaatgaatacgagcaagcttttacaacagtgctgatctaaaaatacttagcacttggcctgagatgcctggtgagcattacaggcaaggggaatctggaggtagccgacctgaggacatggcttctgaacctgtcttttgggagtggtatggaaggtggagcgttcaccagtgacctggaaggcccagcaccaccctccttcccactcttctcatcttgacagagcctgccccagcgctgacgtgtcaggaaaacacccagggaactaggaaggcacttctgcctgaggggcagcctgccttgcccactcctgctctgctcgcctcggatcagctgagccttctgagctggcctctcactgcctccccaaggccccctgcctgccctgtcaggaggcagaaggaagcaggtgtgagggcagtgcaaggagggagcacaacccccagctcccgctccgggctccgacttgtgcacaggcagagcccagaccctggaggaaatcctacctttgaattcaagaacatttggggaatttggaaatctctttgcccccaaacccccattctgtcctacctttaatcaggtcctgctcagcagtgagagcagatgaggtgaaaaggccaagaggtttggctcctgcccactgatagcccctctccccgcagtgtttgtgtgtcaagtggcaaagctgttcttcctggtgaccctgattatatccagtaacacatagactgtgcgcataggcctgctttgtctcctctatcctgggcttttgttttgctttttagttttgcttttagtttttctgtcccttttatttaacgcaccgactagacacacaaagcagttgaatttttatatatatatctgtatattgcacaattataaactcattttgcttgtggctccacacacacaaaaaaagacctgttaaaattatacctgttgcttaattacaatatttctgataaccatagcataggacaagggaaaataaaaaaagaaaaaaaagaaaaaaaaacgacaaatctgtctgctggtcacttcttctgtccaagcagattcgtggtcttttcctcgcttctttcaagggctttcctgtgccaggtgaaggaggctccaggcagcacccaggttttgcactcttgtttctcccgtgcttgtgaaagaggtcccaaggttctgggtgcaggagcgctcccttgacctgctgaagtccggaacgtagtcggcacagcctggtcgccttccacctctgggagctggagtccactggggtggcctgactcccccagtccccttcccgtgacctggtcagggtgagcccatgtggagtcagcctcgcaggcctccctgccagtagggtccgagtgtgtttcatccttcccactctgtcgagcctgggggctggagcggagacgggaggcctggcctgtctcggaacctgtgagctgcaccaggtagaacgccagggaccccagaatcatgtgcgtcagtccaaggggtcccctccaggagtagtgaagactccagaaatgtccctttcttctcccccatcctacgagtaattgcatttgcttttgtaattcttaatgagcaatatctgctagagagtttagctgtaacagttctttttgatcatctttttttaataattagaaacaccaaaaaaatccagaaacttgttcttccaaagcagagagcattataatcaccagggccaaaagcttccctccctgctgtcattgcttcttctgaggcctgaatccaaaagaaaaacagccataggccctttcagtggccgggctacccgtgagcccttcggaggaccagggctggggcagcctctgggcccacatccggggccagctccggcgtgtgttcagtgttagcagtgggtcatgatgctctttcccacccagcctgggataggggcagaggaggcgaggaggccgttgccgctgatgtttggccgtgaacaggtgggtgtctgcgtgcgtccacgtgcgtgttttctgactgacatgaaatcgacgcccgagttagcctcacccggtgacctctagccctgcccggatggagcggggcccacccggttcagtgtttctggggagctggacagtggagtgcaaaaggcttgcagaacttgaagcctgctccttcccttgctaccacggcctcctttccgtttgatttgtcactgcttcaatcaataacagccgctccagagtcagtagtcaatgaatatatgaccaaatatcaccaggactgttactcaatgtgtgccgagcccttgcccatgctgggctcccgtgtatctggacactgtaacgtgtgctgtgtttgctccccttccccttccttctttgccctttacttgtctttctggggtttttctgtttgggtttggtttggtttttatttctccttttgtgttccaaacatgaggttctctctactggtcctcttaactgtggtgttgaggcttatatttgtgtaatttttggtgggtgaaaggaattttgctaagtaaatctcttctgtgtttgaactgaagtctgtattgtaactatgtttaaagtaattgttccagagacaaatatttctagacactttttctttacaaacaaaagcattcggagggagggggatggtgactgagatgagaggggagagctgaacagatgacccctgcccagatcagccagaagccacccaaagcagtggagcccaggagtcccactccaagccagcaagccgaatagctgatgtgttgccactttccaagtcactgcaaaaccaggttttgttccgcccagtggattcttgttttgcttcccctccccccgagattattaccaccatcccgtgcttttaaggaaaggcaagattgatgtttccttgaggggagccaggaggggatgtgtgtgtgcagagctgaagagctggggagaatggggctgggcccacccaagcaggaggctgggacgctctgctgtgggcacaggtcaggctaatgttggcagatgcagctcttcctggacaggccaggtggtgggcattctctctccaaggtgtgccccgtgggcattactgtttaagacacttccgtcacatcccaccccatcctccagggctcaacactgtgacatctctattccccaccctccccttcccagggcaataaaatgaccatggagggggcttgcactctcttggctgtcacccgatcgccagcaaaacttagatgtgagaaaaccccttcccattccatggcgaaaacatctccttagaaaagccattaccctcattaggcatggttttgggctcccaaaacacctgacagcccctccctcctctgagaggcggagagtgctgactgtagtgaccattgcatgccgggtgcagcatctggaagagctaggcagggtgtctgccccctcctgagttgaagtcatgctcccctgtgccagcccagaggccgagagctatggacagcattgccagtaacacaggccaccctgtgcagaagggagctggctccagcctggaaacctgtctgaggttgggagaggtgcacttggggcacagggagaggccgggacacacttagctggagatgtctctaaaagccctgtatcgtattcaccttcagtttttgtgttttgggacaattactttagaaaataagtaggtcgttttaaaaacaaaaattattgattgcttttttgtagtgttcagaaaaaaggttctttgtgtatagccaaatgactgaaagcactgatatatttaaaaacaaaaggcaatttattaaggaaatttgtaccatttcagtaaacctgtctgaatgtacctgtatacgtttcaaaaacaccccccccccactgaatccctgtaacctatttattatataaagagtttgccttataaattt

SEQ ID NO: 1282 - protein, 486 aa, Homo sapiens
MVAGMLGLREEKSEDQDLQGLKDKPLKFKKVKKDKKEEKEGKHEPVQPSAHHSAEPAEAGKAETSEGSGSAPAVPEASASPKQRRSIIRDRGPMYDDPTLPEGWTRKLKQRKSGRSAGKYDVYLINPQGKAFRSKVELIAYFEKVGDTSLDPNDFDFTVTGRGSPSRREQKPPKKPKSPKAPGTGRGRGRPKGSGTTRPKAATSEGVQVKRVLEKSPGKLLVKMPFQTSPGGKAEGGGATTSTQVMVIKRPGRKRKAEADPQAIPKKRGRKPGSVVAAAAAEAKKKAVKESSIRSVQETVLPIKKRKTRETVSIEVKEVVKPLLVSTLGEKSGKGLKTCKSPGRKSKESSPKGRSSSASSPPKKEHHHHHHHSESPKAPVPLLPPLPPPPPEPESSEDPTSPPEPQDLSSSVCKEEKMPRGGSLESDGCPKEPAKTQPAVATAATAAEKYKHRGEGERKDIVSSSMPRPNREEPVDSRTPVTERVS

SEQ ID NO: 1283 - DNA, 1379 bp, Homo sapiens
agaggcggacaagatggcggcggcagctgtacagggcgggagaagcggtggtagcggaggctgtagtggggctggtggtgcttccaactgcgggacaggaagtggccgtagcggcttgttggataagtggaagatagatgataagcctgtaaaaattgacaagtgggatggatcagctgtgaaaaactctttggatgattctgccaaaaaggtacttctggaaaaatacaaatatgtggagaattttggtctaattgatggtcgcctcaccatctgtacaatctcctgtttctttgccatagtggctttgatttgggattatatgcacccctttccagagtccaaacccgttttggctttgtgtgtcatatcatatcctttatttatgctcaggttgttttctatttatatagagaagagcatctttctcgtggcccacaggaaagatcctacaggaatggatcctgatgatatttggcagctgtcctccagtcttaaaaggtttgatgacaaatacaccttgaagctgaccttcatcagtgggagaacaaagcagcagcgggaagccgagttcacaaagtccattgctaagttttttgaccacagtgggacactggtcatggatgcatatgagcctgaaatatccaggctccatgacagtcttgccatagaaagaaaaataaagtagccaattctaaaagtagccctctttctcctggatcttgctgaattagtggcttggggggtgggggagataaaaagaacttaaaatgggtaaagtaagaaatgttaaaaagtccctgttttgtcctgaaattttagtctattctgggtaaataggattttctgacacagatatgagaagttgtagctctgatgtctagctgtagtctccttgatctgctgattgcattattttaatttgcttttctgggaaagcagttttgctaaaagctgtacagactttttcttttgtacctagcagtactttatatagtatagctttgggccatgtagcattttaagactcaattttaaaaaattattaatctgttgctgactcttaattcctatttcaatatgtgtttccttgaagaattcaggatacaacttcttgtgtatgacagctttccttcacacactatttttgtgggtgtgtatatatctgatttgggaagaatttaaaaaacacatagctttttaatttgtttgaaacagactttctgcctgttacatttttgcttttaaccaattaaagaagccaatggcattttagttttatattgtgttttccactagtatatccctgttgatttgtttgtgccttttattaactgccattttctaaaatttttttcaataaaaggaaggaagatgtg

SEQ ID NO: 1284 - protein, 224 aa, Homo sapiens
MAAAAVQGGRSGGSGGCSGAGGASNCGTGSGRSGLLDKWKIDDKPVKIDKWDGSAVKNSLDDSAKKVLLEKYKYVENFGLIDGRLTICTISCFFAIVALIWDYMHPFPESKPVLALCVISYPLFMLRLFSIYIEKSIFLVAHRKDPTGMDPDDIWQLSSSLKRFDDKYTLKLTFISGRTKQQREAEFTKSIAKFFDHSGTLVMDAYEPEISRLHDSLAIERKIK

SEQ ID NO: 1285 - DNA, 2174 bp, Homo sapiens
agatcacttgagatcaggactgaagaagcaggcattggagacacccccagcctggaagacgaagctgctggtcacgtgacccaagctcgcatggtcagtaaaagcaaagacgggactggaagcgatgacaaaaaagccaagggggctgatggtaaaacgaagatcgccacaccgcggggagcagcccctccaggccagaagggccaggccaacgccaccaggattccagcaaaaaccccgcccgctccaaagacaccacccagctctggtgaacctccaaaatcaggggatcgcagcggctacagcagccccggctccccaggcactcccggcagccgctcccgcaccccgtcccttccaaccccacccacccgggagcccaagaaggtggcagtggtccgtactccacccaagtcgccgtcttccgccaagagccgcctgcagacagcccccgtgcccatgccagacctgaagaatgtcaagtccaagatcggctccactgagaacctgaagcaccagccgggaggcgggaaggtgcaaatagtctacaaaccagttgacctgagcaaggtgacctccaagtgtggctcattaggcaacatccatcataaaccaggaggtggccaggtggaagtaaaatctgagaagcttgacttcaaggacagagtccagtcgaagattgggtccctggacaatatcacccacgtccctggcggaggaaataaaaagattgaaacccacaagctgaccttccgcgagaacgccaaagccaagacagaccacggggcggagatcgtgtacaagtcgccagtggtgtctggggacacgtctccacggcatctcagcaatgtctcctccaccggcagcatcgacatggtagactcgccccagctcgccacgctagctgacgaggtgtctgcctccctggccaagcagggtttgtgatcaggcccctggggcggtcaataattgtggagaggagagaatgagagagtgtggaaaaaaaaagaataatgacccggcccccgccctctgcccccagctgctcctcgcagttcggttaattggttaatcacttaacctgcttttgtcactcggctttggctcgggacttcaaaatcagtgatgggagtaagagcaaatttcatctttccaaattgatgggtgggctagtaataaaatatttaaaaaaaaacattcaaaaacatggccacatccaacatttcctcaggcaattccttttgattcttttttcttccccctccatgtagaagagggagaaggagaggctctgaaagctgcttctgggggatttcaagggactgggggtgccaaccacctctggccctgttgtgggggtgtcacagaggcagtggcagcaacaaaggatttgaaacttggtgtgttcgtggagccacaggcagacgatgtcaaccttgtgtgagtgtgacgggggttggggtggggcgggaggccacgggggaggccgaggcaggggctgggcagaggggagaggaagcacaagaagtgggagtgggagaggaagccacgtgctggagagtagacatccccctccttgccgctgggagagccaaggcctatgccacctgcagcgtctgagcggccgcctgtccttggtggccgggggtgggggcctgctgtgggtcagtgtgccaccctctgcagggcagcctgtgggagaagggacagcgggtaaaaagagaaggcaagctggcaggagggtggcacttcgtggatgacctccttagaaaagactgaccttgatgtcttgagagcgctggcctcttcctccctccctgcagggtagggggcctgagttgaggggcttccctctgctccacagaaaccctgttttattgagttctgaaggttggaactgctgccatgattttggccactttgcagacctgggactttagggctaaccagttctctttgtaaggacttgtgcctcttgggagacgtccacccgtttccaagcctgggccactggcatctctggagtgtgtgggggtctgggaggcaggtcccgagccccctgtccttcccacggccactgcagtcacccctgtctgcgccgctgtgctgttgtctgccgtgagagcccaatcactgcctatacccctcatcacacgtcacaatgtcccgaattc

SEQ ID NO: 1286 - protein, 314 aa, Homo sapiens
RSLEIRTEEAGIGDTPSLEDEAAGHVTQARMVSKSKDGTGSDDKKAKGADGKTKIATPRGAAPPGQKGQANATRIPAKTPPAPKTPPSSGEPPKSGDRSGYSSPGSPGTPGSRSRTPSLPTPPTREPKKVAVVRTPPKSPSSAKSRLQTAPVPMPDLKNVKSKIGSTENLKHQPGGGKVQIVYKPVDLSKVTSKCGSLGNIHHKPGGGQVEVKSEKLDFKDRVQSKIGSLDNITHVPGGGNKKIETHKLTFRENAKAKTDHGAEIVYKSPVVSGDTSPRHLSNVSSTGSIDMVDSPQLATLADEVSASLAKQGL

SEQ ID NO: 1287 - DNA, 2308 bp, Homo sapiens
caggtgaactttgaaccaggatggctgagccccgccaggagttcgaagtgatggaagatcacgctgggacgtacgggttgggggacaggaaagatcaggggggctacaccatgcaccaagaccaagagggtgacacggacgctggcctgaaagctgaagaagcaggcattggagacacccccagcctggaagacgaagctgctggtcacgtgacccaagctcgcatggtcagtaaaagcaaagacgggactggaagcgatgacaaaaaagccaagggggctgatggtaaaacgaagatcgccacaccgcggggagcagcccctccaggccagaagggccaggccaacgccaccaggattccagcaaaaaccccgcccgctccaaagacaccacccagctctggtgaacctccaaaatcaggggatcgcagcggctacagcagccccggctccccaggcactcccggcagccgctcccgcaccccgtcccttccaaccccacccacccgggagcccaagaaggtggcagtggtccgtactccacccaagtcgccgtcttccgccaagagccgcctgcagacagcccccgtgcccatgccagacctgaagaatgtcaagtccaagatcggctccactgagaacctgaagcaccagccgggaggcgggaaggtgcaaatagtctacaaaccagttgacctgagcaaggtgacctccaagtgtggctcattaggcaacatccatcataaaccaggaggtggccaggtggaagtaaaatctgagaagcttgacttcaaggacagagtccagtcgaagattgggtccctggacaatatcacccacgtccctggcggaggaaataaaaagattgaaacccacaagctgaccttccgcgagaacgccaaagccaagacagaccacggggcggagatcgtgtacaagtcgccagtggtgtctggggacacgtctccacggcatctcagcaatgtctcctccaccggcagcatcgacatggtagactcgccccagctcgccacgctagctgacgaggtgtctgcctccctggccaagcagggtttgtgatcaggcccctggggcggtcaataattgtggagaggagagaatgagagagtgtggaaaaaaaaagaataatgacccggcccccgccctctgcccccagctgctcctcgcagttcggttaattggttaatcacttaacctgcttttgtcactcggctttggctcgggacttcaaaatcagtgatgggagtaagagcaaatttcatctttccaaattgatgggtgggctagtaataaaatatttaaaaaaaaacattcaaaaacatggccacatccaacatttcctcaggcaattccttttgattcttttttcttccccctccatgtagaagagggagaaggagaggctctgaaagctgcttctgggggatttcaagggactgggggtgccaaccacctctggccctgttgtgggggtgtcacagaggcagtggcagcaacaaaggatttgaaacttggtgtgttcgtggagccacaggcagacgatgtcaaccttgtgtgagtgtgacgggggttggggtggggcgggaggccacgggggaggccgaggcaggggctgggcagaggggagaggaagcacaagaagtgggagtgggagaggaagccacgtgctggagagtagacatccccctccttgccgctgggagagccaaggcctatgccacctgcagcgtctgagcggccgcctgtccttggtggccgggggtgggggcctgctgtgggtcagtgtgccaccctctgcagggcagcctgtgggagaagggacagcgggtaaaaagagaaggcaagctggcaggagggtggcacttcgtggatgacctccttagaaaagactgaccttgatgtcttgagagcgctggcctcttcctccctccctgcagggtagggggcctgagttgaggggcttccctctgctccacagaaaccctgttttattgagttctgaaggttggaactgctgccatgattttggccactttgcagacctgggactttagggctaaccagttctctttgtaaggacttgtgcctcttgggagacgtccacccgtttccaagcctgggccactggcatctctggagtgtgtgggggtctgggaggcaggtcccgagccccctgtccttcccacggccactgcagtcacccctgtctgcgccgctgtgctgttgtctgccgtgagagcccaatcactgcctatacccctcatcacacgtcacaatgtcccgaattc

SEQ ID NO: 1288 - protein, 352 aa, Homo sapiens
MAEPRQEFEVMEDHAGTYGLGDRKDQGGYTMHQDQEGDTDAGLKAEEAGIGDTPSLEDEAAGHVTQARMVSKSKDGTGSDDKKAKGADGKTKIATPRGAAPPGQKGQANATRIPAKTPPAPKTPPSSGEPPKSGDRSGYSSPGSPGTPGSRSRTPSLPTPPTREPKKVAVVRTPPKSPSSAKSRLQTAPVPMPDLKNVKSKIGSTENLKHQPGGGKVQIVYKPVDLSKVTSKCGSLGNIHHKPGGGQVEVKSEKLDFKDRVQSKIGSLDNITHVPGGGNKKIETHKLTFRENAKAKTDHGAEIVYKSPVVSGDTSPRHLSNVSSTGSIDMVDSPQLATLADEVSASLAKQGL

SEQ ID NO: 1289 - DNA, 2401 bp, Homo sapiens
caggtgaactttgaaccaggatggctgagccccgccaggagttcgaagtgatggaagatcacgctgggacgtacgggttgggggacaggaaagatcaggggggctacaccatgcaccaagaccaagagggtgacacggacgctggcctgaaagctgaagaagcaggcattggagacacccccagcctggaagacgaagctgctggtcacgtgacccaagctcgcatggtcagtaaaagcaaagacgggactggaagcgatgacaaaaaagccaagggggctgatggtaaaacgaagatcgccacaccgcggggagcagcccctccaggccagaagggccaggccaacgccaccaggattccagcaaaaaccccgcccgctccaaagacaccacccagctctggtgaacctccaaaatcaggggatcgcagcggctacagcagccccggctccccaggcactcccggcagccgctcccgcaccccgtcccttccaaccccacccacccgggagcccaagaaggtggcagtggtccgtactccacccaagtcgccgtcttccgccaagagccgcctgcagacagcccccgtgcccatgccagacctgaagaatgtcaagtccaagatcggctccactgagaacctgaagcaccagccgggaggcgggaaggtgcagataattaataagaagctggatcttagcaacgtccagtccaagtgtggctcaaaggataatatcaaacacgtcccgggaggcggcagtgtgcaaatagtctacaaaccagttgacctgagcaaggtgacctccaagtgtggctcattaggcaacatccatcataaaccaggaggtggccaggtggaagtaaaatctgagaagcttgacttcaaggacagagtccagtcgaagattgggtccctggacaatatcacccacgtccctggcggaggaaataaaaagattgaaacccacaagctgaccttccgcgagaacgccaaagccaagacagaccacggggcggagatcgtgtacaagtcgccagtggtgtctggggacacgtctccacggcatctcagcaatgtctcctccaccggcagcatcgacatggtagactcgccccagctcgccacgctagctgacgaggtgtctgcctccctggccaagcagggtttgtgatcaggcccctggggcggtcaataattgtggagaggagagaatgagagagtgtggaaaaaaaaagaataatgacccggcccccgccctctgcccccagctgctcctcgcagttcggttaattggttaatcacttaacctgcttttgtcactcggctttggctcgggacttcaaaatcagtgatgggagtaagagcaaatttcatctttccaaattgatgggtgggctagtaataaaatatttaaaaaaaaacattcaaaaacatggccacatccaacatttcctcaggcaattccttttgattcttttttcttccccctccatgtagaagagggagaaggagaggctctgaaagctgcttctgggggatttcaagggactgggggtgccaaccacctctggccctgttgtgggggtgtcacagaggcagtggcagcaacaaaggatttgaaacttggtgtgttcgtggagccacaggcagacgatgtcaaccttgtgtgagtgtgacgggggttggggtggggcgggaggccacgggggaggccgaggcaggggctgggcagaggggagaggaagcacaagaagtgggagtgggagaggaagccacgtgctggagagtagacatccccctccttgccgctgggagagccaaggcctatgccacctgcagcgtctgagcggccgcctgtccttggtggccgggggtgggggcctgctgtgggtcagtgtgccaccctctgcagggcagcctgtgggagaagggacagcgggtaaaaagagaaggcaagctggcaggagggtggcacttcgtggatgacctccttagaaaagactgaccttgatgtcttgagagcgctggcctcttcctccctccctgcagggtagggggcctgagttgaggggcttccctctgctccacagaaaccctgttttattgagttctgaaggttggaactgctgccatgattttggccactttgcagacctgggactttagggctaaccagttctctttgtaaggacttgtgcctcttgggagacgtccacccgtttccaagcctgggccactggcatctctggagtgtgtgggggtctgggaggcaggtcccgagccccctgtccttcccacggccactgcagtcacccctgtctgcgccgctgtgctgttgtctgccgtgagagcccaatcactgcctatacccctcatcacacgtcacaatgtcccgaattc

SEQ ID NO: 1290 - protein, 383 aa, Homo sapiens
MAEPRQEFEVMEDHAGTYGLGDRKDQGGYTMHQDQEGDTDAGLKAEEAGIGDTPSLEDEAAGHVTQARMVSKSKDGTGSDDKKAKGADGKTKIATPRGAAPPGQKGQANATRIPAKTPPAPKTPPSSGEPPKSGDRSGYSSPGSPGTPGSRSRTPSLPTPPTREPKKVAVVRTPPKSPSSAKSRLQTAPVPMPDLKNVKSKIGSTENLKHQPGGGKVQIINKKLDLSNVQSKCGSKDNIKHVPGGGSVQIVYKPVDLSKVTSKCGSLGNIHHKPGGGQVEVKSEKLDFKDRVQSKIGSLDNITHVPGGGNKKIETHKLTFRENAKAKTDHGAEIVYKSPVVSGDTSPRHLSNVSSTGSIDMVDSPQLATLADEVSASLAKQGL

SEQ ID NO: 1291 - DNA, 3526 bp, Homo sapiens
caggtgaactttgaaccaggatggctgagccccgccaggagttcgaagtgatggaagatcacgctgggacgtacgggttgggggacaggaaagatcaggggggctacaccatgcaccaagaccaagagggtgacacggacgctggcctgaaagaatctcccctgcagacccccactgaggacggatctgaggaaccgggctctgaaacctctgatgctaagagcactccaacagcggaagatgtgacagcacccttagtggatgagggagctcccggcaagcaggctgccgcgcagccccacacggagatcccagaaggaaccacagctgaagaagcaggcattggagacacccccagcctggaagacgaagctgctggtcacgtgacccaagagcctgaaagtggtaaggtggtccaggaaggcttcctccgagagccaggccccccaggtctgagccaccagctcatgtccggcatgcctggggctcccctcctgcctgagggccccagagaggccacacgccaaccttcggggacaggacctgaggacacagagggcggccgccacgcccctgagctgctcaagcaccagcttctaggagacctgcaccaggaggggccgccgctgaagggggcagggggcaaagagaggccggggagcaaggaggaggtggatgaagaccgcgacgtcgatgagtcctccccccaagactcccctccctccaaggcctccccagcccaagatgggcggcctccccagacagccgccagagaagccaccagcatcccaggcttcccagcggagggtgccatccccctccctgtggatttcctctccaaagtttccacagagatcccagcctcagagcccgacgggcccagtgtagggcgggccaaagggcaggatgcccccctggagttcacgtttcacgtggaaatcacacccaacgtgcagaaggagcaggcgcactcggaggagcatttgggaagggctgcatttccaggggcccctggagaggggccagaggcccggggcccctctttgggagaggacacaaaagaggctgaccttccagagccctctgaaaagcagcctgctgctgctccgcgggggaagcccgtcagccgggtccctcaactcaaagctcgcatggtcagtaaaagcaaagacgggactggaagcgatgacaaaaaagccaagacatccacacgttcctctgctaaaaccttgaaaaataggccttgccttagccccaaacaccccactcctggtagctcagaccctctgatccaaccctccagccctgctgtgtgcccagagccaccttcctctcctaaacacgtctcttctgtcacttcccgaactggcagttctggagcaaaggagatgaaactcaagggggctgatggtaaaacgaagatcgccacaccgcggggagcagcccctccaggccagaagggccaggccaacgccaccaggattccagcaaaaaccccgcccgctccaaagacaccacccagctctggtgaacctccaaaatcaggggatcgcagcggctacagcagccccggctccccaggcactcccggcagccgctcccgcaccccgtcccttccaaccccacccacccgggagcccaagaaggtggcagtggtccgtactccacccaagtcgccgtcttccgccaagagccgcctgcagacagcccccgtgcccatgccagacctgaagaatgtcaagtccaagatcggctccactgagaacctgaagcaccagccgggaggcgggaaggtgcagataattaataagaagctggatcttagcaacgtccagtccaagtgtggctcaaaggataatatcaaacacgtcccgggaggcggcagtgtgcaaatagtctacaaaccagttgacctgagcaaggtgacctccaagtgtggctcattaggcaacatccatcataaaccaggaggtggccaggtggaagtaaaatctgagaagcttgacttcaaggacagagtccagtcgaagattgggtccctggacaatatcacccacgtccctggcggaggaaataaaaagattgaaacccacaagctgaccttccgcgagaacgccaaagccaagacagaccacggggcggagatcgtgtacaagtcgccagtggtgtctggggacacgtctccacggcatctcagcaatgtctcctccaccggcagcatcgacatggtagactcgccccagctcgccacgctagctgacgaggtgtctgcctccctggccaagcagggtttgtgatcaggcccctggggcggtcaataattgtggagaggagagaatgagagagtgtggaaaaaaaaagaataatgacccggcccccgccctctgcccccagctgctcctcgcagttcggttaattggttaatcacttaacctgcttttgtcactcggctttggctcgggacttcaaaatcagtgatgggagtaagagcaaatttcatctttccaaattgatgggtgggctagtaataaaatatttaaaaaaaaacattcaaaaacatggccacatccaacatttcctcaggcaattccttttgattcttttttcttccccctccatgtagaagagggagaaggagaggctctgaaagctgcttctgggggatttcaagggactgggggtgccaaccacctctggccctgttgtgggggtgtcacagaggcagtggcagcaacaaaggatttgaaacttggtgtgttcgtggagccacaggcagacgatgtcaaccttgtgtgagtgtgacgggggttggggtggggcgggaggccacgggggaggccgaggcaggggctgggcagaggggagaggaagcacaagaagtgggagtgggagaggaagccacgtgctggagagtagacatccccctccttgccgctgggagagccaaggcctatgccacctgcagcgtctgagcggccgcctgtccttggtggccgggggtgggggcctgctgtgggtcagtgtgccaccctctgcagggcagcctgtgggagaagggacagcgggtaaaaagagaaggcaagctggcaggagggtggcacttcgtggatgacctccttagaaaagactgaccttgatgtcttgagagcgctggcctcttcctccctccctgcagggtagggggcctgagttgaggggcttccctctgctccacagaaaccctgttttattgagttctgaaggttggaactgctgccatgattttggccactttgcagacctgggactttagggctaaccagttctctttgtaaggacttgtgcctcttgggagacgtccacccgtttccaagcctgggccactggcatctctggagtgtgtgggggtctgggaggcaggtcccgagccccctgtccttcccacggccactgcagtcacccctgtctgcgccgctgtgctgttgtctgccgtgagagcccaatcactgcctatacccctcatcacacgtcacaatgtcccgaattc

SEQ ID NO: 1292 - protein, 758 aa, Homo sapiens
MAEPRQEFEVMEDHAGTYGLGDRKDQGGYTMHQDQEGDTDAGLKESPLQTPTEDGSEEPGSETSDAKSTPTAEDVTAPLVDEGAPGKQAAAQPHTEIPEGTTAEEAGIGDTPSLEDEAAGHVTQEPESGKVVQEGFLREPGPPGLSHQLMSGMPGAPLLPEGPREATRQPSGTGPEDTEGGRHAPELLKHQLLGDLHQEGPPLKGAGGKERPGSKEEVDEDRDVDESSPQDSPPSKASPAQDGRPPQTAAREATSIPGFPAEGAIPLPVDFLSKVSTEIPASEPDGPSVGRAKGQDAPLEFTFHVEITPNVQKEQAHSEEHLGRAAFPGAPGEGPEARGPSLGEDTKEADLPEPSEKQPAAAPRGKPVSRVPQLKARMVSKSKDGTGSDDKKAKTSTRSSAKTLKNRPCLSPKHPTPGSSDPLIQPSSPAVCPEPPSSPKHVSSVTSRTGSSGAKEMKLKGADGKTKIATPRGAAPPGQKGQANATRIPAKTPPAPKTPPSSGEPPKSGDRSGYSSPGSPGTPGSRSRTPSLPTPPTREPKKVAVVRTPPKSPSSAKSRLQTAPVPMPDLKNVKSKIGSTENLKHQPGGGKVQIINKKLDLSNVQSKCGSKDNIKHVPGGGSVQIVYKPVDLSKVTSKCGSLGNIHHKPGGGQVEVKSEKLDFKDRVQSKIGSLDNITHVPGGGNKKIETHKLTFRENAKAKTDHGAEIVYKSPVVSGDTSPRHLSNVSSTGSIDMVDSPQLATLADEVSASLAKQGL

SEQ ID NO: 1293 - DNA, 2575 bp, Homo sapiens
caggtgaactttgaaccaggatggctgagccccgccaggagttcgaagtgatggaagatcacgctgggacgtacgggttgggggacaggaaagatcaggggggctacaccatgcaccaagaccaagagggtgacacggacgctggcctgaaagaatctcccctgcagacccccactgaggacggatctgaggaaccgggctctgaaacctctgatgctaagagcactccaacagcggaagatgtgacagcacccttagtggatgagggagctcccggcaagcaggctgccgcgcagccccacacggagatcccagaaggaaccacagctgaagaagcaggcattggagacacccccagcctggaagacgaagctgctggtcacgtgacccaagctcgcatggtcagtaaaagcaaagacgggactggaagcgatgacaaaaaagccaagggggctgatggtaaaacgaagatcgccacaccgcggggagcagcccctccaggccagaagggccaggccaacgccaccaggattccagcaaaaaccccgcccgctccaaagacaccacccagctctggtgaacctccaaaatcaggggatcgcagcggctacagcagccccggctccccaggcactcccggcagccgctcccgcaccccgtcccttccaaccccacccacccgggagcccaagaaggtggcagtggtccgtactccacccaagtcgccgtcttccgccaagagccgcctgcagacagcccccgtgcccatgccagacctgaagaatgtcaagtccaagatcggctccactgagaacctgaagcaccagccgggaggcgggaaggtgcagataattaataagaagctggatcttagcaacgtccagtccaagtgtggctcaaaggataatatcaaacacgtcccgggaggcggcagtgtgcaaatagtctacaaaccagttgacctgagcaaggtgacctccaagtgtggctcattaggcaacatccatcataaaccaggaggtggccaggtggaagtaaaatctgagaagcttgacttcaaggacagagtccagtcgaagattgggtccctggacaatatcacccacgtccctggcggaggaaataaaaagattgaaacccacaagctgaccttccgcgagaacgccaaagccaagacagaccacggggcggagatcgtgtacaagtcgccagtggtgtctggggacacgtctccacggcatctcagcaatgtctcctccaccggcagcatcgacatggtagactcgccccagctcgccacgctagctgacgaggtgtctgcctccctggccaagcagggtttgtgatcaggcccctggggcggtcaataattgtggagaggagagaatgagagagtgtggaaaaaaaaagaataatgacccggcccccgccctctgcccccagctgctcctcgcagttcggttaattggttaatcacttaacctgcttttgtcactcggctttggctcgggacttcaaaatcagtgatgggagtaagagcaaatttcatctttccaaattgatgggtgggctagtaataaaatatttaaaaaaaaacattcaaaaacatggccacatccaacatttcctcaggcaattccttttgattcttttttcttccccctccatgtagaagagggagaaggagaggctctgaaagctgcttctgggggatttcaagggactgggggtgccaaccacctctggccctgttgtgggggtgtcacagaggcagtggcagcaacaaaggatttgaaacttggtgtgttcgtggagccacaggcagacgatgtcaaccttgtgtgagtgtgacgggggttggggtggggcgggaggccacgggggaggccgaggcaggggctgggcagaggggagaggaagcacaagaagtgggagtgggagaggaagccacgtgctggagagtagacatccccctccttgccgctgggagagccaaggcctatgccacctgcagcgtctgagcggccgcctgtccttggtggccgggggtgggggcctgctgtgggtcagtgtgccaccctctgcagggcagcctgtgggagaagggacagcgggtaaaaagagaaggcaagctggcaggagggtggcacttcgtggatgacctccttagaaaagactgaccttgatgtcttgagagcgctggcctcttcctccctccctgcagggtagggggcctgagttgaggggcttccctctgctccacagaaaccctgttttattgagttctgaaggttggaactgctgccatgattttggccactttgcagacctgggactttagggctaaccagttctctttgtaaggacttgtgcctcttgggagacgtccacccgtttccaagcctgggccactggcatctctggagtgtgtgggggtctgggaggcaggtcccgagccccctgtccttcccacggccactgcagtcacccctgtctgcgccgctgtgctgttgtctgccgtgagagcccaatcactgcctatacccctcatcacacgtcacaatgtcccgaattc

SEQ ID NO: 1294 - protein, 441 aa, Homo sapiens
MAEPRQEFEVMEDHAGTYGLGDRKDQGGYTMHQDQEGDTDAGLKESPLQTPTEDGSEEPGSETSDAKSTPTAEDVTAPLVDEGAPGKQAAAQPHTEIPEGTTAEEAGIGDTPSLEDEAAGHVTQARMVSKSKDGTGSDDKKAKGADGKTKIATPRGAAPPGQKGQANATRIPAKTPPAPKTPPSSGEPPKSGDRSGYSSPGSPGTPGSRSRTPSLPTPPTREPKKVAVVRTPPKSPSSAKSRLQTAPVPMPDLKNVKSKIGSTENLKHQPGGGKVQIINKKLDLSNVQSKCGSKDNIKHVPGGGSVQIVYKPVDLSKVTSKCGSLGNIHHKPGGGQVEVKSEKLDFKDRVQSKIGSLDNITHVPGGGNKKIETHKLTFRENAKAKTDHGAEIVYKSPVVSGDTSPRHLSNVSSTGSIDMVDSPQLATLADEVSASLAKQGL

SEQ ID NO: 1295 - DNA, 1239 bp, Homo sapiens
atggctgagccccgccaggagttcgaagtgatggaagatcacgctgggacgtacgggttgggggacaggaaagatcaggggggctacaccatgcaccaagaccaagagggtgacacggacgctggcctgaaagaatctcccctgcagacccccactgaggacggatctgaggaaccgggctctgaaacctctgatgctaagagcactccaacagcggaagctgaagaagcaggcattggagacacccccagcctggaagacgaagctgctggtcacgtgacccaagctcgcatggtcagtaaaagcaaagacgggactggaagcgatgacaaaaaagccaagggggctgatggtaaaacgaagatcgccacaccgcggggagcagcccctccaggccagaagggccaggccaacgccaccaggattccagcaaaaaccccgcccgctccaaagacaccacccagctctggtgaacctccaaaatcaggggatcgcagcggctacagcagccccggctccccaggcactcccggcagccgctcccgcaccccgtcccttccaaccccacccacccgggagcccaagaaggtggcagtggtccgtactccacccaagtcgccgtcttccgccaagagccgcctgcagacagcccccgtgcccatgccagacctgaagaatgtcaagtccaagatcggctccactgagaacctgaagcaccagccgggaggcgggaaggtgcagataattaataagaagctggatcttagcaacgtccagtccaagtgtggctcaaaggataatatcaaacacgtcccgggaggcggcagtgtgcaaatagtctacaaaccagttgacctgagcaaggtgacctccaagtgtggctcattaggcaacatccatcataaaccaggaggtggccaggtggaagtaaaatctgagaagcttgacttcaaggacagagtccagtcgaagattgggtccctggacaatatcacccacgtccctggcggaggaaataaaaagattgaaacccacaagctgaccttccgcgagaacgccaaagccaagacagaccacggggcggagatcgtgtacaagtcgccagtggtgtctggggacacgtctccacggcatctcagcaatgtctcctccaccggcagcatcgacatggtagactcgccccagctcgccacgctagctgacgaggtgtctgcctccctggccaagcagggtttgtga

SEQ ID NO: 1296 - protein, 412 aa, Homo sapiens
MAEPRQEFEVMEDHAGTYGLGDRKDQGGYTMHQDQEGDTDAGLKESPLQTPTEDGSEEPGSETSDAKSTPTAEAEEAGIGDTPSLEDEAAGHVTQARMVSKSKDGTGSDDKKAKGADGKTKIATPRGAAPPGQKGQANATRIPAKTPPAPKTPPSSGEPPKSGDRSGYSSPGSPGTPGSRSRTPSLPTPPTREPKKVAVVRTPPKSPSSAKSRLQTAPVPMPDLKNVKSKIGSTENLKHQPGGGKVQIINKKLDLSNVQSKCGSKDNIKHVPGGGSVQIVYKPVDLSKVTSKCGSLGNIHHKPGGGQVEVKSEKLDFKDRVQSKIGSLDNITHVPGGGNKKIETHKLTFRENAKAKTDHGAEIVYKSPVVSGDTSPRHLSNVSSTGSIDMVDSPQLATLADEVSASLAKQGL

SEQ ID NO: 1297 - DNA, 1233 bp, Homo sapiens
atggctgagccccgccaggagttcgaagtgatggaagatcacgctgggacgtacgggttgggggacaggaaagatcaggggggctacaccatgcaccaagaccaagagggtgacacggacgctggcctgaaagaatctcccctgcagacccccactgaggacggatctgaggaaccgggctctgaaacctctgatgctaagagcactccaacagcggaagatgtgacagcacccttagtggatgagggagctcccggcaagcaggctgccgcgcagccccacacggagatcccagaaggaaccacagctgaagaagcaggcattggagacacccccagcctggaagacgaagctgctggtcacgtgacccaagctcgcatggtcagtaaaagcaaagacgggactggaagcgatgacaaaaaagccaagggggctgatggtaaaacgaagatcgccacaccgcggggagcagcccctccaggccagaagggccaggccaacgccaccaggattccagcaaaaaccccgcccgctccaaagacaccacccagctctggtgaacctccaaaatcaggggatcgcagcggctacagcagccccggctccccaggcactcccggcagccgctcccgcaccccgtcccttccaaccccacccacccgggagcccaagaaggtggcagtggtccgtactccacccaagtcgccgtcttccgccaagagccgcctgcagacagcccccgtgcccatgccagacctgaagaatgtcaagtccaagatcggctccactgagaacctgaagcaccagccgggaggcgggaaggtgcaaatagtctacaaaccagttgacctgagcaaggtgacctccaagtgtggctcattaggcaacatccatcataaaccaggaggtggccaggtggaagtaaaatctgagaagcttgacttcaaggacagagtccagtcgaagattgggtccctggacaatatcacccacgtccctggcggaggaaataaaaagattgaaacccacaagctgaccttccgcgagaacgccaaagccaagacagaccacggggcggagatcgtgtacaagtcgccagtggtgtctggggacacgtctccacggcatctcagcaatgtctcctccaccggcagcatcgacatggtagactcgccccagctcgccacgctagctgacgaggtgtctgcctccctggccaagcagggtttgtga

SEQ ID NO: 1298 - protein, 410 aa, Homo sapiens
MAEPRQEFEVMEDHAGTYGLGDRKDQGGYTMHQDQEGDTDAGLKESPLQTPTEDGSEEPGSETSDAKSTPTAEDVTAPLVDEGAPGKQAAAQPHTEIPEGTTAEEAGIGDTPSLEDEAAGHVTQARMVSKSKDGTGSDDKKAKGADGKTKIATPRGAAPPGQKGQANATRIPAKTPPAPKTPPSSGEPPKSGDRSGYSSPGSPGTPGSRSRTPSLPTPPTREPKKVAVVRTPPKSPSSAKSRLQTAPVPMPDLKNVKSKIGSTENLKHQPGGGKVQIVYKPVDLSKVTSKCGSLGNIHHKPGGGQVEVKSEKLDFKDRVQSKIGSLDNITHVPGGGNKKIETHKLTFRENAKAKTDHGAEIVYKSPVVSGDTSPRHLSNVSSTGSIDMVDSPQLATLADEVSASLAKQGL

SEQ ID NO: 1299 - DNA, 1754 bp, Homo sapiens
gggagcgggagcgccccagcggccggcgggcgggcgggcgagcggacgagcggcgcggagccggcccgaggcgcgcgccgagggagccccgtccccggtcgtgggggcaccgcccgcaggctctgcggggtgggcagctcccgggcctgccatgagctctccgccgcccgcccgcagtggcttttaccgccaggaggtgaccaagacggcctgggaggtgcgcgccgtgtaccgggacctgcagcccgtgggctcgggcgcctacggcgcggtgtgctcggccgtggacggccgcaccggcgctaaggtggccatcaagaagctgtatcggcctttccagtccgagctgttcgccaagcgcgcctaccgcgagctgcgcctgctcaagcacatgcgccacgagaacgtgatcgggctgctggacgtattcactcctgatgagaccctggatgacttcacggacttttacctggtgatgccgttcatgggcaccgacctgggcaagctcatgaaacatgagaagctaggcgaggaccggatccagttcctcgtgtaccagatgctgaaggggctgaggtatatccacgctgccggcatcatccacagagacctgaagcccggcaacctggctgtgaacgaagactgtgagctgaagatcctggacttcggcctggccaggcaggcagacagtgagatgactgggtacgtggtgacccggtggtaccgggctcccgaggtcatcttgaattggatgcgctacacgcagacggtggacatctggtctgtgggctgcatcatggcggagatgatcacaggcaagacgctgttcaagggcagcgaccacctggaccagctgaaggagatcatgaaggtgacggggacgcctccggctgagtttgtgcagcggctgcagagcgatgaggccaagaactacatgaagggcctccccgaattggagaagaaggattttgcctctatcctgaccaatgcaagccctctggctgtgaacctcctggagaagatgctggtgctggacgcggagcagcgggtgacggcaggcgaggcgctggcccatccctacttcgagtccctgcacgacacggaagatgagccccaggtccagaagtatgatgactcctttgacgacgttgaccgcacactggatgaatggaagcgtgttacttacaaagaggtgctcagcttcaagcctccccggcagctgggggccagggtctccaaggagacgcctctgtgaagatctctgggctccggggtggcagtgaggaccaccttcaccttccacctgagaggggactctcgttgccaccttgaccttggctggggcttgcatcccaaggcatccatcagagcagacgcccgggttccatggaccctcctccccacggccatgcctctgctcttgggcgcccatcatggaggagcacctgaactttctggacaagacctctggccgacctggggatggcctctgatccctggagcagtggcccacttgcccggtgctctcagaaacctcagagctggtggggctccagatcaggccttggcctctgagccctgcctgctctgggccatgcagaggaaggacagagggtgggcgcagggcaccaactcagggacatcccctctcctgggcgacgtcagtggaccttcctgcacccccagcctggaatgtaaatcagctgtgtggtgcccgcgtggctggaaggaaatagacccttttgtagctccct

SEQ ID NO: 1300 - protein, 367 aa, Homo sapiens
MSSPPPARSGFYRQEVTKTAWEVRAVYRDLQPVGSGAYGAVCSAVDGRTGAKVAIKKLYRPFQSELFAKRAYRELRLLKHMRHENVIGLLDVFTPDETLDDFTDFYLVMPFMGTDLGKLMKHEKLGEDRIQFLVYQMLKGLRYIHAAGIIHRDLKPGNLAVNEDCELKILDFGLARQADSEMTGYVVTRWYRAPEVILNWMRYTQTVDIWSVGCIMAEMITGKTLFKGSDHLDQLKEIMKVTGTPPAEFVQRLQSDEAKNYMKGLPELEKKDFASILTNASPLAVNLLEKMLVLDAEQRVTAGEALAHPYFESLHDTEDEPQVQKYDDSFDDVDRTLDEWKRVTYKEVLSFKPPRQLGARVSKETPL

SEQ ID NO: 1301 - DNA, 1078 bp, Homo sapiens
atgcgaacacaagtatatgaggggttgtgtaaaaattatttttctcttgctgtactacaaagagatagaatcaaactgctttttttcgacatactggtttttctttctgtttttcttctctttcttctatttcttgtggatattatggctaataacacaacaagtttagggagtccatggccagaaaacttttgggaggaccttatcatgtccttcactgtatccatggcaatcgggctggtacttggaggatttatttgggctgtgttcatttgtctgtctcgaagaagaagagccagtgctcccatctcacagtggagttcaagcaggagatctaggtcttcttacacccacggcctcaacagaactggattttaccgccacagtggctgtgaacgtcgaagcaacctcagcctggccagtctcaccttccagcgacaagcttccctggaacaagcaaattcctttccaagaaaatcaagtttcagagcttctactttccatccctttctgcaatgtccaccacttcctgtggaaactgagagtcagctggtgactctcccttcttccaatatctctcccaccatcagcacttcccacagtctgagccgtcctgactactggtccagtaacagtcttcgagtgggcctttcaacaccgcccccacctgcctatgagtccatcatcaaggcattcccagattcctgagtagggtggcttttggtttttgtttctttcttgtcttgtcttttattgaaaggaaatcaaaaataggctaaacagaattttgagggcatggcccaaataactcatgagttccaagttgaaacatggttgtgcaagttggacattacaatgtaaaacacattttcttcaaacacgttttcccttttgtttcaaaaaatgtaatattttcccccaagcgttttatatttatgtattttgtattcaatgtgaggcttattaaaaatagtgattctaatgtaagaatcagctaagatgcattatatatattttaattaaaattaaaacttcagatatttgtggattacaatcctcatttacttccaatgtgact

SEQ ID NO: 1302 - protein, 235 aa, Homo sapiens
MRTQVYEGLCKNYFSLAVLQRDRIKLLFFDILVFLSVFLLFLLFLVDIMANNTTSLGSPWPENFWEDLIMSFTVSMAIGLVLGGFIWAVFICLSRRRRASAPISQWSSSRRSRSSYTHGLNRTGFYRHSGCERRSNLSLASLTFQRQASLEQANSFPRKSSFRASTFHPFLQCPPLPVETESQLVTLPSSNISPTISTSHSLSRPDYWSSNSLRVGLSTPPPPAYESIIKAFPDS

SEQ ID NO: 1303 - DNA, 1701 bp, Homo sapiens
ctacaatcaagattgagagtggctctaacaagtgccatttttccttgttagctttcatttctcagccctttacaagattaaaatagtctgcagtttaatctctccaaagctttacggacagtgattctgtcctaaacaagacagtgactccaggatttctgaagactattgtggaagaagcatccattaaggccaagctataacatcagaaatggtgaatgaatacaagaaaattcttttgctgaaaggatttgagctcatggatgattatcattttacatcaattaagtccttactggcctatgatttaggactaactacaaaaatgcaagaggaatacaacagaattaagattacagatttgatggaaaaaaagttccaaggcgttgcctgtctagacaaactaatagaacttgccaaagatatgccatcacttaaaaaccttgttaacaatcttcgaaaagagaagtcaaaagttgctaagaaaattaaaacacaagaaaaagctccagtgaaaaaaataaaccaggaagaagtgggtcttgcggcacctgcacccaccgcaagaaacaaactgacatcggaagcaagagggaggattcctgtagctcagaaaagaaaaactccaaacaaagaaaagactgaagccaaaaggaataaggtgtcccaagagcagagtaagcccccaggtccctcaggagccagcacatctgcagctgtggatcatcccccactaccccagacctcatcatcaactccatccaacacttcgtttactccgaatcaggaaacccaggcccaacggcaggtggatgcaagaagaaatgttccccaaaacgacccagtgacagtggtggtactgaaagcaacagcgccatttaaatacgagtccccagaaaatgggaaaagcacaatgtttcatgctacagtggccagtaagactcaatatttccatgtgaaagtcttcgacatcaacttgaaagagaaatttgtaaggaagaaggtcattaccatatctgattactctgaatgtaaaggagtaatggaaataaaggaagcatcatctgtgtctgactttaatcaaaattttgaggtcccaaacagaattatcgaaatagcaaataaaactcccaagatcagtcaactttacaagcaagcatctggaacaatggtgtatgggttgtttatgttacaaaagaaaagcgtacacaagaagaacacaatttatgaaatacaggataatacaggatccatggatgtagtggggagtggaaaatggcacaatatcaagtgtgagaaaggagataaacttcgactcttctgccttcaactgagaacagttgaccgcaagctgaaactggtgtgtggaagtcacagcttcatcaaggtcatcaaggccaagaaaaacaaggaaggaccaatgaatgttaattgaaatatgaaagctgaaatgcaacaaacaacttccgcttaaaacaattaagttgttaataactgtgattttgtaaatttcagtaattcatttaaatgatgtttcagtagatatattctagcatattaagagcttttataactgagttatagattagtttgctttctggaataaaattttcttcttatactcttccttttttttagatattacattttgcttttatgacattcacgaggcaaaaaataaaatatctttttttgaaggac

SEQ ID NO: 1304 - protein, 407 aa, Homo sapiens
MVNEYKKILLLKGFELMDDYHFTSIKSLLAYDLGLTTKMQEEYNRIKITDLMEKKFQGVACLDKLIELAKDMPSLKNLVNNLRKEKSKVAKKIKTQEKAPVKKINQEEVGLAAPAPTARNKLTSEARGRIPVAQKRKTPNKEKTEAKRNKVSQEQSKPPGPSGASTSAAVDHPPLPQTSSSTPSNTSFTPNQETQAQRQVDARRNVPQNDPVTVVVLKATAPFKYESPENGKSTMFHATVASKTQYFHVKVFDINLKEKFVRKKVITISDYSECKGVMEIKEASSVSDFNQNFEVPNRIIEIANKTPKISQLYKQASGTMVYGLFMLQKKSVHKKNTIYEIQDNTGSMDVVGSGKWHNIKCEKGDKLRLFCLQLRTVDRKLKLVCGSHSFIKVIKAKKNKEGPMNVN

SEQ ID NO: 1305 - DNA, 4265 bp, Homo sapiens
agggcagaggacacccagttggtggccgggagggcctcggctttccagggacagaggcccaactccaggacgccccagctggcccagcccctcctctttccctcaaggctgcaggaggtcgggaaaggcagtcctggtagaggcctgtcctgggctccaggttggcccctgagggtggccctcctcatgccggcttcaagactgagggacagggcagccagttcagcctcgggatccacctgtggctccatgtcccagacgcaccctgtgctggagagcggcctcctggcatctgccggctgctccgcaccccggggtcccaggaagggcggcccagccccagtggacaggaaagctaaggcctcagcgatgccggactccccagcggaggtgaagacgcagccccggtccacaccccccagcatgccgcccccaccgcctgccgcatcccagggggccacacgccccccctccttcacgccacacacacatcgagaggacgggcctgcgacgctgccccacggccgttttcatggctgcttaaaatggtctatggtctgtctcttgatgaacggcagcagccactcaccaacagccatcaatggtgcaccgtgcacacccaacggcttcagcaatggcccggccacctcgtccacagcctccttgtccacacagcacctgcccccagcctgcggggcccggcagctcagcaagctcaagcgcttcctcaccacactgcagcagtttggcagcgacatctccccagagattggggagcgcgtgcgcacactggtgctgggcctggtgaactcgacattgacgatcgaggagtttcattccaagcttcaggaggccaccaacttccctctgcggccgtttgtcattcccttcctgaaggcaaacctgcccttgctgcagcgggagctcctgcactgtgcacgcctggccaagcagacgcccgcccagtacttggcccagcatgagcagctcctgctggacgccagcgcctcctcccccatcgactcctcagagctgctactggaagtcaacgagaacggcaagaggaggacgcccgacaggaccaaagagaacgggtcagaccgcgacccgctgcaccccgagcacctcagcaaacggccatgcaccctgaaccctgcccagcgctacagccccagcaacgggccaccgcagcccacaccgccgccgcactaccgcctggaggacatagccatggcccaccacttccgagatgcctaccgccacccagacccccgggagctacgagagcgccatcggccgcttgtggtgcctgggtcccggcaggaagaagtgatcgaccacaagctcacagagcgtgagtgggcagaagagtggaagcacctcaacaacctcctgaactgcatcatggacatggtggagaagacgcggcgctcgctcacggtgctgcgcaggtgccaggaggccgaccgcgaggagctcaaccactgggcgcggcgctacagcgacgccgaggacacaaagaagggccccgctcccgccgcggcccggccccgcagcagctccgccggtcccgaagggcctcagctagacgtgcctcgcgagttcctgccgaggaccctcaccggctacgtgcctgaggacatctggaggaaggctgaagaggccgtgaatgaggtgaagcggcaggccatgtcggagctgcagaaagccgtgtcggacgcggagcgcaaagcgcacgagctcatcaccacggagcgtgccaagatggagcgggccctggccgaggcgaagcggcaggcctccgaggacgccctgacggtcatcaaccagcaggaggactccagcgagagctgctggaactgcgggcggaaagccagtgagacgtgcagcggctgcaacgcggcacgctactgcgggtccttctgccagcatcgggactgggagaagcatcaccacgtgtgtggccagagcctgcagggccccacagccgtggtggccgacccggtgcctggaccgcccgaagccgcccacagcctgggcccctccctgcctgtgggtgctgccagccccagcgaagccggctctgcggggccttctcgccccggctcccccagcccacctggcccactggacaccgtgccccgctgaccccactggcccctggcctgccggacacagcaccgtgccaaccccacccagctccaggcccaccggatgctgtgcctggcctccgatgcctggcctgccagacactgcgccccgcctgacctgggggagccgaccaattagtcactgctgctactgcccctctccgaaagaagacacagaaccaacaaaaccgcattcagtgcacctgcctcagctacctaatgattccgcgcggagacctcctgacaacgtctcttcaagcatcctcagaagcctcgactgagctttagacagcagagcagatgccgcaggcgcggcggctctgcccacctctcttttcctctctgtctgtctctccccctctgtcttctctatcctctctctctctatgactatcacacactttctcttcaatgaaaaaatcgaattggtggcttatattttcagcaaagaattttggggggttttgtgtgttggcaaaagagctactcagaaatggacaaagaaaacgggggggttctccccctcctgattaaaaagggagaaagaaaactgcgattttatagctggagatctgaacccagctgtgcccctcccccaggggcgtgaggctgatcagcgaagacgggaggaaagatttcgatttctgactcaagatgcatttttggtttcagatttttttttcctgtaatgttaaactctttggctttaagtaaaaatccaaaaagtttttttaaaaaagcaaaggaagcatacttgtgaactaccttgctagctagccagccaaggataccggacacacctctgctccaaaggaaatccaaaaaagcaaacacaagaaatcaaaatccaaaatttgtttgtcactgccaaagtatttttttcactgtttcacttgctcttgggtttgtttggatgtgggtctttttctcttctgttctgattttgtttgtgggtgtcgggatatttgggtgcagagggtttgtgcccagttagaagcgacttttgttctcttctgcgtaggcgttggtgcgtccgccgcgtgtgcgtggtccgtgtgccgttgctccggcctgcgtctccatatgtgtaggaaaggacacgccgtctgtcctcacgccccctgtgacttttcatatttccgttttccacttgtggaaaaaaagtgctaaagttttcttcccagagagagcataattccgaaacaaaactgtgacaatcttttgggttgattctcgactgcttttcgagcatgcggagccagcaggcctccctgaaacactgcttctcggccagcccgtcctcctctacctctctcctctccgcgccctccgacctctctcggccccctcaccccagctccgacctctctcagccccatcgccccaactccaacctctcggccccatcgccccaccgcagctactcccctttcttccaaacttttgcagaaaaaacaaaaaaactacaaacaaaagcagccctctgcctcctccccagggaagaccctgaccgtgtacatagccctggtgctcctgcccagccacccctcagatgcgttcgcctctggccctggggtgtgtctcggtgacgttttctatcagacgtgctccctcccatcctccagccctgcccaccctccctccactcctctcaactgcctcagcgatttcaagaaggaaataaagggataaagaaattcatgcttgcaccgagtacaaggacagacagcaggcacggcccgcagcctggcatctgtgcgtgtggcgtggcccgtggcttggcatctgtgtgcgtggtgtggcccgtggcctggcatctgtgtgcgtggcgtggcccgtggcctggcatctgtgtgtgtggcgtggcccgtggcctggcatctgtgcgcgtggcgtggcccgtggcctggcatctgtgtgcgtggctatcaggagttctaggaactcagtgcaatacgggagtgacccagctactgaaccagccacgaacagcccgccagaggcctgaagctgagcgtgtacgttaatgtgaatgtatatagtctttgcagaggtccaaatgatattcatgatggtaataaacgagatgtttgccaaataaaaaacagaaaccgc

SEQ ID NO: 1306 - protein, 653 aa, Homo sapiens
MPASRLRDRAASSASGSTCGSMSQTHPVLESGLLASAGCSAPRGPRKGGPAPVDRKAKASAMPDSPAEVKTQPRSTPPSMPPPPPAASQGATRPPSFTPHTHREDGPATLPHGRFHGCLKWSMVCLLMNGSSHSPTAINGAPCTPNGFSNGPATSSTASLSTQHLPPACGARQLSKLKRFLTTLQQFGSDISPEIGERVRTLVLGLVNSTLTIEEFHSKLQEATNFPLRPFVIPFLKANLPLLQRELLHCARLAKQTPAQYLAQHEQLLLDASASSPIDSSELLLEVNENGKRRTPDRTKENGSDRDPLHPEHLSKRPCTLNPAQRYSPSNGPPQPTPPPHYRLEDIAMAHHFRDAYRHPDPRELRERHRPLVVPGSRQEEVIDHKLTEREWAEEWKHLNNLLNCIMDMVEKTRRSLTVLRRCQEADREELNHWARRYSDAEDTKKGPAPAAARPRSSSAGPEGPQLDVPREFLPRTLTGYVPEDIWRKAEEAVNEVKRQAMSELQKAVSDAERKAHELITTERAKMERALAEAKRQASEDALTVINQQEDSSESCWNCGRKASETCSGCNAARYCGSFCQHRDWEKHHHVCGQSLQGPTAVVADPVPGPPEAAHSLGPSLPVGAASPSEAGSAGPSRPGSPSPPGPLDTVPR

SEQ ID NO: 1307 - DNA, 4034 bp, Homo sapiens
gcggccgccccgcgcgccccagccccgccgcgcgcctgagcccggtgcggcgccagaagacagcgcgcagccgcccctgagtcgtggaggcggggaccaagctggaaggagcagcgactcccggaccgagtcgcgagtgtgcgccgtccgccgcccgccggatcccccggaccccccgaccccccagtggacaggaaagctaaggcctcagcgatgccggactccccagcggaggtgaagacgcagccccggtccacaccccccagcatgccgcccccaccgcctgccgcatcccagggggccacacgccccccctccttcacgccacacacactgatgaacggcagcagccactcaccaacagccatcaatggtgcaccgtgcacacccaacggcttcagcaatggcccggccacctcgtccacagcctccttgtccacacagcacctgcccccagcctgcggggcccggcagctcagcaagctcaagcgcttcctcaccacactgcagcagtttggcagcgacatctccccagagattggggagcgcgtgcgcacactggtgctgggcctggtgaactcgacattgacgatcgaggagtttcattccaagcttcaggaggccaccaacttccctctgcggccgtttgtcattcccttcctgaaggcaaacctgcccttgctgcagcgggagctcctgcactgtgcacgcctggccaagcagacgcccgcccagtacttggcccagcatgagcagctcctgctggacgccagcgcctcctcccccatcgactcctcagagctgctactggaagtcaacgagaacggcaagaggaggacgcccgacaggaccaaagagaacgggtcagaccgcgacccgctgcaccccgagcacctcagcaaacggccatgcaccctgaaccctgcccagcgctacagccccagcaacgggccaccgcagcccacaccgccgccgcactaccgcctggaggacatagccatggcccaccacttccgagatgcctaccgccacccagacccccgggagctacgagagcgccatcggccgcttgtggtgcctgggtcccggcaggaagaagtgatcgaccacaagctcacagagcgtgagtgggcagaagagtggaagcacctcaacaacctcctgaactgcatcatggacatggtggagaagacgcggcgctcgctcacggtgctgcgcaggtgccaggaggccgaccgcgaggagctcaaccactgggcgcggcgctacagcgacgccgaggacacaaagaagggccccgctcccgccgcggcccggccccgcagcagctccgccggtcccgaagggcctcagctagacgtgcctcgcgagttcctgccgaggaccctcaccggctacgtgcctgaggacatctggaggaaggctgaagaggccgtgaatgaggtgaagcggcaggccatgtcggagctgcagaaagccgtgtcggacgcggagcgcaaagcgcacgagctcatcaccacggagcgtgccaagatggagcgggccctggccgaggcgaagcggcaggcctccgaggacgccctgacggtcatcaaccagcaggaggactccagcgagagctgctggaactgcgggcggaaagccagtgagacgtgcagcggctgcaacgcggcacgctactgcgggtccttctgccagcatcgggactgggagaagcatcaccacgtgtgtggccagagcctgcagggccccacagccgtggtggccgacccggtgcctggaccgcccgaagccgcccacagcctgggcccctccctgcctgtgggtgctgccagccccagcgaagccggctctgcggggccttctcgccccggctcccccagcccacctggcccactggacaccgtgccccgctgaccccactggcccctggcctgccggacacagcaccgtgccaaccccacccagctccaggcccaccggatgctgtgcctggcctccgatgcctggcctgccagacactgcgccccgcctgacctgggggagccgaccaattagtcactgctgctactgcccctctccgaaagaagacacagaaccaacaaaaccgcattcagtgcacctgcctcagctacctaatgattccgcgcggagacctcctgacaacgtctcttcaagcatcctcagaagcctcgactgagctttagacagcagagcagatgccgcaggcgcggcggctctgcccacctctcttttcctctctgtctgtctctccccctctgtcttctctatcctctctctctctatgactatcacacactttctcttcaatgaaaaaatcgaattggtggcttatattttcagcaaagaattttggggggttttgtgtgttggcaaaagagctactcagaaatggacaaagaaaacgggggggttctccccctcctgattaaaaagggagaaagaaaactgcgattttatagctggagatctgaacccagctgtgcccctcccccaggggcgtgaggctgatcagcgaagacgggaggaaagatttcgatttctgactcaagatgcatttttggtttcagatttttttttcctgtaatgttaaactctttggctttaagtaaaaatccaaaaagtttttttaaaaaagcaaaggaagcatacttgtgaactaccttgctagctagccagccaaggataccggacacacctctgctccaaaggaaatccaaaaaagcaaacacaagaaatcaaaatccaaaatttgtttgtcactgccaaagtatttttttcactgtttcacttgctcttgggtttgtttggatgtgggtctttttctcttctgttctgattttgtttgtgggtgtcgggatatttgggtgcagagggtttgtgcccagttagaagcgacttttgttctcttctgcgtaggcgttggtgcgtccgccgcgtgtgcgtggtccgtgtgccgttgctccggcctgcgtctccatatgtgtaggaaaggacacgccgtctgtcctcacgccccctgtgacttttcatatttccgttttccacttgtggaaaaaaagtgctaaagttttcttcccagagagagcataattccgaaacaaaactgtgacaatcttttgggttgattctcgactgcttttcgagcatgcggagccagcaggcctccctgaaacactgcttctcggccagcccgtcctcctctacctctctcctctccgcgccctccgacctctctcggccccctcaccccagctccgacctctctcagccccatcgccccaactccaacctctcggccccatcgccccaccgcagctactcccctttcttccaaacttttgcagaaaaaacaaaaaaactacaaacaaaagcagccctctgcctcctccccagggaagaccctgaccgtgtacatagccctggtgctcctgcccagccacccctcagatgcgttcgcctctggccctggggtgtgtctcggtgacgttttctatcagacgtgctccctcccatcctccagccctgcccaccctccctccactcctctcaactgcctcagcgatttcaagaaggaaataaagggataaagaaattcatgcttgcaccgagtacaaggacagacagcaggcacggcccgcagcctggcatctgtgcgtgtggcgtggcccgtggcttggcatctgtgtgcgtggtgtggcccgtggcctggcatctgtgtgcgtggcgtggcccgtggcctggcatctgtgtgtgtggcgtggcccgtggcctggcatctgtgcgcgtggcgtggcccgtggcctggcatctgtgtgcgtggctatcaggagttctaggaactcagtgcaatacgggagtgacccagctactgaaccagccacgaacagcccgccagaggcctgaagctgagcgtgtacgttaatgtgaatgtatatagtctttgcagaggtccaaatgatattcatgatggtaataaacgagatgtttgccaaataaaaaacagaaaccgc

SEQ ID NO: 1308 - protein, 567 aa, Homo sapiens
MPDSPAEVKTQPRSTPPSMPPPPPAASQGATRPPSFTPHTLMNGSSHSPTAINGAPCTPNGFSNGPATSSTASLSTQHLPPACGARQLSKLKRFLTTLQQFGSDISPEIGERVRTLVLGLVNSTLTIEEFHSKLQEATNFPLRPFVIPFLKANLPLLQRELLHCARLAKQTPAQYLAQHEQLLLDASASSPIDSSELLLEVNENGKRRTPDRTKENGSDRDPLHPEHLSKRPCTLNPAQRYSPSNGPPQPTPPPHYRLEDIAMAHHFRDAYRHPDPRELRERHRPLVVPGSRQEEVIDHKLTEREWAEEWKHLNNLLNCIMDMVEKTRRSLTVLRRCQEADREELNHWARRYSDAEDTKKGPAPAAARPRSSSAGPEGPQLDVPREFLPRTLTGYVPEDIWRKAEEAVNEVKRQAMSELQKAVSDAERKAHELITTERAKMERALAEAKRQASEDALTVINQQEDSSESCWNCGRKASETCSGCNAARYCGSFCQHRDWEKHHHVCGQSLQGPTAVVADPVPGPPEAAHSLGPSLPVGAASPSEAGSAGPSRPGSPSPPGPLDTVPR

SEQ ID NO: 1309 - DNA, 4146 bp, Homo sapiens
ggagggcctcggctttccagggacagaggcccaactccaggacgccccagctggcccagcccctcctctttccctcaaggctgcaggaggtcgggaaaggcagtcctggtagaggcctgtcctgggctccaggttggcccctgagggtggccctcctcatgccggcttcaagactgagggacagggcagccagttcagcctcgggatccacctgtggctccatgtcccagacgcaccctgtgctggagagcggcctcctggcatctgccggctgctccgcaccccggggtcccaggaagggcggcccagccccagtggacaggaaagctaaggcctcagcgatgccggactccccagcggaggtgaagacgcagccccggtccacaccccccagcatgccgcccccaccgcctgccgcatcccagggggccacacgccccccctccttcacgccacacacactgatgaacggcagcagccactcaccaacagccatcaatggtgcaccgtgcacacccaacggcttcagcaatggcccggccacctcgtccacagcctccttgtccacacagcacctgcccccagcctgcggggcccggcagctcagcaagctcaagcgcttcctcaccacactgcagcagtttggcagcgacatctccccagagattggggagcgcgtgcgcacactggtgctgggcctggtgaactcgacattgacgatcgaggagtttcattccaagcttcaggaggccaccaacttccctctgcggccgtttgtcattcccttcctgaaggcaaacctgcccttgctgcagcgggagctcctgcactgtgcacgcctggccaagcagacgcccgcccagtacttggcccagcatgagcagctcctgctggacgccagcgcctcctcccccatcgactcctcagagctgctactggaagtcaacgagaacggcaagaggaggacgcccgacaggaccaaagagaacgggtcagaccgcgacccgctgcaccccgagcacctcagcaaacggccatgcaccctgaaccctgcccagcgctacagccccagcaacgggccaccgcagcccacaccgccgccgcactaccgcctggaggacatagccatggcccaccacttccgagatgcctaccgccacccagacccccgggagctacgagagcgccatcggccgcttgtggtgcctgggtcccggcaggaagaagtgatcgaccacaagctcacagagcgtgagtgggcagaagagtggaagcacctcaacaacctcctgaactgcatcatggacatggtggagaagacgcggcgctcgctcacggtgctgcgcaggtgccaggaggccgaccgcgaggagctcaaccactgggcgcggcgctacagcgacgccgaggacacaaagaagggccccgctcccgccgcggcccggccccgcagcagctccgccggtcccgaagggcctcagctagacgtgcctcgcgagttcctgccgaggaccctcaccggctacgtgcctgaggacatctggaggaaggctgaagaggccgtgaatgaggtgaagcggcaggccatgtcggagctgcagaaagccgtgtcggacgcggagcgcaaagcgcacgagctcatcaccacggagcgtgccaagatggagcgggccctggccgaggcgaagcggcaggcctccgaggacgccctgacggtcatcaaccagcaggaggactccagcgagagctgctggaactgcgggcggaaagccagtgagacgtgcagcggctgcaacgcggcacgctactgcgggtccttctgccagcatcgggactgggagaagcatcaccacgtgtgtggccagagcctgcagggccccacagccgtggtggccgacccggtgcctggaccgcccgaagccgcccacagcctgggcccctccctgcctgtgggtgctgccagccccagcgaagccggctctgcggggccttctcgccccggctcccccagcccacctggcccactggacaccgtgccccgctgaccccactggcccctggcctgccggacacagcaccgtgccaaccccacccagctccaggcccaccggatgctgtgcctggcctccgatgcctggcctgccagacactgcgccccgcctgacctgggggagccgaccaattagtcactgctgctactgcccctctccgaaagaagacacagaaccaacaaaaccgcattcagtgcacctgcctcagctacctaatgattccgcgcggagacctcctgacaacgtctcttcaagcatcctcagaagcctcgactgagctttagacagcagagcagatgccgcaggcgcggcggctctgcccacctctcttttcctctctgtctgtctctccccctctgtcttctctatcctctctctctctatgactatcacacactttctcttcaatgaaaaaatcgaattggtggcttatattttcagcaaagaattttggggggttttgtgtgttggcaaaagagctactcagaaatggacaaagaaaacgggggggttctccccctcctgattaaaaagggagaaagaaaactgcgattttatagctggagatctgaacccagctgtgcccctcccccaggggcgtgaggctgatcagcgaagacgggaggaaagatttcgatttctgactcaagatgcatttttggtttcagatttttttttcctgtaatgttaaactctttggctttaagtaaaaatccaaaaagtttttttaaaaaagcaaaggaagcatacttgtgaactaccttgctagctagccagccaaggataccggacacacctctgctccaaaggaaatccaaaaaagcaaacacaagaaatcaaaatccaaaatttgtttgtcactgccaaagtatttttttcactgtttcacttgctcttgggtttgtttggatgtgggtctttttctcttctgttctgattttgtttgtgggtgtcgggatatttgggtgcagagggtttgtgcccagttagaagcgacttttgttctcttctgcgtaggcgttggtgcgtccgccgcgtgtgcgtggtccgtgtgccgttgctccggcctgcgtctccatatgtgtaggaaaggacacgccgtctgtcctcacgccccctgtgacttttcatatttccgttttccacttgtggaaaaaaagtgctaaagttttcttcccagagagagcataattccgaaacaaaactgtgacaatcttttgggttgattctcgactgcttttcgagcatgcggagccagcaggcctccctgaaacactgcttctcggccagcccgtcctcctctacctctctcctctccgcgccctccgacctctctcggccccctcaccccagctccgacctctctcagccccatcgccccaactccaacctctcggccccatcgccccaccgcagctactcccctttcttccaaacttttgcagaaaaaacaaaaaaactacaaacaaaagcagccctctgcctcctccccagggaagaccctgaccgtgtacatagccctggtgctcctgcccagccacccctcagatgcgttcgcctctggccctggggtgtgtctcggtgacgttttctatcagacgtgctccctcccatcctccagccctgcccaccctccctccactcctctcaactgcctcagcgatttcaagaaggaaataaagggataaagaaattcatgcttgcaccgagtacaaggacagacagcaggcacggcccgcagcctggcatctgtgcgtgtggcgtggcccgtggcttggcatctgtgtgcgtggtgtggcccgtggcctggcatctgtgtgcgtggcgtggcccgtggcctggcatctgtgtgtgtggcgtggcccgtggcctggcatctgtgcgcgtggcgtggcccgtggcctggcatctgtgtgcgtggctatcaggagttctaggaactcagtgcaatacgggagtgacccagctactgaaccagccacgaacagcccgccagaggcctgaagctgagcgtgtacgttaatgtgaatgtatatagtctttgcagaggtccaaatgatattcatgatggtaataaacgagatgtttgccaaat

SEQ ID NO: 1310 - protein, 567 aa, Homo sapiens; identical to SEQ ID NO: 1308

SEQ ID NO: 1311 - DNA, 2834 bp, Homo sapiens
atgccggactccccagcggaggtgaagacgcagccccggtccacaccccccagcatgccgcccccaccgcctgccgcatcccagggggccacacgccccccctccttcacgccacacacactgatgaacggcagcagccactcaccaacagccatcaatggtgcaccgtgcacacccaacggcttcagcaatggcccggccacctcgtccacagcctccttgtccacacagcacctgcccccagcctgcggggcccggcagctcagcaagctcaagcgcttcctcaccacactgcagcagtttggcagcgacatctccccagagattggggagcgcgtgcgcacactggtgctgggcctggtgaactcgacattgacgatcgaggagtttcattccaagcttcaggaggccaccaacttccctctgcggccgtttgtcattcccttcctgaaggcaaacctgcccttgctgcagcgggagctcctgcactgtgcacgcctggccaagcagacgcccgcccacccccaccttgcggaggtggtgcctgggtcccggcaggaagaagtgatcgaccacaagctcacagagcgtgagtgggcagaagagtggaagcacctcaacaacctcctgaactgcatcatggacatggtggagaagacgcggcgctcgctcacggtgctgcgcaggtgccaggaggccgaccgcgaggagctcaaccactgggcgcggcgctacagcgacgccgaggacacaaagaagggccccgctcccgccgcggcccggccccgcagcagctccgccggtcccgaagggcctcagctagacgtgcctcgcgagttcctgccgaggaccctcaccggctacgtgcctgaggacatctggaggaaggctgaagaggccgtgaatgaggtgaagcggcaggccatgtcggagctgcagaaagccgtgtcggacgcggagcgcaaagcgcacgagctcatcaccacggagcgtgccaagatggagcgggccctggccgaggcgaagcggcaggcctccgaggacgccctgacggtcatcaaccagcaggaggactccagcgagagctgctggaactgcgggcggaaagccagtgagacgtgcagcggctgcaacgcggcacgctactgcgggtccttctgccagcatcgggactgggagaagcatcaccacgtgtgtggccagagcctgcagggccccacagccgtggtggccgacccggtgcctggaccgcccgaagccgcccacagcctgggcccctccctgcctgtgggtgctgccagccccagcgaagccggctctgcggggccttctcgccccggctcccccagcccacctggcccactggacaccgtgccccgctgaccccactggcccctggcctgccggacacagcaccgtgccaaccccacccagctccaggcccaccggatgctgtgcctggcctccgatgcctggcctgccagacactgcgccccgcctgacctgggggagccgaccaattagtcactgctgctactgcccctctccgaaagaagacacagaaccaacaaaaccgcattcagtgcacctgcctcagctacctaatgattccgcgcggagacctcctgacaacgtctcttcaagcatcctcagaagcctcgactgagctttagacagcagagcagatgccgcaggcgcggcggctctgcccacctctcttttcctctctgtctgtctctccccctctgtcttctctatcctctctctctctatgactatcacacactttctcttcaatgaaaaaatcgaattggtggcttatattttcagcaaagaattttggggggttttgtgtgttggcaaaagagctactcagaaatggacaaagaaaacgggggggttctccccctcctgattaaaaagggagaaagaaaactgcgattttatagctggagatctgaacccagctgtgcccctcccccaggggcgtgaggctgatcagcgaagacgggaggaaagatttcgatttctgactcaagatgcatttttggtttcagatttttttttcctgtaatgttaaactctttggctttaagtaaaaatccaaaaagtttttttaaaaaagcaaaggaagcatacttgtgaactaccttgctagctagccagccaaggataccggacacacctctgctccaaaggaaatccaaaaaagcaaacacaagaaatcaaaatccaaaatttgtttgtcactgccaaagtatttttttcactgtttcacttgctcttgggtttgtttggatgtgggtctttttctcttctgttctgattttgtttgtgggtgtcgggatatttgggtgcagagggtttgtgcccagttagaagcgacttttgttctcttctgcgtaggcgttggtgcgtccgccgcgtgtgcgtggtccgtgtgccgttgctccggcctgcgtctccatatgtgtaggaaaggacacgccgtctgtcctcacgccccctgtgacttttcatatttccgttttccacttgtggaaaaaaagtgctaaagttttcttcccagagagagcataattccgaaacaaaactgtgacaatcttttgggttgattctcgactgcttttcgagcatgcggagccagcaggcctccctgaaacactgcttctcggccagcccgtcctcctctacctctctcctctccgcgccctccgacctctctcggccccctcaccccagctccgacctctctcagccccatcgccccaactccaacctctcggccccatcgccccaccgcagctactcccctttcttccaaacttttgcag

SEQ ID NO: 1312 - protein, 460 aa, Homo sapiens
MPDSPAEVKTQPRSTPPSMPPPPPAASQGATRPPSFTPHTLMNGSSHSPTAINGAPCTPNGFSNGPATSSTASLSTQHLPPACGARQLSKLKRFLTTLQQFGSDISPEIGERVRTLVLGLVNSTLTIEEFHSKLQEATNFPLRPFVIPFLKANLPLLQRELLHCARLAKQTPAHPHLAEVVPGSRQEEVIDHKLTEREWAEEWKHLNNLLNCIMDMVEKTRRSLTVLRRCQEADREELNHWARRYSDAEDTKKGPAPAAARPRSSSAGPEGPQLDVPREFLPRTLTGYVPEDIWRKAEEAVNEVKRQAMSELQKAVSDAERKAHELITTERAKMERALAEAKRQASEDALTVINQQEDSSESCWNCGRKASETCSGCNAARYCGSFCQHRDWEKHHHVCGQSLQGPTAVVADPVPGPPEAAHSLGPSLPVGAASPSEAGSAGPSRPGSPSPPGPLDTVPR

SEQ ID NO: 1313 - DNA, 2509 bp, Homo sapiens
gggacagaggcccaactccaggacgccccagctggcccagcccctcctctttccctcaaggctgcaggaggtcgggaaaggcagtcctggtagaggcctgtcctgggctccaggttggcccctgagggtggccctcctcatgccggcttcaagactgagggacagggcagccagttcagcctcgggatccacctgtggctccatgtcccagacgcaccctgtgctggagagcggcctcctggcatctgccggctgctccgcaccccggggtcccaggaagggcggcccagccccagtggacaggaaagctaaggcctcagcgatgccggactccccagcggaggtgaagacgcagccccggtccacaccccccagcatgccgcccccaccgcctgccgcatcccagggggccacacgccccccctccttcacgccacacacacatcgagaggacgggcctgcgacgctgccccacggccgttttcatggctgcttaaaatggtctatggtctgtctcttgatgaacggcagcagccactcaccaacagccatcaatggtgcaccgtgcacacccaacggcttcagcaatggcccggccacctcgtccacagcctccttgtccacacagcacctgcccccagcctgcggggcccggcagctcagcaagctcaagcgcttcctcaccacactgcagcagtttggcagcgacatctccccagagattggggagcgcgtgcgcacactggtgctgggcctggtgaactcgacattgacgatcgaggagtttcattccaagcttcaggaggccaccaacttccctctgcggccgtttgtcattcccttcctgaaggcaaacctgcccttgctgcagcgggagctcctgcactgtgcacgcctggccaagcagacgcccgcccaactggctgtggtggtgcctgggtcccggcaggaagaagtgatcgaccacaagctcacagagcgtgagtgggcagaagagtggaagcacctcaacaacctcctgaactgcatcatggacatggtggagaagacgcggcgctcgctcacggtgctgcgcaggtgccaggaggccgaccgcgaggagctcaaccactgggcgcggcgctacagcgacgccgaggacacaaagaagggccccgctcccgccgcggcccggccccgcagcagctccgccggtcccgaagggcctcagctagacgtgcctcgcgagttcctgccgaggaccctcaccggctacgtgcctgaggacatctggaggaaggctgaagaggccgtgaatgaggtgaagcggcaggccatgtcggagctgcagaaagccgtgtcggacgcggagcgcaaagcgcacgagctcatcaccacggagcgtgccaagatggagcgggccctggccgaggcgaagcggcaggcctccgaggacgccctgacggtcatcaaccagcaggaggactccagcgagagctgctggaactgcgggcggaaagccagtgagacgtgcagcggctgcaacgcggcacgctactgcgggtccttctgccagcatcgggactgggagaagcatcaccacgtgtgtggccagagcctgcagggccccacagccgtggtggccgacccggtgcctggaccgcccgaagccgcccacagcctgggcccctccctgcctgtgggtgctgccagccccagcgaagccggctctgcggggccttctcgccccggctcccccagcccacctggcccactggacaccgtgccccgctgaccccactggcccctggcctgccggacacagcaccgtgccaaccccacccagctccaggcccaccggatgctgtgcctggcctccgatgcctggcctgccagacactgcgccccgcctgacctgggggagccgaccaattagtcactgctgctactgcccctctccgaaagaagacacagaaccaacaaaaccgcattcagtgcacctgcctcagctacctaatgattccgcgcggagacctcctgacaacgtctcttcaagcatcctcagaagcctcgactgagctttagacagcagagcagatgccgcaggcgcggcggctctgcccacctctcttttcctctctgtctgtctctccccctctgtcttctctatcctctctctctctatgactatcacacactttctcttcaatgaaaaaatcgaattggtggcttatattttcagcaaagaattttggggggttttgtgtgttggcaaaagagctactcagaaatggacaaagaaaacgggggggttctccccctcctgattaaaaagggagaaagaaaactgcgattttatagctggagatctgaacccagctgtgcccctcccccaggggcgtgaggctgatcagcgaagacgggaggaaagatttcgatttctgactcaagatgcatttttggtttcagatttttttttcctgtaatgttaaactctttggctttaagtaaaaatccaaaaagttttttt

SEQ ID NO: 1314 - protein, 544 aa, Homo sapiens
MPASRLRDRAASSASGSTCGSMSQTHPVLESGLLASAGCSAPRGPRKGGPAPVDRKAKASAMPDSPAEVKTQPRSTPPSMPPPPPAASQGATRPPSFTPHTHREDGPATLPHGRFHGCLKWSMVCLLMNGSSHSPTAINGAPCTPNGFSNGPATSSTASLSTQHLPPACGARQLSKLKRFLTTLQQFGSDISPEIGERVRTLVLGLVNSTLTIEEFHSKLQEATNFPLRPFVIPFLKANLPLLQRELLHCARLAKQTPAQLAVVVPGSRQEEVIDHKLTEREWAEEWKHLNNLLNCIMDMVEKTRRSLTVLRRCQEADREELNHWARRYSDAEDTKKGPAPAAARPRSSSAGPEGPQLDVPREFLPRTLTGYVPEDIWRKAEEAVNEVKRQAMSELQKAVSDAERKAHELITTERAKMERALAEAKRQASEDALTVINQQEDSSESCWNCGRKASETCSGCNAARYCGSFCQHRDWEKHHHVCGQSLQGPTAVVADPVPGPPEAAHSLGPSLPVGAASPSEAGSAGPSRPGSPSPPGPLDTVPR

SEQ ID NO: 1315 - DNA, 4095 bp, Homo sapiens
cgcgcgcacacacgcacacatcgtctccagctctctgctcgctctgctcgcagtcacagacacttgagcacacgcgtacacccagacatcttcgggctgctattggattgactttgaaggttctgtgtgggtcgccgtggctgcatgtttgaatcaggtggagaagcacttcaacgctggacgaagtaaagattattgttgttattttttttttctctctctctctctcttaagaaaggaaaatatcccaaggactaatctgatcgggtcttccttcatgaacgaatgcaggaatttgggaactgagctgtgcaagtgctgaagaaggagatttgtttggaggaaacaggaaagagaaagaaaaggaaggaaaaaatacataatttcagggacgagagagagaagaaaaacggggactatggggagaaaaaagattcagattacgaggattatggatgaacgtaacagacaggtgacatttacaaagaggaaatttgggttgatgaagaaggcttatgagctgagcgtgctgtgtgactgtgagattgcgctgatcatcttcaacagcaccaacaagctgttccagtatgccagcaccgacatggacaaagtgcttctcaagtacacggagtacaacgagccgcatgagagccggacaaactcagacatcgtggagacgttgagaaagaagggccttaatggctgtgacagcccagaccccgatgcggacgattccgtaggtcacagccctgagtctgaggacaagtacaggaaaattaacgaagatattgatctaatgatcagcaggcaaagattgtgtgctgttccacctcccaacttcgagatgccagtctccatcccagtgtccagccacaacagtttggtgtacagcaaccctgtcagctcactgggaaaccccaacctattgccactggctcacccttctctgcagaggaatagtatgtctcctggtgtaacacatcgacctccaagtgcaggtaacacaggtggtctgatgggtggagacctcacgtctggtgcaggcaccagtgcagggaacgggtatggcaatccccgaaactcaccaggtctgctggtctcacctggtaacttgaacaagaatatgcaagcaaaatctcctcccccaatgaatttaggaatgaataaccgtaaaccagatctccgagttcttattccaccaggcagcaagaatacgatgccatcagtgatttgtaccaagttatctctttataatcaaaggataaataactcccagtcggctcagtcattggctaccccagtggtttccgtagcaactcctactttaccaggacaaggaatgggaggatatccatcagccatttcaacaacatatggtaccgagtactctctgagtagtgcagacctgtcatctctgtctgggtttaacaccgccagcgctcttcaccttggttcagtaactggctggcaacagcaacacctacataacatgccaccatctgccctcagtcagttgggagcttgcactagcactcatttatctcagagttcaaatctctccctgccttctactcaaagcctcaacatcaagtcagaacctgtttctcctcctagagaccgtaccaccaccccttcgagatacccacaacacacgcgccacgaggcggggagatctcctgttgacagcttgagcagctgtagcagttcgtacgacgggagcgaccgagaggatcaccggaacgaattccactcccccattggactcaccagaccttcgccggacgaaagggaaagtccctcagtcaagcgcatgcgactttctgaaggatgggcaacatgatcagattattacttactagtttttttttttttcttgcagtgtgtgtgtgtgctataccttaatggggaaggggggtcgatatgcattatatgtgccgtgtgtggaaaaaaaaaaagtcaggtactctgttttgtaaaagtacttttaaattgcctcagtgatacagtataaagataaacagaaatgctgagataagcttagcacttgagttgtacaacagaacacttgtacaaaatagattttaaggctaacttcttttcactgttgtgctcctttgcaaaatgtatgttacaatagatagtgtcatgttgcaggttcaacgttatttacatgtaaatagacaaaaggaaacatttgccaaaagcggcagatctttactgaaagagagagcagctgttatgcaacatatagaaaaatgtatagatgcttggacagacccggtaatgggtggccattggtaaatgttaggaacacaccaggtcacctgacatcccaagaatgctcacaaacctgcaggcatatcattggcgtatggcactcattaaaaaggatcagagaccattaaaagaggaccatacctattaaaaaaaaatgtggagttggagggctaacatatttaattaaataaataaataaatctgggtctgcatctcttattaaataaaaatataaaaatatgtacattacattttgcttattttcatataaaaggtaagacagagtttgcaaagcatttgtggctttttgtagtttacttaagccaaaatgtgtttttttccccttgatagcttcgctaatattttaaacagtcctgtaaaaaaccaaaaaggactttttgtatagaaagcactaccctaagccatgaagaactccatgctttgctaaccaagataactgttttctctttgtagaagttttgtttttgaaatgtgtatttctaattatataaaatattaagaatcttttaaaaaaatctgtgaaattaacatgcttgtgtatagctttctaatatatataatattatggtaatagcagaagttttgttatcttaatagcgggaggggggtatatttgtgcagttgcacatttgagtaactattttctttctgttttcttttactctgcttacattttataagtttaaggtcagctgtcaaaaggataacctgtggggttagaacatatcacattgcaacaccctaaattgtttttaatacattagcaatctattgggtcaactgacatccattgtatatactagtttctttcatgctatttttattttgttttttgcatttttatcaaatgcagggcccctttctgatctcaccatttcaccatgcatcttggaattcagtaagtgcatatcctaacttgcccatattctaaatcatctggttggttttcagcctagaatttgatacgctttttagaaatatgcccagaatagaaaagctatgttggggcacatgtcctgcaaatatggccctagaaacaagtgatatggaatttacttggtgaataagttataaattcccacagaagaaaaatgtgaaagactgggtgctagacaagaaggaagcaggtaaagggatagttgctttgtcatccgtttttaattattttaactgacccttgacaatcttgtcagcaatataggactgttgaacaatcccggtgtgtcaggacccccaaatgtcacttctgcataaagcatgtatgtcatctattttttcttcaataaagagatttaatagccatttcaagaaatcccataaagaacctctctatgtccctttttttaatttaaaaaaaatgactcttgtctaatattcgtctataagggattaattttcagaccctttaataagtgagtgccataagaaagtcaatatatattgtttaaaagatatttcagtctaggaaagattttccttctcttggaatgtgaagatctgtcgattcatctccaatcatatgcattgacatacacagcaaagaagatataggcagtaatatcaacactgctatatcatgtgtaggacatttcttatccattttttctcttttacttgcatagttgctatgtgtttctcattgtaaaaggctgccgctgggtggcagaagccaagagaccttattaactaggctatatttttcttaacttgatctgaaatccacaattagaccacaatgcacctttggttgtatccataaaggatgctagcctgccttgtactaatgttttatatatt

SEQ ID NO: 1316 - protein, 473 aa, Homo sapiens
MGRKKIQITRIMDERNRQVTFTKRKFGLMKKAYELSVLCDCEIALIIFNSTNKLFQYASTDMDKVLLKYTEYNEPHESRTNSDIVETLRKKGLNGCDSPDPDADDSVGHSPESEDKYRKINEDIDLMISRQRLCAVPPPNFEMPVSIPVSSHNSLVYSNPVSSLGNPNLLPLAHPSLQRNSMSPGVTHRPPSAGNTGGLMGGDLTSGAGTSAGNGYGNPRNSPGLLVSPGNLNKNMQAKSPPPMNLGMNNRKPDLRVLIPPGSKNTMPSVICTKLSLYNQRINNSQSAQSLATPVVSVATPTLPGQGMGGYPSAISTTYGTEYSLSSADLSSLSGFNTASALHLGSVTGWQQQHLHNMPPSALSQLGACTSTHLSQSSNLSLPSTQSLNIKSEPVSPPRDRTTTPSRYPQHTRHEAGRSPVDSLSSCSSSYDGSDREDHRNEFHSPIGLTRPSPDERESPSVKRMRLSEGWAT

SEQ ID NO: 1317 - DNA, 4048 bp, Homo sapiens
ccagctctctgctcgctctgctcgcagtcacagacacttgagcacacgcgtacacccagacatcttcgggctgctattggattgactttgaaggttctgtgtgggtcgccgtggctgcatgtttgaatcaggtggagaagcacttcaacgctggacgaagtaaagattattgttgttattttttttttctctctctctctctcttaagaaaggaaaatatcccaaggactaatctgatcgggtcttccttcatcaggaacgaatgcaggaatttgggaactgagctgtgcaagtgctgaagaaggagatttgtttggaggaaacaggaaagagaaagaaaaggaaggaaaaaatacataatttcagggacgagagagagaagaaaaacggggactatggggagaaaaaagattcagattacgaggattatggatgaacgtaacagacaggtgacatttacaaagaggaaatttgggttgatgaagaaggcttatgagctgagcgtgctgtgtgactgtgagattgcgctgatcatcttcaacagcaccaacaagctgttccagtatgccagcaccgacatggacaaagtgcttctcaagtacacggagtacaacgagccgcatgagagccggacaaactcagacatcgtggagacgttgagaaagaagggccttaatggctgtgacagcccagaccccgatgcggacgattccgtaggtcacagccctgagtctgaggacaagtacaggaaaattaacgaagatattgatctaatgatcagcaggcaaagattgtgtgctgttccacctcccaacttcgagatgccagtctccatcccagtgtccagccacaacagtttggtgtacagcaaccctgtcagctcactgggaaaccccaacctattgccactggctcacccttctctgcagaggaatagtatgtctcctggtgtaacacatcgacctccaagtgcaggtaacacaggtggtctgatgggtggagacctcacgtctggtgcaggcaccagtgcagggaacgggtatggcaatccccgaaactcaccaggtctgctggtctcacctggtaacttgaacaagaatatgcaagcaaaatctcctcccccaatgaatttaggaatgaataaccgtaaaccagatctccgagttcttattccaccaggcagcaagaatacgatgccatcagtgaatcaaaggataaataactcccagtcggctcagtcattggctaccccagtggtttccgtagcaactcctactttaccaggacaaggaatgggaggatatccatcagccatttcaacaacatatggtaccgagtactctctgagtagtgcagacctgtcatctctgtctgggtttaacaccgccagcgctcttcaccttggttcagtaactggctggcaacagcaacacctacataacatgccaccatctgccctcagtcagttgggagcttgcactagcactcatttatctcagagttcaaatctctccctgccttctactcaaagcctcaacatcaagtcagaacctgtttctcctcctagagaccgtaccaccaccccttcgagatacccacaacacacgcgccacgaggcggggagatctcctgttgacagcttgagcagctgtagcagttcgtacgacgggagcgaccgagaggatcaccggaacgaattccactcccccattggactcaccagaccttcgccggacgaaagggaaagtccctcagtcaagcgcatgcgactttctgaaggatgggcaacatgatcagattattacttactagtttttttttttttcttgcagtgtgtgtgtgtgctataccttaatggggaaggggggtcgatatgcattatatgtgccgtgtgtggaaaaaaaaaaagtcaggtactctgttttgtaaaagtacttttaaattgcctcagtgatacagtataaagataaacagaaatgctgagataagcttagcacttgagttgtacaacagaacacttgtacaaaatagattttaaggctaacttcttttcactgttgtgctcctttgcaaaatgtatgttacaatagatagtgtcatgttgcaggttcaacgttatttacatgtaaatagacaaaaggaaacatttgccaaaagcggcagatctttactgaaagagagagcagctgttatgcaacatatagaaaaatgtatagatgcttggacagacccggtaatgggtggccattggtaaatgttaggaacacaccaggtcacctgacatcccaagaatgctcacaaacctgcaggcatatcattggcgtatggcactcattaaaaaggatcagagaccattaaaagaggaccatacctattaaaaaaaaatgtggagttggagggctaacatatttaattaaataaataaataaatctgggtctgcatctcttattaaataaaaatataaaaatatgtacattacattttgcttattttcatataaaaggtaagacagagtttgcaaagcatttgtggctttttgtagtttacttaagccaaaatgtgtttttttccccttgatagcttcgctaatattttaaacagtcctgtaaaaaaccaaaaaggactttttgtatagaaagcactaccctaagccatgaagaactccatgctttgctaaccaagataactgttttctctttgtagaagttttgtttttgaaatgtgtatttctaattatataaaatattaagaatcttttaaaaaaatctgtgaaattaacatgcttgtgtatagctttctaatatatataatattatggtaatagcagaagttttgttatcttaatagcgggaggggggtatatttgtgcagttgcacatttgagtaactattttctttctgttttcttttactctgcttacattttataagtttaaggtcagctgtcaaaaggataacctgtggggttagaacatatcacattgcaacaccctaaattgtttttaatacattagcaatctattgggtcaactgacatccattgtatatactagtttctttcatgctatttttattttgttttttgcatttttatcaaatgcagggcccctttctgatctcaccatttcaccatgcatcttggaattcagtaagtgcatatcctaacttgcccatattctaaatcatctggttggttttcagcctagaatttgatacgctttttagaaatatgcccagaatagaaaagctatgttggggcacatgtcctgcaaatatggccctagaaacaagtgatatggaatttacttggtgaataagttataaattcccacagaagaaaaatgtgaaagactgggtgctagacaagaaggaagcaggtaaagggatagttgctttgtcatccgtttttaattattttaactgacccttgacaatcttgtcagcaatataggactgttgaacaatcccggtgtgtcaggacccccaaatgtcacttctgcataaagcatgtatgtcatctattttttcttcaataaagagatttaatagccatttcaagaaatcccataaagaacctctctatgtccctttttttaatttaaaaaaaatgactcttgtctaatattcgtctataagggattaattttcagaccctttaataagtgagtgccataagaaagtcaatatatattgtttaaaagatatttcagtctaggaaagattttccttctcttggaatgtgaagatctgtcgattcatctccaatcatatgcattgacatacacagcaaagaagatataggcagtaatatcaacactgctatatcatgtgtaggacatttcttatccattttttctcttttacttgcatagttgctatgtgtttctcattgtaaaaggctgccgctgggtggcagaagccaagagaccttattaactaggctatatttttcttaacttgatctgaaatccacaattagaccacaatgcacctttggttgtatccataaaggatgctagcctgccttgtactaatgttttatatatt

SEQ ID NO: 1318 - protein, 465 aa, Homo sapiens
MGRKKIQITRIMDERNRQVTFTKRKFGLMKKAYELSVLCDCEIALIIFNSTNKLFQYASTDMDKVLLKYTEYNEPHESRTNSDIVETLRKKGLNGCDSPDPDADDSVGHSPESEDKYRKINEDIDLMISRQRLCAVPPPNFEMPVSIPVSSHNSLVYSNPVSSLGNPNLLPLAHPSLQRNSMSPGVTHRPPSAGNTGGLMGGDLTSGAGTSAGNGYGNPRNSPGLLVSPGNLNKNMQAKSPPPMNLGMNNRKPDLRVLIPPGSKNTMPSVNQRINNSQSAQSLATPVVSVATPTLPGQGMGGYPSAISTTYGTEYSLSSADLSSLSGFNTASALHLGSVTGWQQQHLHNMPPSALSQLGACTSTHLSQSSNLSLPSTQSLNIKSEPVSPPRDRTTTPSRYPQHTRHEAGRSPVDSLSSCSSSYDGSDREDHRNEFHSPIGLTRPSPDERESPSVKRMRLSEGWAT

SEQ ID NO: 1319 - DNA, 1702 bp, Homo sapiens
aaactggggggtttctcttcaaagccagctggtctggctttattctgcaggaatttttttacctgtcagggtttggacaacaaagccctcagcaggtgctgacgggtacaacttcctggagaagcagaaaggcactggtgccaaagaagagttgcaaactgtgaagtaacttctatgaagagatgaagtaaagaacggaaggcaaatgattgtggcagtaaagaagtgtatgtgcaggaacgaatgcaggaatttgggaactgagctgtgcaagtgctgaagaaggagatttgtttggaggaaacaggaaagagaaagaaaaggaaggaaaaaatacataatttcagggacgagagagagaagaaaaacggggactatggggagaaaaaagattcagattacgaggattatggatgaacgtaacagacaggtgacatttacaaagaggaaatttgggttgatgaagaaggcttatgagctgagcgtgctgtgtgactgtgagattgcgctgatcatcttcaacagcaccaacaagctgttccagtatgccagcaccgacatggacaaagtgcttctcaagtacacggagtacaacgagccgcatgagagccggacaaactcagacatcgtggagacgttgagaaagaagggccttaatggctgtgacagcccagaccccgatgcggacgattccgtaggtcacagccctgagtctgaggacaagtacaggaaaattaacgaagatattgatctaatgatcagcaggcaaagattgtgtgctgttccacctcccaacttcgagatgccagtctccatcccagtgtccagccacaacagtttggtgtacagcaaccctgtcagctcactgggaaaccccaacctattgccactggctcacccttctctgcagaggaatagtatgtctcctggtgtaacacatcgacctccaagtgcaggtaacacaggtggtctgatgggtggagacctcacgtctggtgcaggcaccagtgcagggaacgggtatggcaatccccgaaactcaccaggtctgctggtctcacctggtaacttgaacaagaatatgcaagcaaaatctcctcccccaatgaatttaggaatgaataaccgtaaaccagatctccgagttcttattccaccaggcagcaagaatacgatgccatcagtgatttgtaccaagttatctctttataatcaaaggataaataactcccagtcggctcagtcattggctaccccagtggtttccgtagcaactcctactttaccaggacaaggaatgggaggatatccatcagccatttcaacaacatatggtaccgagtactctctgagtagtgcagacctgtcatctctgtctgggtttaacaccgccagcgctcttcaccttggttcagtaactggctggcaacagcaacacctacataacatgccaccatctgccctcagtcagttgggagaccgtaccaccaccccttcgagatacccacaacacacgcgccacgaggcggggagatctcctgttgacagcttgagcagctgtagcagttcgtacgacgggagcgaccgagaggatcaccggaacgaattccactcccccattggactcaccagaccttcgccggacgaaagggaaagtccctcagtcaagcgcatgcgactttctgaaggatgggcaacatga

SEQ ID NO: 1320 - protein, 441 aa, Homo sapiens
MGRKKIQITRIMDERNRQVTFTKRKFGLMKKAYELSVLCDCEIALIIFNSTNKLFQYASTDMDKVLLKYTEYNEPHESRTNSDIVETLRKKGLNGCDSPDPDADDSVGHSPESEDKYRKINEDIDLMISRQRLCAVPPPNFEMPVSIPVSSHNSLVYSNPVSSLGNPNLLPLAHPSLQRNSMSPGVTHRPPSAGNTGGLMGGDLTSGAGTSAGNGYGNPRNSPGLLVSPGNLNKNMQAKSPPPMNLGMNNRKPDLRVLIPPGSKNTMPSVICTKLSLYNQRINNSQSAQSLATPVVSVATPTLPGQGMGGYPSAISTTYGTEYSLSSADLSSLSGFNTASALHLGSVTGWQQQHLHNMPPSALSQLGDRTTTPSRYPQHTRHEAGRSPVDSLSSCSSSYDGSDREDHRNEFHSPIGLTRPSPDERESPSVKRMRLSEGWAT

SEQ ID NO: 1321 - DNA, 4956 bp, Homo sapiens
ctcggctggagtgtgggtggcttggtgagccggtggtcaggaattctctctcctccttgcaattttcctttctgtctgggagcacgccaagatgtcccttgtgactgtccccttctaccagaagagacataggcacttcgaccagtcctaccgtaatattcaaacacggtacctgctggacgaatatgcgtcaaaaaagcgagcttccacccaggcatcttcccagaagtccttgagtcagcggtcgtcttcacagagagcctccagccagacgtccctgggaggaaccatctgcagggtctgtgcgaagcgagtgagcacgcaggaagatgaggagcaggagaacagaagcaggtaccagtccctggtggccgcctatggtgaggccaagcgacagcgcttcctcagcgagctggcccacttggaggaggatgtccacctggcacgctcccaggcccgcgacaagctggacaaatacgccattcagcagatgatggaggacaagctggcctgggagagacacacatttgaagagcggataagcagggctcctgagatcctggtgcggctgcgatcccacaccgtctgggagaggatgtctgtgaaactctgcttcaccgtgcaaggatttcccacgcccgtggtgcagtggtacaaagatggcagtctgatttgccaggcggctgaaccgggaaagtacaggattgagagcaactatggcgtacacacactggagatcaacagggcagactttgacgacactgcgacatactcagcagtggccaccaatgcccacggacaagtgtccaccaacgcggcggtggtggtgagaaggttccggggagacgaggaaccattccgttcggtgggactcccgattggattgcccctgtcatcgatgattccgtacacgcacttcgacgtccagtttttggagaagtttggggtcaccttcaggagggaaggcgagacggtcactctcaagtgcaccatgctggtgacgccggacctgaagcgggtgcagccgcgcgccgagtggtaccgcgatgacgtgctgttgaaagagtccaagtggacgaagatgttctttggagaaggccaggcctccctgtccttcagccacctgcacaaggacgacgagggcctgtacaccctgcgcatcgtgtctcggggcggcgtcagcgaccacagcgccttcctgtttgtcagagatgctgacccgctggtcacaggggcccccggtgcacccatggacttgcagtgccacgacgccaaccgggactacgtcatcgtgacctggaagccgcccaacaccaccactgagagccccgtcatgggctattttgtggaccgatgtgaagtaggaacgaataattgggtgcagtgcaatgatgcaccggtgaaaatctgcaaatacccggtcacagggctttttgaaggaaggtcttacatattccgagtgagggcagtgaacagtgcgggcatcagccgaccctccagggtctctgatgcggtggctgcacttgaccccttggacctcagaaggttacaagccgttcatttggagggagagaaggagattgccatttatcaggatgaccttgaaggtgacgcccaggttccagggcctcccaccggtgtgcacgcttccgagatcagcagaaactatgtcgtcctcagctgggagccacccactccccgtggcaaggacccgctcatgtacttcattgagaagtcggtggtggggagcggcagctggcagagagtcaacgcccagacggctgtgagatccccgagatatgccgtgtttgacctcatggaagggaagtcttatgtgttccgagtgctgtcagcaaaccggcatggcctgagcgaaccttcggagataacgtcccccattcaggcccaggatgtgaccgttgtcccttctgctccgggtcgggttcttgcttcccgaaacaccaagacgtcggtggtggtgcagtgggaccgacctaagcatgaggaggacctgctgggctactacgtggactgctgtgtggccggaaccaacctctgggagccctgcaaccacaagcccattggatacaacaggttcgtggtgcacggcttaaccacgggagagcagtacatcttccgagtcaaggcggtcaatgctgtggggatgagtgaaaattcccaggaatcagacgtcataaaagtgcaggccgcactcaccgtcccgtcccatccttatgggattacgctcctcaactgtgacggccactccatgaccctcggctggaaggtcccgaaattcagtggtggctcgcccatcctgggctactacctggacaagcgtgaagttcaccataaaaactggcacgaggtcaattcctcacccagcaaaccgacaatcctaacggtggacggcttgacggaaggctcactctacgagttcaaaatcgccgccgtcaacctggccggcatcggggagccctcagatcccagtgagcacttcaagtgtgaggcctggaccatgccggagcccggtcctgcctacgacttgacgttctgtgaggtcagggacacgtccttggtcatgctgtggaaggcccctgtgtactccggcagcagccctgtttctggatatttcgtggacttcagggaggaggatgctggagagtggatcactgtaaatcagacgacaacagccaaccgttatttaaaggtctctgacctgcagcaaggtaagacctatgtcttcagggtccgggcagtcaatgcaaatggcgtggggaagccctcagacacgtcggagcctgtgctggtagaggcgagaccaggcaccaaggaaatcagtgctggtgtcgatgaacaaggcaacatctatctgggcttcgactgccaggaaatgacagacgcgtctcagttcacctggtgtaaatcctacgaggagatttcagatgatgagaggtttaaaatcgaaaccgtgggggatcactccaagctgtacttaaagaatccggataaggaggatttagggacttactccgtgtctgtaagtgatacagacggagtgtcctccagttttgttctggacccagaagagctcgagcgtttgatggcattgagcaatgaaataaagaaccccacaattcctctgaaatcggaattagcttatgagatttttgataaggggcgggttcgcttctggctccaggctgagcacttatcaccagatgccagctaccgatttattattaacgacagagaagtctctgacagcgagatacacagaattaaatgtgacaaagctactggcattattgagatggtgatggatcgatttagtattgaaaatgaggggacctacactgtgcagattcatgatgggaaagccaaaagtcagtcttctctagttcttattggagatgcattcaagactgtgctggaagaggctgagtttcaaaggaaagaatttctcaggaaacaaggccctcattttgctgagtacttgcactgggatgtcacggaagaatgtgaagttcgacttgtttgcaaggttgcaaacaccaagaaagaaaccgttttcaaatggctcaaggatgatgttctgtatgaaacggagacactgcctaacctggagaggggaatctgtgagctcctcatcccaaagttgtcaaagaaggaccacggtgaatacaaggcaaccttgaaagatgacagaggccaagatgtgtccatccttgaaatagctggcaaagtgtatgatgatatgattttggcaatgagtagagtctgtgggaaatctgcttcgccactgaaggtactctgcaccccagaaggaatacgacttcagtgtttcatgaagtattttacagacgaaatgaaagtgaactggtgtcacaaagatgctaagatctcatccagtgagcatatgagaatcggggggagtgaagagatggcttggctgcagatatgtgagccgactgagaaggataaaggaaaatacacttttgagattttcgatggcaaagacaaccatcaacgctcccttgacctgtccggacaagcttttgatgaagcatttgcagaattccagcaattcaaagctgctgcttttgcagagaagaatcgtggcaggttgatcggcggcttgcctgacgtggtgaccatcatggaagggaagaccttgaatctgacctgcacggtgtttggaaaccctgaccccgaagtgatttggttcaagaacgaccaggacatccagctcagcgagcacttctcggtgaaggtggagcaggccaagtacgtcagcatgaccatcaaaggcgtgacctccgaggactcgggcaagtacagcatcaacatcaagaataagtatggcggggagaagatcgacgtgacagtgagcgtgtacaaacacggggagaagatcccggacatggccccgccccagcaagccaagcccaagctcatccccgcgtctgcctcagcggcaggccagtgaaggcgttttcctagcctggagatgggaaaatatgcttggcagagacaggaatgctgtgtgcttgttccaaatgagcagctggcatccgagtggtgtcctgtgtgggctgatagttgatcacacattgtgcttttgatttttgcatttggtgatgaatattttatacccgtctaagggagaaagctaatgttttccacaagactgaacaacgtgtatttacacgagggtagacggcagatgcctgacagagagtgggttggcagacaacacactagcattttcacgggtgtgggcacatgggtgtggcacctggacgtgtgcagcatgtggcggtctgtgtgaagccaccgtgcttctctttggggggccgcgagatctagcatctctgaaatcctggctgtcgaggctttgaagcatgtgttacctggttaagcttgttttctcttgctttaggcaaataaaagttt

SEQ ID NO: 1322 - protein, 1465 aa, Homo sapiens
MSLVTVPFYQKRHRHFDQSYRNIQTRYLLDEYASKKRASTQASSQKSLSQRSSSQRASSQTSLGGTICRVCAKRVSTQEDEEQENRSRYQSLVAAYGEAKRQRFLSELAHLEEDVHLARSQARDKLDKYAIQQMMEDKLAWERHTFEERISRAPEILVRLRSHTVWERMSVKLCFTVQGFPTPVVQWYKDGSLICQAAEPGKYRIESNYGVHTLEINRADFDDTATYSAVATNAHGQVSTNAAVVVRRFRGDEEPFRSVGLPIGLPLSSMIPYTHFDVQFLEKFGVTFRREGETVTLKCTMLVTPDLKRVQPRAEWYRDDVLLKESKWTKMFFGEGQASLSFSHLHKDDEGLYTLRIVSRGGVSDHSAFLFVRDADPLVTGAPGAPMDLQCHDANRDYVIVTWKPPNTTTESPVMGYFVDRCEVGTNNWVQCNDAPVKICKYPVTGLFEGRSYIFRVRAVNSAGISRPSRVSDAVAALDPLDLRRLQAVHLEGEKEIAIYQDDLEGDAQVPGPPTGVHASEISRNYVVLSWEPPTPRGKDPLMYFIEKSVVGSGSWQRVNAQTAVRSPRYAVFDLMEGKSYVFRVLSANRHGLSEPSEITSPIQAQDVTVVPSAPGRVLASRNTKTSVVVQWDRPKHEEDLLGYYVDCCVAGTNLWEPCNHKPIGYNRFVVHGLTTGEQYIFRVKAVNAVGMSENSQESDVIKVQAALTVPSHPYGITLLNCDGHSMTLGWKVPKFSGGSPILGYYLDKREVHHKNWHEVNSSPSKPTILTVDGLTEGSLYEFKIAAVNLAGIGEPSDPSEHFKCEAWTMPEPGPAYDLTFCEVRDTSLVMLWKAPVYSGSSPVSGYFVDFREEDAGEWITVNQTTTANRYLKVSDLQQGKTYVFRVRAVNANGVGKPSDTSEPVLVEARPGTKEISAGVDEQGNIYLGFDCQEMTDASQFTWCKSYEEISDDERFKIETVGDHSKLYLKNPDKEDLGTYSVSVSDTDGVSSSFVLDPEELERLMALSNEIKNPTIPLKSELAYEIFDKGRVRFWLQAEHLSPDASYRFIINDREVSDSEIHRIKCDKATGIIEMVMDRFSIENEGTYTVQIHDGKAKSQSSLVLIGDAFKTVLEEAEFQRKEFLRKQGPHFAEYLHWDVTEECEVRLVCKVANTKKETVFKWLKDDVLYETETLPNLERGICELLIPKLSKKDHGEYKATLKDDRGQDVSILEIAGKVYDDMILAMSRVCGKSASPLKVLCTPEGIRLQCFMKYFTDEMKVNWCHKDAKISSSEHMRIGGSEEMAWLQICEPTEKDKGKYTFEIFDGKDNHQRSLDLSGQAFDEAFAEFQQFKAAAFAEKNRGRLIGGLPDVVTIMEGKTLNLTCTVFGNPDPEVIWFKNDQDIQLSEHFSVKVEQAKYVSMTIKGVTSEDSGKYSINIKNKYGGEKIDVTVSVYKHGEKIPDMAPPQQAKPKLIPASASAAGQ

SEQ ID NO: 1323 - DNA, 5182 bp, Homo sapiens
cgcgctggcgccatggcggagcaggagagcctggaattcggcaaggcagacttcgtgctgatggacaccgtctccatgcccgagttcatggccaacctcaggctcagatttgaaaaagggcgcatctatacgttcattggagaagtcgtcgtttctgtgaacccttacaagttgttgaacatctatggaagagacacaattgagcagtataaaggccgtgagctgtatgagagaccgcctcacctttttgctattgcggatgctgcttacaaggctatgaagaggcgatcaaaagacacttgtattgtgatatcaggggaaagtggagctggtaaaacggaagccagtaagtacattatgcagtatattgcggccatcaccaaccccagtcagagagcagaggttgaaagagtgaagaatatgttgcttaagtccaactgtgttttggaagcttttggaaatgccaaaaccaaccgtaatgacaactcaagcaggtttggaaaatacatggatatcaactttgacttcaagggtgaccctattggtgggcatatcaataactacttactagaaaagtctcgagtgattgtgcaacagccaggagaaagaagctttcattctttctatcagctactccaaggaggttcagaacaaatgctacgctctctacatctccagaaatccctttcatcctacaactatattcatgtgggagctcaattaaagtcttctatcaatgatgctgccgaattcagagttgttgctgatgccatgaaagtcattggcttcaaacctgaggagatccaaacagtgtataagattttggctgctattctgcacttgggaaatttaaaatttgtagtagatggtgacacgcctcttattgagaatggcaaagtagtatctatcatagcagaattgctctctactaagacagatatggttgagaaagcccttctttaccggactgtggccacaggccgtgacatcattgacaagcagcacacagaacaagaggccagctacggcagagacgcctttgccaaggcaatatatgagcgccttttttgttggatcgttactcgcatcaatgatattattgaggtcaagaactatgacaccacaatccatgggaaaaacactgttattggtgtcttggatatctatggctttgaaatctttgacaacaacagttttgaacaattctgtatcaattactgcaatgagaaactgcagcagctatttattcagctggttctgaagcaagaacaagaggaataccagcgggaagggatcccctggaaacatattgactacttcaacaatcagatcattgttgacctcgtggagcaacagcacaaagggatcattgcaatccttgatgatgcttgcatgaatgtcggcaaagtcaccgatgaaatgtttcttgaagcacttaacagtaaattgggcaaacacgcccatttttccagccgaaagctctgtgcctcagacaaaattctggagtttgatcgagattttcgaattcgacattatgcaggcgatgtagtctattctgtcattggttttattgacaaaaataaagatactttatttcaagatttcaagcgccttatgtataacagttcaaatcctgtgctcaagaatatgtggcctgaaggcaaactgagcattacagaggtgaccaagcgacctctgactgctgctaccttgtttaagaattctatgattgctctagtagacaaccttgcatcaaaggaaccatattacgttcgttgcatcaaacccaatgacaagaaatctccacagatatttgatgatgaacgctgccggcaccaagtagaatatcttggactactggaaaatgtgagagtgcgtcgggcaggatttgccttccgccagacatacgagaagtttcttcacaggtataagatgatctctgaattcacctggcccaaccatgaccttccttcagacaaagaggctgtcaagaaactaattgaacggtgtggttttcaggatgatgtagcttatgggaagaccaaaattttcattcgaacaccccgaacattgtttaccttggaagaactccgtgcccagatgctcataaggattgtcctctttctacaaaaggtgtggcggggcaccctggcccgcatgcggtacaaaagaaccaaggcagctctgacaataatcaggtactaccggcgctacaaagtgaagtcgtacatccacgaggtggccagacgcttccatggcgtcaagaccatgcgagactacgggaagcacgtgaagtggccaagccctcctaaagttcttcgccgttttgaggaggccctgcagacgattttcaatagatggagagcatcccagctcatcaagagcattccggcctcagacctgccccaggtcagggcaaaggttgcagccgtggaaatgttgaagggtcaaagggctgacctcgggctccagagggcctgggagggcaactatcttgcttcaaagccagatacacctcagacctcaggcacttttgtccctgttgctaatgaattgaaacggaaggacaaatacatgaatgtcctcttttcctgtcacgtccgtaaggtaaatcgatttagtaaggtggaagacagagcaatttttgtcactgaccgtcacctgtataaaatggatcccactaaacagtacaaggtgatgaagactatccctctatacaatttgactggtctgagtgtctccaatggaaaggaccaacttgtagtgttccatacgaaagacaacaaagacctcattgtctgcctcttcagcaaacagccaacccatgagagtcgaattggagaacttgttggagtgctggtgaatcatttcaagagtgagaagcgccaccttcaagtgaacgtcaccaacccagtacagtgcagcctgcacgggaagaagtgcaccgtctccgtggagacgcggctcaaccagccccagcccgacttcaccaagaatcgctcgggcttcatcctcagcgtgcccgggaactgacgccccgcggaggcctggcccggagcccggccacactccgagtcctgggtcccagtccagctgctgcctcccaacccatgcccgctagaaacctgctgcgagggcccctcccagaggagccccgcccctgtaagatttccttcctggttttctgcctttggtatcatcttcctctgtccttactgtccacggtccctgttcaataagccaaagaccctggtgccccgcccagacccctgggctgacgtccagaccaatctcaccccagaggcaactggatggtgcctttagttggtgcggatgccccgtggccaggtcaagtcagagcacctggacaggtgtcctccctgctgctgaccctgcagagggaaggggtggggatgcaggaccccactctgcgggagccccatagccacctctcttgcccaaggtgagccagccctggggacccagctcagggaggctctgctcagagttcggcggacccaccccaacccaactcccagccgccagccaaagccactgggtgagcagagtcacccacagggccagcccctcagccaggagccagtggcaggagcggaacagcccatccagcagagtgagtccatccttcccaggttctcccctgggagactccctttgccaccaaggcccccaccagggcctctgaccaccgctctggagaggacagtgtggcatgctccaaggatcatcttacttaactcgcagcctgtggctgtggtcctcttatagatactttcaccgtttgcagggttgctaatcagatacctgctgtcaccacacttgggtcaggaaccctaatgagaacggggagctgccagggtgagggcagccctcagggtcggccgctttccctctggaccacctcccgctgcgtttcctactcagagaaacagcaagggcggggtcaagacacgggatgacgggaagcaggaagcggggcagcagcacagcgtggggtcctggcactgcaggccaggccaggatgcccaccccgccctctacacggccccttggggcctgcgcccgtgaaactggtgccagggagcactgccagcttgccagtttctgcccagcaaaagcacgtatgcttcaggggccttctgagaccaccttccccactgagccccagctgctgagaaggccttgagggaagtagaggctgggagcaaatgccccatgcggtgagaggatgaggggagcctacgcctcaggcatgtggtgagaggatgagggggagggagccaacgcctcaggtggagtgggcagaggtgcaagagagggatgtactgaagcttcttcccgtcctgccacagacacttctcctgccttcccaccctgacccggcagaacccaccaagtgcctgtgtgcagcctcctgtgcctcacccagggcctgaccccagagtggtcccaacaacccggtctcatgcccactccccatccctgcttcccaaaaattgcactgtgtgcagtttgcaacaaagaatcccgctggcatcctgtccttgggaaccctttctcattctccaagcctggtcagctgcctgcacaggcagaggtgccctcagcccagattagcaacactcatagttttgccaattaccagtagacactagtggaaccatctaactggaacttcctctctccttccacttatttcctcaaacttgttgctttacactagacacatgcaaatgtatgttttaaacacaccaaaacagatcatgccaaatgagttgcctgtcaaaggctggagggcaggaggagggcctgggtttgggttctttcctcccagcctttggatggtgccttgggccccttagccccagcgccagggcctcccagctgaggccacaggacaagcacttttttatgatgtactaaaagccacagtatgtggcaactgcaaaaggatcaggaatttagggtatgatctcggtcacgtgtcccgggcgctgaggggaaaggaagcgggcatgattgtagacaatgagggggttctcttgatgtaatgaaatgcaattttatggtttggtgcaaaaactcctattttccagtaaattaactttatttctaaagcatattttgatttgccatcaagagcaataaagcattaaatctt

SEQ ID NO: 1324 - protein, 1006 aa, Homo sapiens
MAEQESLEFGKADFVLMDTVSMPEFMANLRLRFEKGRIYTFIGEVVVSVNPYKLLNIYGRDTIEQYKGRELYERPPHLFAIADAAYKAMKRRSKDTCIVISGESGAGKTEASKYIMQYIAAITNPSQRAEVERVKNMLLKSNCVLEAFGNAKTNRNDNSSRFGKYMDINFDFKGDPIGGHINNYLLEKSRVIVQQPGERSFHSFYQLLQGGSEQMLRSLHLQKSLSSYNYIHVGAQLKSSINDAAEFRVVADAMKVIGFKPEEIQTVYKILAAILHLGNLKFVVDGDTPLIENGKVVSIIAELLSTKTDMVEKALLYRTVATGRDIIDKQHTEQEASYGRDAFAKAIYERLFCWIVTRINDIIEVKNYDTTIHGKNTVIGVLDIYGFEIFDNNSFEQFCINYCNEKLQQLFIQLVLKQEQEEYQREGIPWKHIDYFNNQIIVDLVEQQHKGIIAILDDACMNVGKVTDEMFLEALNSKLGKHAHFSSRKLCASDKILEFDRDFRIRHYAGDVVYSVIGFIDKNKDTLFQDFKRLMYNSSNPVLKNMWPEGKLSITEVTKRPLTAATLFKNSMIALVDNLASKEPYYVRCIKPNDKKSPQIFDDERCRHQVEYLGLLENVRVRRAGFAFRQTYEKFLHRYKMISEFTWPNHDLPSDKEAVKKLIERCGFQDDVAYGKTKIFIRTPRTLFTLEELRAQMLIRIVLFLQKVWRGTLARMRYKRTKAALTIIRYYRRYKVKSYIHEVARRFHGVKTMRDYGKHVKWPSPPKVLRRFEEALQTIFNRWRASQLIKSIPASDLPQVRAKVAAVEMLKGQRADLGLQRAWEGNYLASKPDTPQTSGTFVPVANELKRKDKYMNVLFSCHVRKVNRFSKVEDRAIFVTDRHLYKMDPTKQYKVMKTIPLYNLTGLSVSNGKDQLVVFHTKDNKDLIVCLFSKQPTHESRIGELVGVLVNHFKSEKRHLQVNVTNPVQCSLHGKKCTVSVETRLNQPQPDFTKNRSGFILSVPGN

SEQ ID NO: 1325 - DNA, 3500 bp, Homo sapiens
gtctcggtgtcccggcccctacagcgcccggcagccgcggcgggaggagcggaaactgtcgggtgcgtcccgttcggagccgcgccggccgagaaggcgccgaggagcagcgaggcggcctctgtccggcccggacccgccgagcggcgtgcgcgccccctccccgtagcctcgcggcgcggcctcgccccggcccctcccgagctcatcgcgggcccacggagcggccccggaggcccgagcgcgcccacctgagcccccgcgctggcgccatggcggagcaggagagcctggaattcggcaaggcagacttcgtgctgatggacaccgtctccatgcccgagttcatggccaacctcaggctcagatttgaaaaagggcgcatctatacgttcattggagaagtcgtcgtttctgtgaacccttacaagttgttgaacatctatggaagagacacaattgagcagtataaaggccgtgagctgtatgagagaccgcctcacctttttgctattgcggatgctgcttacaaggctatgaagaggcgatcaaaagacacttgtattgtgatatcaggggaaagtggagctggtaaaacggaagccagtaagtacattatgcagtatattgcggccatcaccaaccccagtcagagagcagaggttgaaagagtgaagaatatgttgcttaagtccaactgtgttttggaagcttttggaaatgccaaaaccaaccgtaatgacaactcaagcaggtttggaaaatacatggatatcaactttgacttcaagggtgaccctattggtgggcatatcaataactacttactagaaaagtctcgagtgattgtgcaacagccaggagaaagaagctttcattctttctatcagctactccaaggaggttcagaacaaatgctacgctctctacatctccagaaatccctttcatcctacaactatattcatgtgggagctcaattaaagtcttctatcaatgatgctgccgaattcagagttgttgctgatgccatgaaagtcattggcttcaaacctgaggagatccaaacagtgtataagattttggctgctattctgcacttgggaaatttaaaatttgtagtagatggtgacacgcctcttattgagaatggcaaagtagtatctatcatagcagaattgctctctactaagacagatatggttgagaaagcccttctttaccggactgtggccacaggccgtgacatcattgacaagcagcacacagaacaagaggccagctacggcagagacgcctttgccaaggcaatatatgagcgccttttttgttggatcgttactcgcatcaatgatattattgaggtcaagaactatgacaccacaatccatgggaaaaacactgttattggtgtcttggatatctatggctttgaaatctttgacaacaacagttttgaacaattctgtatcaattactgcaatgagaaactgcagcagctatttattcagctggttctgaagcaagaacaagaggaataccagcgggaagggatcccctggaaacatattgactacttcaacaatcagatcattgttgacctcgtggagcaacagcacaaagggatcattgcaatccttgatgatgcttgcatgaatgtcggcaaagtcaccgatgaaatgtttcttgaagcacttaacagtaaattgggcaaacacgcccatttttccagccgaaagctctgtgcctcagacaaaattctggagtttgatcgagattttcgaattcgacattatgcaggcgatgtagtctattctgtcattggttttattgacaaaaataaagatactttatttcaagatttcaagcgccttatgtataacagttcaaatcctgtgctcaagaatatgtggcctgaaggcaaactgagcattacagaggtgaccaagcgacctctgactgctgctaccttgtttaagaattctatgattgctctagtagacaaccttgcatcaaaggaaccatattacgttcgttgcatcaaacccaatgacaagaaatctccacagatatttgatgatgaacgctgccggcaccaagtagaatatcttggactactggaaaatgtgagagtgcgtcgggcaggatttgccttccgccagacatacgagaagtttcttcacaggtataagatgatctctgaattcacctggcccaaccatgaccttccttcagacaaagaggctgtcaagaaactaattgaacggtgtggttttcaggatgatgtagcttatgggaagaccaaaattttcattcgaacaccccgaacattgtttaccttggaagaactccgtgcccagatgctcataaggattgtcctctttctacaaaaggtgtggcggggcaccctggcccgcatgcggtacaaaagaaccaaggcagctctgacaataatcaggtactaccggcgctacaaagtgaagtcgtacatccacgaggtggccagacgcttccatggcgtcaagaccatgcgagactacgggaagcacgtgaagtggccaagccctcctaaagttcttcgccgttttgaggaggccctgcagacgattttcaatagatggagagcatcccagctcatcaagagcattccggcctcagacctgccccaggtcagggcaaaggttgcagccgtggaaatgttgaagggtcaaagggctgacctcgggctccagagggcctgggagggcaactatcttgcttcaaagccagatacacctcagacctcaggcacttttgtccctgttgctaatgaattgaaacggaaggacaaatacatgaatgtcctcttttcctgtcacgtccgtaaggtaaatcgatttagtaaggtggaagacagagcaatttttgtcactgaccgtcacctgtataaaatggatcccactaaacagtacaaggtgatgaagactatccctctatacaatttgactggtctgagtgtctccaatggaaaggaccaacttgtagtgttccatacgaaagacaacaaagacctcattgtctgcctcttcagcaaacagccaacccatgagagtcgaattggagaacttgttggagtgctggtgaatcatttcaagagaaaccatctgcttatactctgaataaaattcaagaaagcatagattctacataaacaggcccaagattacatggcaaactgagatgaagaggatgctggctgagaaacaaacaaaagtgttcaattatttgaatgaagtaaggaaagatattttaaaatgtaaatcaacattaaaatctgaaaatggcacagttgatattgcagaaaatagaattgatgtgaaaggaaagtttgaagtctctcagtgtgcagaatttactgttataatgggcaacatgttaactttcttagcaatatacaaaataagggtacatcttacagagaaggcatcttatattcaataaaatatggtaatttaaaacat

SEQ ID NO: 1326 - protein, 961 aa, Homo sapiens
MAEQESLEFGKADFVLMDTVSMPEFMANLRLRFEKGRIYTFIGEVVVSVNPYKLLNIYGRDTIEQYKGRELYERPPHLFAIADAAYKAMKRRSKDTCIVISGESGAGKTEASKYIMQYIAAITNPSQRAEVERVKNMLLKSNCVLEAFGNAKTNRNDNSSRFGKYMDINFDFKGDPIGGHINNYLLEKSRVIVQQPGERSFHSFYQLLQGGSEQMLRSLHLQKSLSSYNYIHVGAQLKSSINDAAEFRVVADAMKVIGFKPEEIQTVYKILAAILHLGNLKFVVDGDTPLIENGKVVSIIAELLSTKTDMVEKALLYRTVATGRDIIDKQHTEQEASYGRDAFAKAIYERLFCWIVTRINDIIEVKNYDTTIHGKNTVIGVLDIYGFEIFDNNSFEQFCINYCNEKLQQLFIQLVLKQEQEEYQREGIPWKHIDYFNNQIIVDLVEQQHKGIIAILDDACMNVGKVTDEMFLEALNSKLGKHAHFSSRKLCASDKILEFDRDFRIRHYAGDVVYSVIGFIDKNKDTLFQDFKRLMYNSSNPVLKNMWPEGKLSITEVTKRPLTAATLFKNSMIALVDNLASKEPYYVRCIKPNDKKSPQIFDDERCRHQVEYLGLLENVRVRRAGFAFRQTYEKFLHRYKMISEFTWPNHDLPSDKEAVKKLIERCGFQDDVAYGKTKIFIRTPRTLFTLEELRAQMLIRIVLFLQKVWRGTLARMRYKRTKAALTIIRYYRRYKVKSYIHEVARRFHGVKTMRDYGKHVKWPSPPKVLRRFEEALQTIFNRWRASQLIKSIPASDLPQVRAKVAAVEMLKGQRADLGLQRAWEGNYLASKPDTPQTSGTFVPVANELKRKDKYMNVLFSCHVRKVNRFSKVEDRAIFVTDRHLYKMDPTKQYKVMKTIPLYNLTGLSVSNGKDQLVVFHTKDNKDLIVCLFSKQPTHESRIGELVGVLVNHFKRNHLLIL

SEQ ID NO: 1327 - DNA, 1915 bp, Homo sapiens
aggctggaggcgggaccagccgctgccgtctccgtctcggtgtcccggcccctacagcgcccggcagccgcggcgggaggagcggaaactgtcgggtgcgtcccgttcggagccgcgccggccgagaaggcgccgaggagcagcgaggcggcctctgtccggcccggacccgccgagcggcgtgcgcgccccctccccgtagcctcgcggcgcggcctcgccccggcccctcccgagctcatcgcgggcccacggagcggccccggaggcccgagcgcgcccacctgagcccccgcgctggcgccatggcggagcaggagagcctggaattcggcaaggcagacttcgtgctgatggacaccgtctccatgcccgagttcatggccaacctcaggctcagatttgaaaaagggcgcatctatacgttcattggagaagtcgtcgtttctgtgaacccttacaagttgttgaacatctatggaagagacacaattgagcagtataaaggccgtgagctgtatgagagaccgcctcacctttttgctattgcggatgctgcttacaaggctatgaagaggcgatcaaaagacacttgtattgtgatatcaggggaaagtggagctggtaaaacggaagccagtaagtacattatgcagtatattgcggccatcaccaaccccagtcagagagcagaggttgaaagagtgaagaatatgttgcttaagtccaactgtgttttggaagcttttggaaatgccaaaaccaaccgtaatgacaactcaagcaggtttggaaaatacatggatatcaactttgacttcaagggtgaccctattggtgggcatatcaataactacttactagaaaagtctcgagtgattgtgcaacagccaggagaaagaagctttcattctttctatcagctactccaaggaggttcagaacaaatgctacgctctctacatctccagaaatccctttcatcctacaactatattcatgtgggagctcaattaaagtcttctatcaatgatgctgccgaattcagagttgttgctgatgccatgaaagtcattggcttcaaacctgaggagatccaaacagtgtataagattttggctgctattctgcacttgggaaatttaaaatttgtagtagatggtgacacgcctcttattgagaatggcaaagtagtatctatcatagcagaattgctctctactaagacagatatggttgagaaagcccttctttaccggactgtggccacaggccgtgacatcattgacaagcagcacacagaacaagaggccagctacggcagagacgcctttgccaaggcaatatatgagcgccttttttgttggatcgttactcgcatcaatgatattattgaggtcaagaactatgacaccacaatccatgggaaaaacactgttattggtgtcttggatatctatggctttgaaatctttgacaacaacagttttgaacaattctgtatcaattactgcaatgagaaactgcagcagctatttattcagctggttctgaagcaagaacaagaggaataccagcgggaagggatcccctggaaacatgtgggattgctataatttgatagactgccttgttgatgcccagaacatcctgagttagaaccagtaaacctgttttcactttatggctgctaccacgtggacttactggtttatatctgtctgttaggtttagcatactttattaagttataccttaaattggctgaactttgcttcagaatctagtttcttcttccctttttcctcctttttctcctcttctactttgtagactatatggtattttattgtcttcagttaatgttgtttatattctctgaaacctacacattaaaatacttgttttactttgc

SEQ ID NO: 1328 - protein, 436 aa, Homo sapiens
MAEQESLEFGKADFVLMDTVSMPEFMANLRLRFEKGRIYTFIGEVVVSVNPYKLLNIYGRDTIEQYKGRELYERPPHLFAIADAAYKAMKRRSKDTCIVISGESGAGKTEASKYIMQYIAAITNPSQRAEVERVKNMLLKSNCVLEAFGNAKTNRNDNSSRFGKYMDINFDFKGDPIGGHINNYLLEKSRVIVQQPGERSFHSFYQLLQGGSEQMLRSLHLQKSLSSYNYIHVGAQLKSSINDAAEFRVVADAMKVIGFKPEEIQTVYKILAAILHLGNLKFVVDGDTPLIENGKVVSIIAELLSTKTDMVEKALLYRTVATGRDIIDKQHTEQEASYGRDAFAKAIYERLFCWIVTRINDIIEVKNYDTTIHGKNTVIGVLDIYGFEIFDNNSFEQFCINYCNEKLQQLFIQLVLKQEQEEYQREGIPWKHVGLL

SEQ ID NO: 1329 - DNA, 7627 bp, Homo sapiens
ggcgctgagcgagctcggagcccgcgctgtgcgcctgcggccggggcgccccgccgagcgccggtgccccggctcccgggccgccttcgccgcgcgggaaggattcttcaaaattaacagaaaccaattcgggccagctgaagagaaaaaataaaggtggctcccggctgcctctgctgcagttcagagcaacttcaggagcttcccagccgagagcttcaggacgcctttcctgtcccactggcccagttgccacaacaaacaacagagaagacggtgaccatgggggatgtgaagctggttgcctcgtcacacatttccaaaacctccctcagtgtggatccctcaagagttgactccatgcccctgacagaggcccctgctttcattttgccccctcggaacctctgcatcaaagaaggagccaccgccaagttcgaagggcgggtccggggttacccagagccccaggtgacatggcacagaaacgggcaacccatcaccagcgggggccgcttcctgctggattgcggcatccgggggactttcagccttgtgattcatgctgtccatgaggaggacaggggaaagtatacctgtgaagccaccaatggcagtggtgctcgccaggtgacagtggagttgacagtagaaggtgattttgcgaagcagcttggtcagcctgttgtttccaaaaccttaggggatagattttcagctccagcagtggagacccgtcctagcatctggggggagtgcccaccaaagtttgctaccaagctgggccgagttgtggtcaaagaaggacagatgggacgattctcctgcaagatcactggccggccccaaccgcaggtcacctggctcaagggaaatgttccactgcagccgagtgcccgtgtgtctgtgtctgagaagaacggcatgcaggttctggaaatccatggagtcaaccaagatgacgtgggagtgtacacgtgcctggtggtgaacgggtcggggaaggcctcgatgtcagctgaactttccatccaaggtatcgaccagagctgcttgtcatttgtgagagaaacaaaagccaccaattcagatgtcaggaaagaggtgaccaatgtaatctcaaaggagtcgaagctggacagtctggaggctgcagccaaaagcaagaactgctccagcccccagagaggtggctccccaccctgggctgcaaacagccagcctcagcccccaagggagtccaagctggagtcatgcaaggactcgcccagaacggccccgcagaccccggtccttcagaagacttccagctccatcaccctgcaggccgcaagagttcagccggaaccaagagcaccaggcctgggggtcctatcaccttctggagaagagaggaagaggccagctcctccccgtccagccaccttccccaccaggcagcctggcctggggagccaagatgttgtgagcaaggctgctaacaggagaatccccatggagggccagagggattcagcattccccaaatttgagagcaagccccaaagccaggaggtcaaggaaaatcaaactgtcaagttcagatgtgaagggcttgccgtgatggaggtggccccctccttctccagtgtcctgaaggactgcgctgttattgagggccaggattttgtgctgcagtgctccgtacgggggaccccagtgccccggatcacttggctgctgaatgggcagcccatccagtacgctcgctccacctgcgaggccggcgtggctgagctccacatccaggatgccctgccggaggaccatggcacctacacctgcctagctgagaatgccttggggcaggtgtcctgcagcgcctgggtcaccgtccatgaaaagaagagtagcaggaagagtgagtaccttctgcctgtggctcccagcaagcccactgcacccatcttcctgcagggcctctctgatctcaaagtcatggatggaagccaggtcactatgactgtccaagtgtcagggaatccaccccctgaagtcatctggctgcacaatgggaatgagatccaagagtcagaggacttccactttgaacagagaggaactcagcacagcctttgtatccaggaagtgttcccggaggacacgggcacgtacacctgcgaggcctggaacagcgctggagaggtccgcacccaggccgtgctcacggtacaagagcctcacgatggcacccagccctggttcatcagtaagcctcgctcagtgacagcctccctgggccagagtgtcctcatctcctgcgccatagctggtgacccctttcctaccgtgcactggctcagagatggcaaagccctctgcaaagacactggccacttcgaggtgcttcagaatgaggacgtgttcaccctggttctaaagaaggtgcagccctggcatgccggccagtatgagatcctgctcaagaaccgggttggcgaatgcagttgccaggtgtcactgatgctacagaacagctctgccagagcccttccacgggggagggagcctgccagctgcgaggacctctgtggtggaggagttggtgctgatggtggtggtagtgaccgctatgggtccctgaggcctggctggccagcaagagggcagggttggctagaggaggaagacggcgaggacgtgcgaggggtgctgaagaggcgcgtggagacgaggcagcacactgaggaggcgatccgccagcaggaggtggagcagctggacttccgagacctcctggggaagaaggtgagtacaaagaccctatcggaagacgacctgaaggagatcccagccgagcagatggatttccgtgccaacctgcagcggcaagtgaagccaaagactgtgtctgaggaagagaggaaggtgcacagcccccagcaggtcgattttcgctctgtcctggccaagaaggggacttccaagacccccgtgcctgagaaggtgccaccgccaaaacctgccaccccggattttcgctcagtgctgggtggcaagaagaaattaccagcagagaatggcagcagcagtgccgagaccctgaatgccaaggcagtggagagttccaagcccctgagcaatgcacagccttcagggcccttgaaacccgtgggcaacgccaagcctgctgagaccctgaagccaatgggcaacgccaagcctgccgagaccctgaagcccatgggcaatgccaagcctgatgagaacctgaaatccgctagcaaagaagaactcaagaaagacgttaagaatgatgtgaactgcaagagaggccatgcagggaccacagataatgaaaagagatcagagagccaggggacagccccagccttcaagcagaagctgcaagatgttcatgtggcagagggcaagaagctgctgctccagtgccaggtgtcttctgaccccccagccaccatcatctggacgctgaacggaaagaccctcaagaccaccaagttcatcatcctctcccaggaaggctcactctgctccgtctccatcgagaaggcactgcctgaggacagaggcttatacaagtgtgtagccaagaatgacgctggccaggcggagtgctcctgccaagtcaccgtggatgatgctccagccagtgagaacaccaaggccccagagatgaaatcccggaggcccaagagctctcttcctcccgtgctaggaactgagagtgatgcgactgtgaaaaagaaacctgcccccaagacacctccgaaggcagcaatgccccctcagatcatccagttccctgaggaccagaaggtacgcgcaggagagtcagtggagctgtttggcaaagtgacaggcactcagcccatcacctgtacctggatgaagttccgaaagcagatccaggaaagcgagcacatgaaggtggagaacagcgagaatggcagcaagctcaccatcctggccgcgcgccaggagcactgcggctgctacacactgctggtggagaacaagctgggcagcaggcaggcccaggtcaacctcactgtcgtggataagccagaccccccagctggcacaccttgtgcctctgacattcggagctcctcactgaccctgtcctggtatggctcctcatatgatgggggcagtgctgtacagtcctacagcatcgagatctgggactcagccaacaagacgtggaaggaactagccacatgccgcagcacctctttcaacgtccaggacctgctgcctgaccacgaatataagttccgtgtacgtgcaatcaacgtgtatggaaccagtgagccaagccaggagtctgaactcacaacggtaggagagaaacctgaagagccgaaggatgaagtggaggtgtcagatgatgatgagaaggagcccgaggttgattaccggacagtgacaatcaatactgaacaaaaagtatctgacttctacgacattgaggagagattaggatctgggaaatttggacaggtctttcgacttgtagaaaagaaaactcgaaaagtctgggcagggaagttcttcaaggcatattcagcaaaagagaaagagaatatccggcaggagattagcatcatgaactgcctccaccaccctaagctggtccagtgtgtggatgcctttgaagaaaaggccaacatcgtcatggtcctggagatcgtgtcaggaggggagctgtttgagcgcatcattgacgaggactttgagctgacggagcgtgagtgcatcaagtacatgcggcagatctcggagggagtggagtacatccacaagcagggcatcgtgcacctggacctcaagccggagaacatcatgtgtgtcaacaagacgggcaccaggatcaagctcatcgactttggtctggccaggaggctggagaatgcggggtctctgaaggtcctctttggcaccccagaatttgtggctcctgaagtgatcaactatgagcccatcggctacgccacagacatgtggagcatcggggtcatctgctacatcctagtcagtggcctttcccccttcatgggagacaacgataacgaaaccttggccaacgttacctcagccacctgggacttcgacgacgaggcattcgatgagatctccgacgatgccaaggatttcatcagcaatctgctgaagaaagatatgaaaaaccgcctggactgcacgcagtgccttcagcatccatggctaatgaaagataccaagaacatggaggccaagaaactctccaaggaccggatgaagaagtacatggcaagaaggaaatggcagaaaacgggcaatgctgtgagagccattggaagactgtcctctatggcaatgatctcagggctcagtggcaggaaatcctcaacagggtcaccaaccagcccgctcaatgcagaaaaactagaatctgaagaagatgtgtcccaagctttccttgaggctgttgctgaggaaaagcctcatgtaaaaccctatttctctaagaccattcgcgatttagaagttgtggagggaagtgctgctagatttgactgcaagattgaaggatacccagaccccgaggttgtctggttcaaagatgaccagtcaatcagggagtcccgccacttccagatagactacgatgaggacgggaactgctctttaattattagtgatgtttgcggggatgacgatgccaagtacacctgcaaggctgtcaacagtcttggagaagccacctgcacagcagagctcattgtggaaacgatggaggaaggtgaaggggaaggggaagaggaagaagagtgaaacaaagccagagaaaagcagtttctaagtcatattaaaaggactatttctctaaaactcaaaaaaaaaaaaaaaactcaagatagtaaaagcacctagtgtgatagattatcggttaggtcatttgtgggttgattcttcagaaacagcagttgatacctagcagcgttattgatgggcattaatctatgttagttggcaccttaagatactagtgcagctagatttcatttagggaaatcaccagtaacttgactgaccaattgattttagagagaaagtaaccaaaccaaatatttatctgggcaaagtcataaattctccacttgaatgcgctcatgaaaaataaggccaaaacaagagttctgggccacagctcagcccagagggttcctggggatgggaggcctctctctccccaccccctgactctagagaactgggttttctcccagtactccagcaattcatttctgaaagcagttgagccactttattccaaagtacactgcagatgttcaaactctccatttctctttccccttccacctgccagttttgctgactctcaacttgtcatgagtgtaagcattaaggacattatgcttcttcgattctgaagacaggtccctgctcatggatgactctggcttccttaggaaaatatttttcttccaaaatcagtaggaaatctaaacttatcccctctttgcagatgtctagcagcttcagacatttggttaagaacccatgggaaaaaaaaaatccttgctaatgtggtttcctttgtaaaccaggattcttatttgtgctgttatagaatatcagctctgaacgtgtggtaaagatttttgtgtttgaatataggagaaatcagtttgctgaaaagttagtcttaattatctattggccacgatgaaacagatttcaactgataaagagctggagaactccatgtactttggaatctcctccaagatagccagagtttaatacatcttcattctcaacactctccaaagaacttgacctaccttatgggttccatatttttcttcttaaatgtgcatcaatcatgccttgcccccaacctttaaatatattcttagacctggtaaatgcactcagacttgcgtctttaggaatttttaactttctttcactacattggcacttaaattttttctttataaagctttttgaaggtcataaacaaagaccataattgatgatagacctaatacatttcctctgtgtgtgtgtgtaacattccaaatactttttttttcttttccactgtttgtaaggtgcaacaatttaatatttttaagggactttttaagagttccttaagaaccaatttaaaattacttcagtgcaatcctacacagtatcaacattagaattttgatattagtcttatgttatcttccattctatttttatctgctttttgctgctagtttcaaactgccagtatttttccttttgcttttaaaatagttacaatatttttcatgatagccacagtattgccacagtttattataataaagggtttttatttgatttagcgcattcaaagcttttttctatcacttttgtgttcagaatataacctttgtgtgcgtgtatgttgtgtgtgtgcatgtgtggcgtatatgtgtgttacaggttaatgccttcttggaattgtgttaatgttctcttggtttattatgccatcagaatggtaaatgagaacactacaactgtagtcagctcacaatttttaaataaaggataccacagtgcatgctgtttgttc

SEQ ID NO: 1330 - protein, 1845 aa, Homo sapiens
MGDVKLVASSHISKTSLSVDPSRVDSMPLTEAPAFILPPRNLCIKEGATAKFEGRVRGYPEPQVTWHRNGQPITSGGRFLLDCGIRGTFSLVIHAVHEEDRGKYTCEATNGSGARQVTVELTVEGDFAKQLGQPVVSKTLGDRFSAPAVETRPSIWGECPPKFATKLGRVVVKEGQMGRFSCKITGRPQPQVTWLKGNVPLQPSARVSVSEKNGMQVLEIHGVNQDDVGVYTCLVVNGSGKASMSAELSIQGIDQSCLSFVRETKATNSDVRKEVTNVISKESKLDSLEAAAKSKNCSSPQRGGSPPWAANSQPQPPRESKLESCKDSPRTAPQTPVLQKTSSSITLQAARVQPEPRAPGLGVLSPSGEERKRPAPPRPATFPTRQPGLGSQDVVSKAANRRIPMEGQRDSAFPKFESKPQSQEVKENQTVKFRCEGLAVMEVAPSFSSVLKDCAVIEGQDFVLQCSVRGTPVPRITWLLNGQPIQYARSTCEAGVAELHIQDALPEDHGTYTCLAENALGQVSCSAWVTVHEKKSSRKSEYLLPVAPSKPTAPIFLQGLSDLKVMDGSQVTMTVQVSGNPPPEVIWLHNGNEIQESEDFHFEQRGTQHSLCIQEVFPEDTGTYTCEAWNSAGEVRTQAVLTVQEPHDGTQPWFISKPRSVTASLGQSVLISCAIAGDPFPTVHWLRDGKALCKDTGHFEVLQNEDVFTLVLKKVQPWHAGQYEILLKNRVGECSCQVSLMLQNSSARALPRGREPASCEDLCGGGVGADGGGSDRYGSLRPGWPARGQGWLEEEDGEDVRGVLKRRVETRQHTEEAIRQQEVEQLDFRDLLGKKVSTKTLSEDDLKEIPAEQMDFRANLQRQVKPKTVSEEERKVHSPQQVDFRSVLAKKGTSKTPVPEKVPPPKPATPDFRSVLGGKKKLPAENGSSSAETLNAKAVESSKPLSNAQPSGPLKPVGNAKPAETLKPMGNAKPAETLKPMGNAKPDENLKSASKEELKKDVKNDVNCKRGHAGTTDNEKRSESQGTAPAFKQKLQDVHVAEGKKLLLQCQVSSDPPATIIWTLNGKTLKTTKFIILSQEGSLCSVSIEKALPEDRGLYKCVAKNDAGQAECSCQVTVDDAPASENTKAPEMKSRRPKSSLPPVLGTESDATVKKKPAPKTPPKAAMPPQIIQFPEDQKVRAGESVELFGKVTGTQPITCTWMKFRKQIQESEHMKVENSENGSKLTILAARQEHCGCYTLLVENKLGSRQAQVNLTVVDKPDPPAGTPCASDIRSSSLTLSWYGSSYDGGSAVQSYSIEIWDSANKTWKELATCRSTSFNVQDLLPDHEYKFRVRAINVYGTSEPSQESELTTVGEKPEEPKDEVEVSDDDEKEPEVDYRTVTINTEQKVSDFYDIEERLGSGKFGQVFRLVEKKTRKVWAGKFFKAYSAKEKENIRQEISIMNCLHHPKLVQCVDAFEEKANIVMVLEIVSGGELFERIIDEDFELTERECIKYMRQISEGVEYIHKQGIVHLDLKPENIMCVNKTGTRIKLIDFGLARRLENAGSLKVLFGTPEFVAPEVINYEPIGYATDMWSIGVICYILVSGLSPFMGDNDNETLANVTSATWDFDDEAFDEISDDAKDFISNLLKKDMKNRLDCTQCLQHPWLMKDTKNMEAKKLSKDRMKKYMARRKWQKTGNAVRAIGRLSSMAMISGLSGRKSSTGSPTSPLNAEKLESEEDVSQAFLEAVAEEKPHVKPYFSKTIRDLEVVEGSAARFDCKIEGYPDPEVVWFKDDQSIRESRHFQIDYDEDGNCSLIISDVCGDDDAKYTCKAVNSLGEATCTAELIVETMEEGEGEGEEEEE

SEQ ID NO: 1331 - DNA, 7834 bp, Homo sapiens
ggcgctgagcgagctcggagcccgcgctgtgcgcctgcggccggggcgccccgccgagcgccggtgccccggctcccgggccgccttcgccgcgcgggaaggattcttcaaaattaacagaaaccaattcgggccagctgaagagaaaaaataaaggtggctcccggctgcctctgctgcagttcagagcaacttcaggagcttcccagccgagagcttcaggacgcctttcctgtcccactggcccagttgccacaacaaacaacagagaagacggtgaccatgggggatgtgaagctggttgcctcgtcacacatttccaaaacctccctcagtgtggatccctcaagagttgactccatgcccctgacagaggcccctgctttcattttgccccctcggaacctctgcatcaaagaaggagccaccgccaagttcgaagggcgggtccggggttacccagagccccaggtgacatggcacagaaacgggcaacccatcaccagcgggggccgcttcctgctggattgcggcatccgggggactttcagccttgtgattcatgctgtccatgaggaggacaggggaaagtatacctgtgaagccaccaatggcagtggtgctcgccaggtgacagtggagttgacagtagaaggtgattttgcgaagcagcttggtcagcctgttgtttccaaaaccttaggggatagattttcagctccagcagtggagacccgtcctagcatctggggggagtgcccaccaaagtttgctaccaagctgggccgagttgtggtcaaagaaggacagatgggacgattctcctgcaagatcactggccggccccaaccgcaggtcacctggctcaagggaaatgttccactgcagccgagtgcccgtgtgtctgtgtctgagaagaacggcatgcaggttctggaaatccatggagtcaaccaagatgacgtgggagtgtacacgtgcctggtggtgaacgggtcggggaaggcctcgatgtcagctgaactttccatccaaggtatcgaccagagctgcttgtcatttgtgagagaaacaaaagccaccaattcagatgtcaggaaagaggtgaccaatgtaatctcaaaggagtcgaagctggacagtctggaggctgcagccaaaagcaagaactgctccagcccccagagaggtggctccccaccctgggctgcaaacagccagcctcagcccccaagggagtccaagctggagtcatgcaaggactcgcccagaacggccccgcagaccccggtccttcagaagacttccagctccatcaccctgcaggccgcaagagttcagccggaaccaagagcaccaggcctgggggtcctatcaccttctggagaagagaggaagaggccagctcctccccgtccagccaccttccccaccaggcagcctggcctggggagccaagatgttgtgagcaaggctgctaacaggagaatccccatggagggccagagggattcagcattccccaaatttgagagcaagccccaaagccaggaggtcaaggaaaatcaaactgtcaagttcagatgtgaagtttccgggattccaaagcctgaagtggcctggttcctggaaggcacccccgtgaggagacaggaaggcagcattgaggtttatgaagatgctggctcccattacctctgcctgctgaaagcccggaccagggacagtgggacatacagctgcactgcttccaacgcccaaggccagctgtcctgtagctggaccctccaagtggaaaggcttgccgtgatggaggtggccccctccttctccagtgtcctgaaggactgcgctgttattgagggccaggattttgtgctgcagtgctccgtacgggggaccccagtgccccggatcacttggctgctgaatgggcagcccatccagtacgctcgctccacctgcgaggccggcgtggctgagctccacatccaggatgccctgccggaggaccatggcacctacacctgcctagctgagaatgccttggggcaggtgtcctgcagcgcctgggtcaccgtccatgaaaagaagagtagcaggaagagtgagtaccttctgcctgtggctcccagcaagcccactgcacccatcttcctgcagggcctctctgatctcaaagtcatggatggaagccaggtcactatgactgtccaagtgtcagggaatccaccccctgaagtcatctggctgcacaatgggaatgagatccaagagtcagaggacttccactttgaacagagaggaactcagcacagcctttgtatccaggaagtgttcccggaggacacgggcacgtacacctgcgaggcctggaacagcgctggagaggtccgcacccaggccgtgctcacggtacaagagcctcacgatggcacccagccctggttcatcagtaagcctcgctcagtgacagcctccctgggccagagtgtcctcatctcctgcgccatagctggtgacccctttcctaccgtgcactggctcagagatggcaaagccctctgcaaagacactggccacttcgaggtgcttcagaatgaggacgtgttcaccctggttctaaagaaggtgcagccctggcatgccggccagtatgagatcctgctcaagaaccgggttggcgaatgcagttgccaggtgtcactgatgctacagaacagctctgccagagcccttccacgggggagggagcctgccagctgcgaggacctctgtggtggaggagttggtgctgatggtggtggtagtgaccgctatgggtccctgaggcctggctggccagcaagagggcagggttggctagaggaggaagacggcgaggacgtgcgaggggtgctgaagaggcgcgtggagacgaggcagcacactgaggaggcgatccgccagcaggaggtggagcagctggacttccgagacctcctggggaagaaggtgagtacaaagaccctatcggaagacgacctgaaggagatcccagccgagcagatggatttccgtgccaacctgcagcggcaagtgaagccaaagactgtgtctgaggaagagaggaaggtgcacagcccccagcaggtcgattttcgctctgtcctggccaagaaggggacttccaagacccccgtgcctgagaaggtgccaccgccaaaacctgccaccccggattttcgctcagtgctgggtggcaagaagaaattaccagcagagaatggcagcagcagtgccgagaccctgaatgccaaggcagtggagagttccaagcccctgagcaatgcacagccttcagggcccttgaaacccgtgggcaacgccaagcctgctgagaccctgaagccaatgggcaacgccaagcctgccgagaccctgaagcccatgggcaatgccaagcctgatgagaacctgaaatccgctagcaaagaagaactcaagaaagacgttaagaatgatgtgaactgcaagagaggccatgcagggaccacagataatgaaaagagatcagagagccaggggacagccccagccttcaagcagaagctgcaagatgttcatgtggcagagggcaagaagctgctgctccagtgccaggtgtcttctgaccccccagccaccatcatctggacgctgaacggaaagaccctcaagaccaccaagttcatcatcctctcccaggaaggctcactctgctccgtctccatcgagaaggcactgcctgaggacagaggcttatacaagtgtgtagccaagaatgacgctggccaggcggagtgctcctgccaagtcaccgtggatgatgctccagccagtgagaacaccaaggccccagagatgaaatcccggaggcccaagagctctcttcctcccgtgctaggaactgagagtgatgcgactgtgaaaaagaaacctgcccccaagacacctccgaaggcagcaatgccccctcagatcatccagttccctgaggaccagaaggtacgcgcaggagagtcagtggagctgtttggcaaagtgacaggcactcagcccatcacctgtacctggatgaagttccgaaagcagatccaggaaagcgagcacatgaaggtggagaacagcgagaatggcagcaagctcaccatcctggccgcgcgccaggagcactgcggctgctacacactgctggtggagaacaagctgggcagcaggcaggcccaggtcaacctcactgtcgtggataagccagaccccccagctggcacaccttgtgcctctgacattcggagctcctcactgaccctgtcctggtatggctcctcatatgatgggggcagtgctgtacagtcctacagcatcgagatctgggactcagccaacaagacgtggaaggaactagccacatgccgcagcacctctttcaacgtccaggacctgctgcctgaccacgaatataagttccgtgtacgtgcaatcaacgtgtatggaaccagtgagccaagccaggagtctgaactcacaacggtaggagagaaacctgaagagccgaaggatgaagtggaggtgtcagatgatgatgagaaggagcccgaggttgattaccggacagtgacaatcaatactgaacaaaaagtatctgacttctacgacattgaggagagattaggatctgggaaatttggacaggtctttcgacttgtagaaaagaaaactcgaaaagtctgggcagggaagttcttcaaggcatattcagcaaaagagaaagagaatatccggcaggagattagcatcatgaactgcctccaccaccctaagctggtccagtgtgtggatgcctttgaagaaaaggccaacatcgtcatggtcctggagatcgtgtcaggaggggagctgtttgagcgcatcattgacgaggactttgagctgacggagcgtgagtgcatcaagtacatgcggcagatctcggagggagtggagtacatccacaagcagggcatcgtgcacctggacctcaagccggagaacatcatgtgtgtcaacaagacgggcaccaggatcaagctcatcgactttggtctggccaggaggctggagaatgcggggtctctgaaggtcctctttggcaccccagaatttgtggctcctgaagtgatcaactatgagcccatcggctacgccacagacatgtggagcatcggggtcatctgctacatcctagtcagtggcctttcccccttcatgggagacaacgataacgaaaccttggccaacgttacctcagccacctgggacttcgacgacgaggcattcgatgagatctccgacgatgccaaggatttcatcagcaatctgctgaagaaagatatgaaaaaccgcctggactgcacgcagtgccttcagcatccatggctaatgaaagataccaagaacatggaggccaagaaactctccaaggaccggatgaagaagtacatggcaagaaggaaatggcagaaaacgggcaatgctgtgagagccattggaagactgtcctctatggcaatgatctcagggctcagtggcaggaaatcctcaacagggtcaccaaccagcccgctcaatgcagaaaaactagaatctgaagaagatgtgtcccaagctttccttgaggctgttgctgaggaaaagcctcatgtaaaaccctatttctctaagaccattcgcgatttagaagttgtggagggaagtgctgctagatttgactgcaagattgaaggatacccagaccccgaggttgtctggttcaaagatgaccagtcaatcagggagtcccgccacttccagatagactacgatgaggacgggaactgctctttaattattagtgatgtttgcggggatgacgatgccaagtacacctgcaaggctgtcaacagtcttggagaagccacctgcacagcagagctcattgtggaaacgatggaggaaggtgaaggggaaggggaagaggaagaagagtgaaacaaagccagagaaaagcagtttctaagtcatattaaaaggactatttctctaaaactcaaaaaaaaaaaaaaaactcaagatagtaaaagcacctagtgtgatagattatcggttaggtcatttgtgggttgattcttcagaaacagcagttgatacctagcagcgttattgatgggcattaatctatgttagttggcaccttaagatactagtgcagctagatttcatttagggaaatcaccagtaacttgactgaccaattgattttagagagaaagtaaccaaaccaaatatttatctgggcaaagtcataaattctccacttgaatgcgctcatgaaaaataaggccaaaacaagagttctgggccacagctcagcccagagggttcctggggatgggaggcctctctctccccaccccctgactctagagaactgggttttctcccagtactccagcaattcatttctgaaagcagttgagccactttattccaaagtacactgcagatgttcaaactctccatttctctttccccttccacctgccagttttgctgactctcaacttgtcatgagtgtaagcattaaggacattatgcttcttcgattctgaagacaggtccctgctcatggatgactctggcttccttaggaaaatatttttcttccaaaatcagtaggaaatctaaacttatcccctctttgcagatgtctagcagcttcagacatttggttaagaacccatgggaaaaaaaaaatccttgctaatgtggtttcctttgtaaaccaggattcttatttgtgctgttatagaatatcagctctgaacgtgtggtaaagatttttgtgtttgaatataggagaaatcagtttgctgaaaagttagtcttaattatctattggccacgatgaaacagatttcaactgataaagagctggagaactccatgtactttggaatctcctccaagatagccagagtttaatacatcttcattctcaacactctccaaagaacttgacctaccttatgggttccatatttttcttcttaaatgtgcatcaatcatgccttgcccccaacctttaaatatattcttagacctggtaaatgcactcagacttgcgtctttaggaatttttaactttctttcactacattggcacttaaattttttctttataaagctttttgaaggtcataaacaaagaccataattgatgatagacctaatacatttcctctgtgtgtgtgtgtaacattccaaatactttttttttcttttccactgtttgtaaggtgcaacaatttaatatttttaagggactttttaagagttccttaagaaccaatttaaaattacttcagtgcaatcctacacagtatcaacattagaattttgatattagtcttatgttatcttccattctatttttatctgctttttgctgctagtttcaaactgccagtatttttccttttgcttttaaaatagttacaatatttttcatgatagccacagtattgccacagtttattataataaagggtttttatttgatttagcgcattcaaagcttttttctatcacttttgtgttcagaatataacctttgtgtgcgtgtatgttgtgtgtgtgcatgtgtggcgtatatgtgtgttacaggttaatgccttcttggaattgtgttaatgttctcttggtttattatgccatcagaatggtaaatgagaacactacaactgtagtcagctcacaatttttaaataaaggataccacagtgcatgctgtttgttc

SEQ ID NO: 1332 - protein, 1914 aa, Homo sapiens
MGDVKLVASSHISKTSLSVDPSRVDSMPLTEAPAFILPPRNLCIKEGATAKFEGRVRGYPEPQVTWHRNGQPITSGGRFLLDCGIRGTFSLVIHAVHEEDRGKYTCEATNGSGARQVTVELTVEGDFAKQLGQPVVSKTLGDRFSAPAVETRPSIWGECPPKFATKLGRVVVKEGQMGRFSCKITGRPQPQVTWLKGNVPLQPSARVSVSEKNGMQVLEIHGVNQDDVGVYTCLVVNGSGKASMSAELSIQGIDQSCLSFVRETKATNSDVRKEVTNVISKESKLDSLEAAAKSKNCSSPQRGGSPPWAANSQPQPPRESKLESCKDSPRTAPQTPVLQKTSSSITLQAARVQPEPRAPGLGVLSPSGEERKRPAPPRPATFPTRQPGLGSQDVVSKAANRRIPMEGQRDSAFPKFESKPQSQEVKENQTVKFRCEVSGIPKPEVAWFLEGTPVRRQEGSIEVYEDAGSHYLCLLKARTRDSGTYSCTASNAQGQLSCSWTLQVERLAVMEVAPSFSSVLKDCAVIEGQDFVLQCSVRGTPVPRITWLLNGQPIQYARSTCEAGVAELHIQDALPEDHGTYTCLAENALGQVSCSAWVTVHEKKSSRKSEYLLPVAPSKPTAPIFLQGLSDLKVMDGSQVTMTVQVSGNPPPEVIWLHNGNEIQESEDFHFEQRGTQHSLCIQEVFPEDTGTYTCEAWNSAGEVRTQAVLTVQEPHDGTQPWFISKPRSVTASLGQSVLISCAIAGDPFPTVHWLRDGKALCKDTGHFEVLQNEDVFTLVLKKVQPWHAGQYEILLKNRVGECSCQVSLMLQNSSARALPRGREPASCEDLCGGGVGADGGGSDRYGSLRPGWPARGQGWLEEEDGEDVRGVLKRRVETRQHTEEAIRQQEVEQLDFRDLLGKKVSTKTLSEDDLKEIPAEQMDFRANLQRQVKPKTVSEEERKVHSPQQVDFRSVLAKKGTSKTPVPEKVPPPKPATPDFRSVLGGKKKLPAENGSSSAETLNAKAVESSKPLSNAQPSGPLKPVGNAKPAETLKPMGNAKPAETLKPMGNAKPDENLKSASKEELKKDVKNDVNCKRGHAGTTDNEKRSESQGTAPAFKQKLQDVHVAEGKKLLLQCQVSSDPPATIIWTLNGKTLKTTKFIILSQEGSLCSVSIEKALPEDRGLYKCVAKNDAGQAECSCQVTVDDAPASENTKAPEMKSRRPKSSLPPVLGTESDATVKKKPAPKTPPKAAMPPQIIQFPEDQKVRAGESVELFGKVTGTQPITCTWMKFRKQIQESEHMKVENSENGSKLTILAARQEHCGCYTLLVENKLGSRQAQVNLTVVDKPDPPAGTPCASDIRSSSLTLSWYGSSYDGGSAVQSYSIEIWDSANKTWKELATCRSTSFNVQDLLPDHEYKFRVRAINVYGTSEPSQESELTTVGEKPEEPKDEVEVSDDDEKEPEVDYRTVTINTEQKVSDFYDIEERLGSGKFGQVFRLVEKKTRKVWAGKFFKAYSAKEKENIRQEISIMNCLHHPKLVQCVDAFEEKANIVMVLEIVSGGELFERIIDEDFELTERECIKYMRQISEGVEYIHKQGIVHLDLKPENIMCVNKTGTRIKLIDFGLARRLENAGSLKVLFGTPEFVAPEVINYEPIGYATDMWSIGVICYILVSGLSPFMGDNDNETLANVTSATWDFDDEAFDEISDDAKDFISNLLKKDMKNRLDCTQCLQHPWLMKDTKNMEAKKLSKDRMKKYMARRKWQKTGNAVRAIGRLSSMAMISGLSGRKSSTGSPTSPLNAEKLESEEDVSQAFLEAVAEEKPHVKPYFSKTIRDLEVVEGSAARFDCKIEGYPDPEVVWFKDDQSIRESRHFQIDYDEDGNCSLIISDVCGDDDAKYTCKAVNSLGEATCTAELIVETMEEGEGEGEEEEE

SEQ ID NO: 1333 - DNA, 7681 bp, Homo sapiens
ggcgctgagcgagctcggagcccgcgctgtgcgcctgcggccggggcgccccgccgagcgccggtgccccggctcccgggccgccttcgccgcgcgggaaggattcttcaaaattaacagaaaccaattcgggccagctgaagagaaaaaataaaggtggctcccggctgcctctgctgcagttcagagcaacttcaggagcttcccagccgagagcttcaggacgcctttcctgtcccactggcccagttgccacaacaaacaacagagaagacggtgaccatgggggatgtgaagctggttgcctcgtcacacatttccaaaacctccctcagtgtggatccctcaagagttgactccatgcccctgacagaggcccctgctttcattttgccccctcggaacctctgcatcaaagaaggagccaccgccaagttcgaagggcgggtccggggttacccagagccccaggtgacatggcacagaaacgggcaacccatcaccagcgggggccgcttcctgctggattgcggcatccgggggactttcagccttgtgattcatgctgtccatgaggaggacaggggaaagtatacctgtgaagccaccaatggcagtggtgctcgccaggtgacagtggagttgacagtagaaggtgattttgcgaagcagcttggtcagcctgttgtttccaaaaccttaggggatagattttcagctccagcagtggagacccgtcctagcatctggggggagtgcccaccaaagtttgctaccaagctgggccgagttgtggtcaaagaaggacagatgggacgattctcctgcaagatcactggccggccccaaccgcaggtcacctggctcaagggaaatgttccactgcagccgagtgcccgtgtgtctgtgtctgagaagaacggcatgcaggttctggaaatccatggagtcaaccaagatgacgtgggagtgtacacgtgcctggtggtgaacgggtcggggaaggcctcgatgtcagctgaactttccatccaaggtttggacagtgccaataggtcatttgtgagagaaacaaaagccaccaattcagatgtcaggaaagaggtgaccaatgtaatctcaaaggagtcgaagctggacagtctggaggctgcagccaaaagcaagaactgctccagcccccagagaggtggctccccaccctgggctgcaaacagccagcctcagcccccaagggagtccaagctggagtcatgcaaggactcgcccagaacggccccgcagaccccggtccttcagaagacttccagctccatcaccctgcaggccgcaagagttcagccggaaccaagagcaccaggcctgggggtcctatcaccttctggagaagagaggaagaggccagctcctccccgtccagccaccttccccaccaggcagcctggcctggggagccaagatgttgtgagcaaggctgctaacaggagaatccccatggagggccagagggattcagcattccccaaatttgagagcaagccccaaagccaggaggtcaaggaaaatcaaactgtcaagttcagatgtgaagtttccgggattccaaagcctgaagtggcctggttcctggaaggcacccccgtgaggagacaggaaggcagcattgaggtttatgaagatgctggctcccattacctctgcctgctgaaagcccggaccagggacagtgggacatacagctgcactgcttccaacgcccaaggccagctgtcctgtagctggaccctccaagtggaaaggcttgccgtgatggaggtggccccctccttctccagtgtcctgaaggactgcgctgttattgagggccaggattttgtgctgcagtgctccgtacgggggaccccagtgccccggatcacttggctgctgaatgggcagcccatccagtacgctcgctccacctgcgaggccggcgtggctgagctccacatccaggatgccctgccggaggaccatggcacctacacctgcctagctgagaatgccttggggcaggtgtcctgcagcgcctgggtcaccgtccatgaaaagaagagtagcaggaagagtgagtaccttctgcctgtggctcccagcaagcccactgcacccatcttcctgcagggcctctctgatctcaaagtcatggatggaagccaggtcactatgactgtccaagtgtcagggaatccaccccctgaagtcatctggctgcacaatgggaatgagatccaagagtcagaggacttccactttgaacagagaggaactcagcacagcctttgtatccaggaagtgttcccggaggacacgggcacgtacacctgcgaggcctggaacagcgctggagaggtccgcacccaggccgtgctcacggtacaagagcctcacgatggcacccagccctggttcatcagtaagcctcgctcagtgacagcctccctgggccagagtgtcctcatctcctgcgccatagctggtgacccctttcctaccgtgcactggctcagagatggcaaagccctctgcaaagacactggccacttcgaggtgcttcagaatgaggacgtgttcaccctggttctaaagaaggtgcagccctggcatgccggccagtatgagatcctgctcaagaaccgggttggcgaatgcagttgccaggtgtcactgatgctacagaacagctctgccagagcccttccacgggggagggagcctgccagctgcgaggacctctgtggtggaggagttggtgctgatggtggtggtagtgaccgctatgggtccctgaggcctggctggccagcaagagggcagggttggctagaggaggaagacggcgaggacgtgcgaggggtgctgaagaggcgcgtggagacgaggcagcacactgaggaggcgatccgccagcaggaggtggagcagctggacttccgagacctcctggggaagaaggtgagtacaaagaccctatcggaagacgacctgaaggagatcccagccgagcagatggatttccgtgccaacctgcagcggcaagtgaagccaaagactgtgtctgaggaagagaggaaggtgcacagcccccagcaggtcgattttcgctctgtcctggccaagaaggggacttccaagacccccgtgcctgagaaggtgccaccgccaaaacctgccaccccggattttcgctcagtgctgggtggcaagaagaaattaccagcagagaatggcagcagcagtgccgagaccctgaatgccaaggcagtggagagttccaagcccctgagcaatgcacagccttcagggcccttgaaacccgtgggcaacgccaagcctgctgagaccctgaagccaatgggcaacgccaagcctgccgagaccctgaagcccatgggcaatgccaagcctgatgagaacctgaaatccgctagcaaagaagaactcaagaaagacgttaagaatgatgtgaactgcaagagaggccatgcagggaccacagataatgaaaagagatcagagagccaggggacagccccagccttcaagcagaagctgcaagatgttcatgtggcagagggcaagaagctgctgctccagtgccaggtgtcttctgaccccccagccaccatcatctggacgctgaacggaaagaccctcaagaccaccaagttcatcatcctctcccaggaaggctcactctgctccgtctccatcgagaaggcactgcctgaggacagaggcttatacaagtgtgtagccaagaatgacgctggccaggcggagtgctcctgccaagtcaccgtggatgatgctccagccagtgagaacaccaaggccccagagatgaaatcccggaggcccaagagctctcttcctcccgtgctaggaactgagagtgatgcgactgtgaaaaagaaacctgcccccaagacacctccgaaggcagcaatgccccctcagatcatccagttccctgaggaccagaaggtacgcgcaggagagtcagtggagctgtttggcaaagtgacaggcactcagcccatcacctgtacctggatgaagttccgaaagcagatccaggaaagcgagcacatgaaggtggagaacagcgagaatggcagcaagctcaccatcctggccgcgcgccaggagcactgcggctgctacacactgctggtggagaacaagctgggcagcaggcaggcccaggtcaacctcactgtcgtggataagccagaccccccagctggcacaccttgtgcctctgacattcggagctcctcactgaccctgtcctggtatggctcctcatatgatgggggcagtgctgtacagtcctacagcatcgagatctgggactcagccaacaagacgtggaaggaactagccacatgccgcagcacctctttcaacgtccaggacctgctgcctgaccacgaatataagttccgtgtacgtgcaatcaacgtgtatggaaccagtgagccaagccaggagtctgaactcacaacggtaggagagaaacctgaagagccgaaggatgaagtggaggtgtcagatgatgatgagaaggagcccgaggttgattaccggacagtgacaatcaatactgaacaaaaagtatctgacttctacgacattgaggagagattaggatctgggaaatttggacaggtctttcgacttgtagaaaagaaaactcgaaaagtctgggcagggaagttcttcaaggcatattcagcaaaagagaaagagaatatccggcaggagattagcatcatgaactgcctccaccaccctaagctggtccagtgtgtggatgcctttgaagaaaaggccaacatcgtcatggtcctggagatcgtgtcaggaggggagctgtttgagcgcatcattgacgaggactttgagctgacggagcgtgagtgcatcaagtacatgcggcagatctcggagggagtggagtacatccacaagcagggcatcgtgcacctggacctcaagccggagaacatcatgtgtgtcaacaagacgggcaccaggatcaagctcatcgactttggtctggccaggaggctggagaatgcggggtctctgaaggtcctctttggcaccccagaatttgtggctcctgaagtgatcaactatgagcccatcggctacgccacagacatgtggagcatcggggtcatctgctacatcctaaaccgcctggactgcacgcagtgccttcagcatccatggctaatgaaagataccaagaacatggaggccaagaaactctccaaggaccggatgaagaagtacatggcaagaaggaaatggcagaaaacgggcaatgctgtgagagccattggaagactgtcctctatggcaatgatctcagggctcagtggcaggaaatcctcaacagggtcaccaaccagcccgctcaatgcagaaaaactagaatctgaagaagatgtgtcccaagctttccttgaggctgttgctgaggaaaagcctcatgtaaaaccctatttctctaagaccattcgcgatttagaagttgtggagggaagtgctgctagatttgactgcaagattgaaggatacccagaccccgaggttgtctggttcaaagatgaccagtcaatcagggagtcccgccacttccagatagactacgatgaggacgggaactgctctttaattattagtgatgtttgcggggatgacgatgccaagtacacctgcaaggctgtcaacagtcttggagaagccacctgcacagcagagctcattgtggaaacgatggaggaaggtgaaggggaaggggaagaggaagaagagtgaaacaaagccagagaaaagcagtttctaagtcatattaaaaggactatttctctaaaactcaaaaaaaaaaaaaaaactcaagatagtaaaagcacctagtgtgatagattatcggttaggtcatttgtgggttgattcttcagaaacagcagttgatacctagcagcgttattgatgggcattaatctatgttagttggcaccttaagatactagtgcagctagatttcatttagggaaatcaccagtaacttgactgaccaattgattttagagagaaagtaaccaaaccaaatatttatctgggcaaagtcataaattctccacttgaatgcgctcatgaaaaataaggccaaaacaagagttctgggccacagctcagcccagagggttcctggggatgggaggcctctctctccccaccccctgactctagagaactgggttttctcccagtactccagcaattcatttctgaaagcagttgagccactttattccaaagtacactgcagatgttcaaactctccatttctctttccccttccacctgccagttttgctgactctcaacttgtcatgagtgtaagcattaaggacattatgcttcttcgattctgaagacaggtccctgctcatggatgactctggcttccttaggaaaatatttttcttccaaaatcagtaggaaatctaaacttatcccctctttgcagatgtctagcagcttcagacatttggttaagaacccatgggaaaaaaaaaatccttgctaatgtggtttcctttgtaaaccaggattcttatttgtgctgttatagaatatcagctctgaacgtgtggtaaagatttttgtgtttgaatataggagaaatcagtttgctgaaaagttagtcttaattatctattggccacgatgaaacagatttcaactgataaagagctggagaactccatgtactttggaatctcctccaagatagccagagtttaatacatcttcattctcaacactctccaaagaacttgacctaccttatgggttccatatttttcttcttaaatgtgcatcaatcatgccttgcccccaacctttaaatatattcttagacctggtaaatgcactcagacttgcgtctttaggaatttttaactttctttcactacattggcacttaaattttttctttataaagctttttgaaggtcataaacaaagaccataattgatgatagacctaatacatttcctctgtgtgtgtgtgtaacattccaaatactttttttttcttttccactgtttgtaaggtgcaacaatttaatatttttaagggactttttaagagttccttaagaaccaatttaaaattacttcagtgcaatcctacacagtatcaacattagaattttgatattagtcttatgttatcttccattctatttttatctgctttttgctgctagtttcaaactgccagtatttttccttttgcttttaaaatagttacaatatttttcatgatagccacagtattgccacagtttattataataaagggtttttatttgatttagcgcattcaaagcttttttctatcacttttgtgttcagaatataacctttgtgtgcgtgtatgttgtgtgtgtgcatgtgtggcgtatatgtgtgttacaggttaatgccttcttggaattgtgttaatgttctcttggtttattatgccatcagaatggtaaatgagaacactacaactgtagtcagctcacaatttttaaataaaggataccacagtgcatgctgtttgttc

SEQ ID NO: 1334 - protein, 1863 aa, Homo sapiens
MGDVKLVASSHISKTSLSVDPSRVDSMPLTEAPAFILPPRNLCIKEGATAKFEGRVRGYPEPQVTWHRNGQPITSGGRFLLDCGIRGTFSLVIHAVHEEDRGKYTCEATNGSGARQVTVELTVEGDFAKQLGQPVVSKTLGDRFSAPAVETRPSIWGECPPKFATKLGRVVVKEGQMGRFSCKITGRPQPQVTWLKGNVPLQPSARVSVSEKNGMQVLEIHGVNQDDVGVYTCLVVNGSGKASMSAELSIQGLDSANRSFVRETKATNSDVRKEVTNVISKESKLDSLEAAAKSKNCSSPQRGGSPPWAANSQPQPPRESKLESCKDSPRTAPQTPVLQKTSSSITLQAARVQPEPRAPGLGVLSPSGEERKRPAPPRPATFPTRQPGLGSQDVVSKAANRRIPMEGQRDSAFPKFESKPQSQEVKENQTVKFRCEVSGIPKPEVAWFLEGTPVRRQEGSIEVYEDAGSHYLCLLKARTRDSGTYSCTASNAQGQLSCSWTLQVERLAVMEVAPSFSSVLKDCAVIEGQDFVLQCSVRGTPVPRITWLLNGQPIQYARSTCEAGVAELHIQDALPEDHGTYTCLAENALGQVSCSAWVTVHEKKSSRKSEYLLPVAPSKPTAPIFLQGLSDLKVMDGSQVTMTVQVSGNPPPEVIWLHNGNEIQESEDFHFEQRGTQHSLCIQEVFPEDTGTYTCEAWNSAGEVRTQAVLTVQEPHDGTQPWFISKPRSVTASLGQSVLISCAIAGDPFPTVHWLRDGKALCKDTGHFEVLQNEDVFTLVLKKVQPWHAGQYEILLKNRVGECSCQVSLMLQNSSARALPRGREPASCEDLCGGGVGADGGGSDRYGSLRPGWPARGQGWLEEEDGEDVRGVLKRRVETRQHTEEAIRQQEVEQLDFRDLLGKKVSTKTLSEDDLKEIPAEQMDFRANLQRQVKPKTVSEEERKVHSPQQVDFRSVLAKKGTSKTPVPEKVPPPKPATPDFRSVLGGKKKLPAENGSSSAETLNAKAVESSKPLSNAQPSGPLKPVGNAKPAETLKPMGNAKPAETLKPMGNAKPDENLKSASKEELKKDVKNDVNCKRGHAGTTDNEKRSESQGTAPAFKQKLQDVHVAEGKKLLLQCQVSSDPPATIIWTLNGKTLKTTKFIILSQEGSLCSVSIEKALPEDRGLYKCVAKNDAGQAECSCQVTVDDAPASENTKAPEMKSRRPKSSLPPVLGTESDATVKKKPAPKTPPKAAMPPQIIQFPEDQKVRAGESVELFGKVTGTQPITCTWMKFRKQIQESEHMKVENSENGSKLTILAARQEHCGCYTLLVENKLGSRQAQVNLTVVDKPDPPAGTPCASDIRSSSLTLSWYGSSYDGGSAVQSYSIEIWDSANKTWKELATCRSTSFNVQDLLPDHEYKFRVRAINVYGTSEPSQESELTTVGEKPEEPKDEVEVSDDDEKEPEVDYRTVTINTEQKVSDFYDIEERLGSGKFGQVFRLVEKKTRKVWAGKFFKAYSAKEKENIRQEISIMNCLHHPKLVQCVDAFEEKANIVMVLEIVSGGELFERIIDEDFELTERECIKYMRQISEGVEYIHKQGIVHLDLKPENIMCVNKTGTRIKLIDFGLARRLENAGSLKVLFGTPEFVAPEVINYEPIGYATDMWSIGVICYILNRLDCTQCLQHPWLMKDTKNMEAKKLSKDRMKKYMARRKWQKTGNAVRAIGRLSSMAMISGLSGRKSSTGSPTSPLNAEKLESEEDVSQAFLEAVAEEKPHVKPYFSKTIRDLEVVEGSAARFDCKIEGYPDPEVVWFKDDQSIRESRHFQIDYDEDGNCSLIISDVCGDDDAKYTCKAVNSLGEATCTAELIVETMEEGEGEGEEEEE

SEQ ID NO: 1335 - DNA, 7681 bp, Homo sapiens
ggcgctgagcgagctcggagcccgcgctgtgcgcctgcggccggggcgccccgccgagcgccggtgccccggctcccgggccgccttcgccgcgcgggaaggattcttcaaaattaacagaaaccaattcgggccagctgaagagaaaaaataaaggtggctcccggctgcctctgctgcagttcagagcaacttcaggagcttcccagccgagagcttcaggacgcctttcctgtcccactggcccagttgccacaacaaacaacagagaagacggtgaccatgggggatgtgaagctggttgcctcgtcacacatttccaaaacctccctcagtgtggatccctcaagagttgactccatgcccctgacagaggcccctgctttcattttgccccctcggaacctctgcatcaaagaaggagccaccgccaagttcgaagggcgggtccggggttacccagagccccaggtgacatggcacagaaacgggcaacccatcaccagcgggggccgcttcctgctggattgcggcatccgggggactttcagccttgtgattcatgctgtccatgaggaggacaggggaaagtatacctgtgaagccaccaatggcagtggtgctcgccaggtgacagtggagttgacagtagaaggaagttttgcgaagcagcttggtcagcctgttgtttccaaaaccttaggggatagattttcagctccagcagtggagacccgtcctagcatctggggggagtgcccaccaaagtttgctaccaagctgggccgagttgtggtcaaagaaggacagatgggacgattctcctgcaagatcactggccggccccaaccgcaggtcacctggctcaagggaaatgttccactgcagccgagtgcccgtgtgtctgtgtctgagaagaacggcatgcaggttctggaaatccatggagtcaaccaagatgacgtgggagtgtacacgtgcctggtggtgaacgggtcggggaaggcctcgatgtcagctgaactttccatccaaggtttggacagtgccaataggtcatttgtgagagaaacaaaagccaccaattcagatgtcaggaaagaggtgaccaatgtaatctcaaaggagtcgaagctggacagtctggaggctgcagccaaaagcaagaactgctccagcccccagagaggtggctccccaccctgggctgcaaacagccagcctcagcccccaagggagtccaagctggagtcatgcaaggactcgcccagaacggccccgcagaccccggtccttcagaagacttccagctccatcaccctgcaggccgcaagagttcagccggaaccaagagcaccaggcctgggggtcctatcaccttctggagaagagaggaagaggccagctcctccccgtccagccaccttccccaccaggcagcctggcctggggagccaagatgttgtgagcaaggctgctaacaggagaatccccatggagggccagagggattcagcattccccaaatttgagagcaagccccaaagccaggaggtcaaggaaaatcaaactgtcaagttcagatgtgaagtttccgggattccaaagcctgaagtggcctggttcctggaaggcacccccgtgaggagacaggaaggcagcattgaggtttatgaagatgctggctcccattacctctgcctgctgaaagcccggaccagggacagtgggacatacagctgcactgcttccaacgcccaaggccagctgtcctgtagctggaccctccaagtggaaaggcttgccgtgatggaggtggccccctccttctccagtgtcctgaaggactgcgctgttattgagggccaggattttgtgctgcagtgctccgtacgggggaccccagtgccccggatcacttggctgctgaatgggcagcccatccagtacgctcgctccacctgcgaggccggcgtggctgagctccacatccaggatgccctgccggaggaccatggcacctacacctgcctagctgagaatgccttggggcaggtgtcctgcagcgcctgggtcaccgtccatgaaaagaagagtagcaggaagagtgagtaccttctgcctgtggctcccagcaagcccactgcacccatcttcctgcagggcctctctgatctcaaagtcatggatggaagccaggtcactatgactgtccaagtgtcagggaatccaccccctgaagtcatctggctgcacaatgggaatgagatccaagagtcagaggacttccactttgaacagagaggaactcagcacagcctttgtatccaggaagtgttcccggaggacacgggcacgtacacctgcgaggcctggaacagcgctggagaggtccgcacccaggccgtgctcacggtacaagagcctcacgatggcacccagccctggttcatcagtaagcctcgctcagtgacagcctccctgggccagagtgtcctcatctcctgcgccatagctggtgacccctttcctaccgtgcactggctcagagatggcaaagccctctgcaaagacactggccacttcgaggtgcttcagaatgaggacgtgttcaccctggttctaaagaaggtgcagccctggcatgccggccagtatgagatcctgctcaagaaccgggttggcgaatgcagttgccaggtgtcactgatgctacagaacagctctgccagagcccttccacgggggagggagcctgccagctgcgaggacctctgtggtggaggagttggtgctgatggtggtggtagtgaccgctatgggtccctgaggcctggctggccagcaagagggcagggttggctagaggaggaagacggcgaggacgtgcgaggggtgctgaagaggcgcgtggagacgaggcagcacactgaggaggcgatccgccagcaggaggtggagcagctggacttccgagacctcctggggaagaaggtgagtacaaagaccctatcggaagacgacctgaaggagatcccagccgagcagatggatttccgtgccaacctgcagcggcaagtgaagccaaagactgtgtctgaggaagagaggaaggtgcacagcccccagcaggtcgattttcgctctgtcctggccaagaaggggacttccaagacccccgtgcctgagaaggtgccaccgccaaaacctgccaccccggattttcgctcagtgctgggtggcaagaagaaattaccagcagagaatggcagcagcagtgccgagaccctgaatgccaaggcagtggagagttccaagcccctgagcaatgcacagccttcagggcccttgaaacccgtgggcaacgccaagcctgctgagaccctgaagccaatgggcaacgccaagcctgccgagaccctgaagcccatgggcaatgccaagcctgatgagaacctgaaatccgctagcaaagaagaactcaagaaagacgttaagaatgatgtgaactgcaagagaggccatgcagggaccacagataatgaaaagagatcagagagccaggggacagccccagccttcaagcagaagctgcaagatgttcatgtggcagagggcaagaagctgctgctccagtgccaggtgtcttctgaccccccagccaccatcatctggacgctgaacggaaagaccctcaagaccaccaagttcatcatcctctcccaggaaggctcactctgctccgtctccatcgagaaggcactgcctgaggacagaggcttatacaagtgtgtagccaagaatgacgctggccaggcggagtgctcctgccaagtcaccgtggatgatgctccagccagtgagaacaccaaggccccagagatgaaatcccggaggcccaagagctctcttcctcccgtgctaggaactgagagtgatgcgactgtgaaaaagaaacctgcccccaagacacctccgaaggcagcaatgccccctcagatcatccagttccctgaggaccagaaggtacgcgcaggagagtcagtggagctgtttggcaaagtgacaggcactcagcccatcacctgtacctggatgaagttccgaaagcagatccaggaaagcgagcacatgaaggtggagaacagcgagaatggcagcaagctcaccatcctggccgcgcgccaggagcactgcggctgctacacactgctggtggagaacaagctgggcagcaggcaggcccaggtcaacctcactgtcgtggataagccagaccccccagctggcacaccttgtgcctctgacattcggagctcctcactgaccctgtcctggtatggctcctcatatgatgggggcagtgctgtacagtcctacagcatcgagatctgggactcagccaacaagacgtggaaggaactagccacatgccgcagcacctctttcaacgtccaggacctgctgcctgaccacgaatataagttccgtgtacgtgcaatcaacgtgtatggaaccagtgagccaagccaggagtctgaactcacaacggtaggagagaaacctgaagagccgaaggatgaagtggaggtgtcagatgatgatgagaaggagcccgaggttgattaccggacagtgacaatcaatactgaacaaaaagtatctgacttctacgacattgaggagagattaggatctgggaaatttggacaggtctttcgacttgtagaaaagaaaactcgaaaagtctgggcagggaagttcttcaaggcatattcagcaaaagagaaagagaatatccggcaggagattagcatcatgaactgcctccaccaccctaagctggtccagtgtgtggatgcctttgaagaaaaggccaacatcgtcatggtcctggagatcgtgtcaggaggggagctgtttgagcgcatcattgacgaggactttgagctgacggagcgtgagtgcatcaagtacatgcggcagatctcggagggagtggagtacatccacaagcagggcatcgtgcacctggacctcaagccggagaacatcatgtgtgtcaacaagacgggcaccaggatcaagctcatcgactttggtctggccaggaggctggagaatgcggggtctctgaaggtcctctttggcaccccagaatttgtggctcctgaagtgatcaactatgagcccatcggctacgccacagacatgtggagcatcggggtcatctgctacatcctaaaccgcctggactgcacgcagtgccttcagcatccatggctaatgaaagataccaagaacatggaggccaagaaactctccaaggaccggatgaagaagtacatggcaagaaggaaatggcagaaaacgggcaatgctgtgagagccattggaagactgtcctctatggcaatgatctcagggctcagtggcaggaaatcctcaacagggtcaccaaccagcccgctcaatgcagaaaaactagaatctgaagaagatgtgtcccaagctttccttgaggctgttgctgaggaaaagcctcatgtaaaaccctatttctctaagaccattcgcgatttagaagttgtggagggaagtgctgctagatttgactgcaagattgaaggatacccagaccccgaggttgtctggttcaaagatgaccagtcaatcagggagtcccgccacttccagatagactacgatgaggacgggaactgctctttaattattagtgatgtttgcggggatgacgatgccaagtacacctgcaaggctgtcaacagtcttggagaagccacctgcacagcagagctcattgtggaaacgatggaggaaggtgaaggggaaggggaagaggaagaagagtgaaacaaagccagagaaaagcagtttctaagtcatattaaaaggactatttctctaaaactcaaaaaaaaaaaaaaaactcaagatagtaaaagcacctagtgtgatagattatcggttaggtcatttgtgggttgattcttcagaaacagcagttgatacctagcagcgttattgatgggcattaatctatgttagttggcaccttaagatactagtgcagctagatttcatttagggaaatcaccagtaacttgactgaccaattgattttagagagaaagtaaccaaaccaaatatttatctgggcaaagtcataaattctccacttgaatgcgctcatgaaaaataaggccaaaacaagagttctgggccacagctcagcccagagggttcctggggatgggaggcctctctctccccaccccctgactctagagaactgggttttctcccagtactccagcaattcatttctgaaagcagttgagccactttattccaaagtacactgcagatgttcaaactctccatttctctttccccttccacctgccagttttgctgactctcaacttgtcatgagtgtaagcattaaggacattatgcttcttcgattctgaagacaggtccctgctcatggatgactctggcttccttaggaaaatatttttcttccaaaatcagtaggaaatctaaacttatcccctctttgcagatgtctagcagcttcagacatttggttaagaacccatgggaaaaaaaaaatccttgctaatgtggtttcctttgtaaaccaggattcttatttgtgctgttatagaatatcagctctgaacgtgtggtaaagatttttgtgtttgaatataggagaaatcagtttgctgaaaagttagtcttaattatctattggccacgatgaaacagatttcaactgataaagagctggagaactccatgtactttggaatctcctccaagatagccagagtttaatacatcttcattctcaacactctccaaagaacttgacctaccttatgggttccatatttttcttcttaaatgtgcatcaatcatgccttgcccccaacctttaaatatattcttagacctggtaaatgcactcagacttgcgtctttaggaatttttaactttctttcactacattggcacttaaattttttctttataaagctttttgaaggtcataaacaaagaccataattgatgatagacctaatacatttcctctgtgtgtgtgtgtaacattccaaatactttttttttcttttccactgtttgtaaggtgcaacaatttaatatttttaagggactttttaagagttccttaagaaccaatttaaaattacttcagtgcaatcctacacagtatcaacattagaattttgatattagtcttatgttatcttccattctatttttatctgctttttgctgctagtttcaaactgccagtatttttccttttgcttttaaaatagttacaatatttttcatgatagccacagtattgccacagtttattataataaagggtttttatttgatttagcgcattcaaagcttttttctatcacttttgtgttcagaatataacctttgtgtgcgtgtatgttgtgtgtgtgcatgtgtggcgtatatgtgtgttacaggttaatgccttcttggaattgtgttaatgttctcttggtttattatgccatcagaatggtaaatgagaacactacaactgtagtcagctcacaatttttaaataaaggataccacagtgcatgctgtttgttc

SEQ ID NO: 1336 - protein, 1863 aa, Homo sapiens
MGDVKLVASSHISKTSLSVDPSRVDSMPLTEAPAFILPPRNLCIKEGATAKFEGRVRGYPEPQVTWHRNGQPITSGGRFLLDCGIRGTFSLVIHAVHEEDRGKYTCEATNGSGARQVTVELTVEGSFAKQLGQPVVSKTLGDRFSAPAVETRPSIWGECPPKFATKLGRVVVKEGQMGRFSCKITGRPQPQVTWLKGNVPLQPSARVSVSEKNGMQVLEIHGVNQDDVGVYTCLVVNGSGKASMSAELSIQGLDSANRSFVRETKATNSDVRKEVTNVISKESKLDSLEAAAKSKNCSSPQRGGSPPWAANSQPQPPRESKLESCKDSPRTAPQTPVLQKTSSSITLQAARVQPEPRAPGLGVLSPSGEERKRPAPPRPATFPTRQPGLGSQDVVSKAANRRIPMEGQRDSAFPKFESKPQSQEVKENQTVKFRCEVSGIPKPEVAWFLEGTPVRRQEGSIEVYEDAGSHYLCLLKARTRDSGTYSCTASNAQGQLSCSWTLQVERLAVMEVAPSFSSVLKDCAVIEGQDFVLQCSVRGTPVPRITWLLNGQPIQYARSTCEAGVAELHIQDALPEDHGTYTCLAENALGQVSCSAWVTVHEKKSSRKSEYLLPVAPSKPTAPIFLQGLSDLKVMDGSQVTMTVQVSGNPPPEVIWLHNGNEIQESEDFHFEQRGTQHSLCIQEVFPEDTGTYTCEAWNSAGEVRTQAVLTVQEPHDGTQPWFISKPRSVTASLGQSVLISCAIAGDPFPTVHWLRDGKALCKDTGHFEVLQNEDVFTLVLKKVQPWHAGQYEILLKNRVGECSCQVSLMLQNSSARALPRGREPASCEDLCGGGVGADGGGSDRYGSLRPGWPARGQGWLEEEDGEDVRGVLKRRVETRQHTEEAIRQQEVEQLDFRDLLGKKVSTKTLSEDDLKEIPAEQMDFRANLQRQVKPKTVSEEERKVHSPQQVDFRSVLAKKGTSKTPVPEKVPPPKPATPDFRSVLGGKKKLPAENGSSSAETLNAKAVESSKPLSNAQPSGPLKPVGNAKPAETLKPMGNAKPAETLKPMGNAKPDENLKSASKEELKKDVKNDVNCKRGHAGTTDNEKRSESQGTAPAFKQKLQDVHVAEGKKLLLQCQVSSDPPATIIWTLNGKTLKTTKFIILSQEGSLCSVSIEKALPEDRGLYKCVAKNDAGQAECSCQVTVDDAPASENTKAPEMKSRRPKSSLPPVLGTESDATVKKKPAPKTPPKAAMPPQIIQFPEDQKVRAGESVELFGKVTGTQPITCTWMKFRKQIQESEHMKVENSENGSKLTILAARQEHCGCYTLLVENKLGSRQAQVNLTVVDKPDPPAGTPCASDIRSSSLTLSWYGSSYDGGSAVQSYSIEIWDSANKTWKELATCRSTSFNVQDLLPDHEYKFRVRAINVYGTSEPSQESELTTVGEKPEEPKDEVEVSDDDEKEPEVDYRTVTINTEQKVSDFYDIEERLGSGKFGQVFRLVEKKTRKVWAGKFFKAYSAKEKENIRQEISIMNCLHHPKLVQCVDAFEEKANIVMVLEIVSGGELFERIIDEDFELTERECIKYMRQISEGVEYIHKQGIVHLDLKPENIMCVNKTGTRIKLIDFGLARRLENAGSLKVLFGTPEFVAPEVINYEPIGYATDMWSIGVICYILNRLDCTQCLQHPWLMKDTKNMEAKKLSKDRMKKYMARRKWQKTGNAVRAIGRLSSMAMISGLSGRKSSTGSPTSPLNAEKLESEEDVSQAFLEAVAEEKPHVKPYFSKTIRDLEVVEGSAARFDCKIEGYPDPEVVWFKDDQSIRESRHFQIDYDEDGNCSLIISDVCGDDDAKYTCKAVNSLGEATCTAELIVETMEEGEGEGEEEEE

SEQ ID NO: 1337 - DNA, 7614 bp, Homo sapiens
ggcgctgagcgagctcggagcccgcgctgtgcgcctgcggccggggcgccccgccgagcgccggtgccccggctcccgggccgccttcgccgcgcgggaaggattcttcaaaattaacagaaaccaattcgggccagctgaagagaaaaaataaaggtggctcccggctgcctctgctgcagttcagagcaacttcaggagcttcccagccgagagcttcaggacgcctttcctgtcccactggcccagttgccacaacaaacaacagagaagacggtgaccatgggggatgtgaagctggttgcctcgtcacacatttccaaaacctccctcagtgtggatccctcaagagttgactccatgcccctgacagaggcccctgctttcattttgccccctcggaacctctgcatcaaagaaggagccaccgccaagttcgaagggcgggtccggggttacccagagccccaggtgacatggcacagaaacgggcaacccatcaccagcgggggccgcttcctgctggattgcggcatccgggggactttcagccttgtgattcatgctgtccatgaggaggacaggggaaagtatacctgtgaagccaccaatggcagtggtgctcgccaggtgacagtggagttgacagtagaaggtgattttgcgaagcagcttggtcagcctgttgtttccaaaaccttaggggatagattttcagctccagcagtggagacccgtcctagcatctggggggagtgcccaccaaagtttgctaccaagctgggccgagttgtggtcaaagaaggacagatgggacgattctcctgcaagatcactggccggccccaaccgcaggtcacctggctcaagggaaatgttccactgcagccgagtgcccgtgtgtctgtgtctgagaagaacggcatgcaggttctggaaatccatggagtcaaccaagatgacgtgggagtgtacacgtgcctggtggtgaacgggtcggggaaggcctcgatgtcagctgaactttccatccaaggtatcgaccagagctgcttgtcatttgtgagagaaacaaaagccaccaattcagatgtcaggaaagaggtgaccaatgtaatctcaaaggagtcgaagctggacagtctggaggctgcagccaaaagcaagaactgctccagcccccagagaggtggctccccaccctgggctgcaaacagccagcctcagcccccaagggagtccaagctggagtcatgcaaggactcgcccagaacggccccgcagaccccggtccttcagaagacttccagctccatcaccctgcaggccgcaagagttcagccggaaccaagagcaccaggcctgggggtcctatcaccttctggagaagagaggaagaggccagctcctccccgtccagccaccttccccaccaggcagcctggcctggggagccaagatgttgtgagcaaggctgctaacaggagaatccccatggagggccagagggattcagcattccccaaatttgagagcaagccccaaagccaggaggtcaaggaaaatcaaactgtcaagttcagatgtgaagtttccgggattccaaagcctgaagtggcctggttcctggaaggcacccccgtgaggagacaggaaggcagcattgaggtttatgaagatgctggctcccattacctctgcctgctgaaagcccggaccagggacagtgggacatacagctgcactgcttccaacgcccaaggccagctgtcctgtagctggaccctccaagtggaaaggcttgccgtgatggaggtggccccctccttctccagtgtcctgaaggactgcgctgttattgagggccaggattttgtgctgcagtgctccgtacgggggaccccagtgccccggatcacttggctgctgaatgggcagcccatccagtacgctcgctccacctgcgaggccggcgtggctgagctccacatccaggatgccctgccggaggaccatggcacctacacctgcctagctgagaatgccttggggcaggtgtcctgcagcgcctgggtcaccgtccatgaaaagaagagtagcaggaagagtgagtaccttctgcctgtggctcccagcaagcccactgcacccatcttcctgcagggcctctctgatctcaaagtcatggatggaagccaggtcactatgactgtccaagtgtcagggaatccaccccctgaagtcatctggctgcacaatgggaatgagatccaagagtcagaggacttccactttgaacagagaggaactcagcacagcctttgtatccaggaagtgttcccggaggacacgggcacgtacacctgcgaggcctggaacagcgctggagaggtccgcacccaggccgtgctcacggtacaagagcctcacgatggcacccagccctggttcatcagtaagcctcgctcagtgacagcctccctgggccagagtgtcctcatctcctgcgccatagctggtgacccctttcctaccgtgcactggctcagagatggcaaagccctctgcaaagacactggccacttcgaggtgcttcagaatgaggacgtgttcaccctggttctaaagaaggtgcagccctggcatgccggccagtatgagatcctgctcaagaaccgggttggcgaatgcagttgccaggtgtcactgatgctacagaacagctctgccagagcccttccacgggggagggagcctgccagctgcgaggacctctgtggtggaggagttggtgctgatggtggtggtagtgaccgctatgggtccctgaggcctggctggccagcaagagggcagggttggctagaggaggaagacggcgaggacgtgcgaggggtgctgaagaggcgcgtggagacgaggcagcacactgaggaggcgatccgccagcaggaggtggagcagctggacttccgagacctcctggggaagaaggtgagtacaaagaccctatcggaagacgacctgaaggagatcccagccgagcagatggatttccgtgccaacctgcagcggcaagtgaagccaaagactgtgtctgaggaagagaggaaggtgcacagcccccagcaggtcgattttcgctctgtcctggccaagaaggggacttccaagacccccgtgcctgagaaggtgccaccgccaaaacctgccaccccggattttcgctcagtgctgggtggcaagaagaaattaccagcagagaatggcagcagcagtgccgagaccctgaatgccaaggcagtggagagttccaagcccctgagcaatgcacagccttcagggcccttgaaacccgtgggcaacgccaagcctgctgagaccctgaagccaatgggcaacgccaagcctgccgagaccctgaagcccatgggcaatgccaagcctgatgagaacctgaaatccgctagcaaagaagaactcaagaaagacgttaagaatgatgtgaactgcaagagaggccatgcagggaccacagataatgaaaagagatcagagagccaggggacagccccagccttcaagcagaagctgcaagatgttcatgtggcagagggcaagaagctgctgctccagtgccaggtgtcttctgaccccccagccaccatcatctggacgctgaacggaaagaccctcaagaccaccaagttcatcatcctctcccaggaaggctcactctgctccgtctccatcgagaaggcactgcctgaggacagaggcttatacaagtgtgtagccaagaatgacgctggccaggcggagtgctcctgccaagtcaccgtggatgatgctccagccagtgagaacaccaaggccccagagatgaaatcccggaggcccaagagctctcttcctcccgtgctaggaactgagagtgatgcgactgtgaaaaagaaacctgcccccaagacacctccgaaggcagcaatgccccctcagatcatccagttccctgaggaccagaaggtacgcgcaggagagtcagtggagctgtttggcaaagtgacaggcactcagcccatcacctgtacctggatgaagttccgaaagcagatccaggaaagcgagcacatgaaggtggagaacagcgagaatggcagcaagctcaccatcctggccgcgcgccaggagcactgcggctgctacacactgctggtggagaacaagctgggcagcaggcaggcccaggtcaacctcactgtcgtggataagccagaccccccagctggcacaccttgtgcctctgacattcggagctcctcactgaccctgtcctggtatggctcctcatatgatgggggcagtgctgtacagtcctacagcatcgagatctgggactcagccaacaagacgtggaaggaactagccacatgccgcagcacctctttcaacgtccaggacctgctgcctgaccacgaatataagttccgtgtacgtgcaatcaacgtgtatggaaccagtgagccaagccaggagtctgaactcacaacggtaggagagaaacctgaagagccgaaggatgaagtggaggtgtcagatgatgatgagaaggagcccgaggttgattaccggacagtgacaatcaatactgaacaaaaagtatctgacttctacgacattgaggagagattaggatcctgtttgagcgcatcattgacgaggactttgagctgacggagcgtgagtgcatcaagtacatgcggcagatctcggagggagtggagtacatccacaagcagggcatcgtgcacctggacctcaagccggagaacatcatgtgtgtcaacaagacgggcaccaggatcaagctcatcgactttggtctggccaggaggctggagaatgcggggtctctgaaggtcctctttggcaccccagaatttgtggctcctgaagtgatcaactatgagcccatcggctacgccacagacatgtggagcatcggggtcatctgctacatcctagtcagtggcctttcccccttcatgggagacaacgataacgaaaccttggccaacgttacctcagccacctgggacttcgacgacgaggcattcgatgagatctccgacgatgccaaggatttcatcagcaatctgctgaagaaagatatgaaaaaccgcctggactgcacgcagtgccttcagcatccatggctaatgaaagataccaagaacatggaggccaagaaactctccaaggaccggatgaagaagtacatggcaagaaggaaatggcagaaaacgggcaatgctgtgagagccattggaagactgtcctctatggcaatgatctcagggctcagtggcaggaaatcctcaacagggtcaccaaccagcccgctcaatgcagaaaaactagaatctgaagaagatgtgtcccaagctttccttgaggctgttgctgaggaaaagcctcatgtaaaaccctatttctctaagaccattcgcgatttagaagttgtggagggaagtgctgctagatttgactgcaagattgaaggatacccagaccccgaggttgtctggttcaaagatgaccagtcaatcagggagtcccgccacttccagatagactacgatgaggacgggaactgctctttaattattagtgatgtttgcggggatgacgatgccaagtacacctgcaaggctgtcaacagtcttggagaagccacctgcacagcagagctcattgtggaaacgatggaggaaggtgaaggggaaggggaagaggaagaagagtgaaacaaagccagagaaaagcagtttctaagtcatattaaaaggactatttctctaaaactcaaaaaaaaaaaaaaaactcaagatagtaaaagcacctagtgtgatagattatcggttaggtcatttgtgggttgattcttcagaaacagcagttgatacctagcagcgttattgatgggcattaatctatgttagttggcaccttaagatactagtgcagctagatttcatttagggaaatcaccagtaacttgactgaccaattgattttagagagaaagtaaccaaaccaaatatttatctgggcaaagtcataaattctccacttgaatgcgctcatgaaaaataaggccaaaacaagagttctgggccacagctcagcccagagggttcctggggatgggaggcctctctctccccaccccctgactctagagaactgggttttctcccagtactccagcaattcatttctgaaagcagttgagccactttattccaaagtacactgcagatgttcaaactctccatttctctttccccttccacctgccagttttgctgactctcaacttgtcatgagtgtaagcattaaggacattatgcttcttcgattctgaagacaggtccctgctcatggatgactctggcttccttaggaaaatatttttcttccaaaatcagtaggaaatctaaacttatcccctctttgcagatgtctagcagcttcagacatttggttaagaacccatgggaaaaaaaaaatccttgctaatgtggtttcctttgtaaaccaggattcttatttgtgctgttatagaatatcagctctgaacgtgtggtaaagatttttgtgtttgaatataggagaaatcagtttgctgaaaagttagtcttaattatctattggccacgatgaaacagatttcaactgataaagagctggagaactccatgtactttggaatctcctccaagatagccagagtttaatacatcttcattctcaacactctccaaagaacttgacctaccttatgggttccatatttttcttcttaaatgtgcatcaatcatgccttgcccccaacctttaaatatattcttagacctggtaaatgcactcagacttgcgtctttaggaatttttaactttctttcactacattggcacttaaattttttctttataaagctttttgaaggtcataaacaaagaccataattgatgatagacctaatacatttcctctgtgtgtgtgtgtaacattccaaatactttttttttcttttccactgtttgtaaggtgcaacaatttaatatttttaagggactttttaagagttccttaagaaccaatttaaaattacttcagtgcaatcctacacagtatcaacattagaattttgatattagtcttatgttatcttccattctatttttatctgctttttgctgctagtttcaaactgccagtatttttccttttgcttttaaaatagttacaatatttttcatgatagccacagtattgccacagtttattataataaagggtttttatttgatttagcgcattcaaagcttttttctatcacttttgtgttcagaatataacctttgtgtgcgtgtatgttgtgtgtgtgcatgtgtggcgtatatgtgtgttacaggttaatgccttcttggaattgtgttaatgttctcttggtttattatgccatcagaatggtaaatgagaacactacaactgtagtcagctcacaatttttaaataaaggataccacagtgcatgctgtttgttc

SEQ ID NO: 1338 - protein, 1483 aa, Homo sapiens
MGDVKLVASSHISKTSLSVDPSRVDSMPLTEAPAFILPPRNLCIKEGATAKFEGRVRGYPEPQVTWHRNGQPITSGGRFLLDCGIRGTFSLVIHAVHEEDRGKYTCEATNGSGARQVTVELTVEGDFAKQLGQPVVSKTLGDRFSAPAVETRPSIWGECPPKFATKLGRVVVKEGQMGRFSCKITGRPQPQVTWLKGNVPLQPSARVSVSEKNGMQVLEIHGVNQDDVGVYTCLVVNGSGKASMSAELSIQGIDQSCLSFVRETKATNSDVRKEVTNVISKESKLDSLEAAAKSKNCSSPQRGGSPPWAANSQPQPPRESKLESCKDSPRTAPQTPVLQKTSSSITLQAARVQPEPRAPGLGVLSPSGEERKRPAPPRPATFPTRQPGLGSQDVVSKAANRRIPMEGQRDSAFPKFESKPQSQEVKENQTVKFRCEVSGIPKPEVAWFLEGTPVRRQEGSIEVYEDAGSHYLCLLKARTRDSGTYSCTASNAQGQLSCSWTLQVERLAVMEVAPSFSSVLKDCAVIEGQDFVLQCSVRGTPVPRITWLLNGQPIQYARSTCEAGVAELHIQDALPEDHGTYTCLAENALGQVSCSAWVTVHEKKSSRKSEYLLPVAPSKPTAPIFLQGLSDLKVMDGSQVTMTVQVSGNPPPEVIWLHNGNEIQESEDFHFEQRGTQHSLCIQEVFPEDTGTYTCEAWNSAGEVRTQAVLTVQEPHDGTQPWFISKPRSVTASLGQSVLISCAIAGDPFPTVHWLRDGKALCKDTGHFEVLQNEDVFTLVLKKVQPWHAGQYEILLKNRVGECSCQVSLMLQNSSARALPRGREPASCEDLCGGGVGADGGGSDRYGSLRPGWPARGQGWLEEEDGEDVRGVLKRRVETRQHTEEAIRQQEVEQLDFRDLLGKKVSTKTLSEDDLKEIPAEQMDFRANLQRQVKPKTVSEEERKVHSPQQVDFRSVLAKKGTSKTPVPEKVPPPKPATPDFRSVLGGKKKLPAENGSSSAETLNAKAVESSKPLSNAQPSGPLKPVGNAKPAETLKPMGNAKPAETLKPMGNAKPDENLKSASKEELKKDVKNDVNCKRGHAGTTDNEKRSESQGTAPAFKQKLQDVHVAEGKKLLLQCQVSSDPPATIIWTLNGKTLKTTKFIILSQEGSLCSVSIEKALPEDRGLYKCVAKNDAGQAECSCQVTVDDAPASENTKAPEMKSRRPKSSLPPVLGTESDATVKKKPAPKTPPKAAMPPQIIQFPEDQKVRAGESVELFGKVTGTQPITCTWMKFRKQIQESEHMKVENSENGSKLTILAARQEHCGCYTLLVENKLGSRQAQVNLTVVDKPDPPAGTPCASDIRSSSLTLSWYGSSYDGGSAVQSYSIEIWDSANKTWKELATCRSTSFNVQDLLPDHEYKFRVRAINVYGTSEPSQESELTTVGEKPEEPKDEVEVSDDDEKEPEVDYRTVTINTEQKVSDFYDIEERLGSCLSASLTRTLS

SEQ ID NO: 1339 - DNA, 7627 bp, Homo sapiens
ggcgctgagcgagctcggagcccgcgctgtgcgcctgcggccggggcgccccgccgagcgccggtgccccggctcccgggccgccttcgccgcgcgggaaggattcttcaaaattaacagaaaccaattcgggccagctgaagagaaaaaataaaggtggctcccggctgcctctgctgcagttcagagcaacttcaggagcttcccagccgagagcttcaggacgcctttcctgtcccactggcccagttgccacaacaaacaacagagaagacggtgaccatgggggatgtgaagctggttgcctcgtcacacatttccaaaacctccctcagtgtggatccctcaagagttgactccatgcccctgacagaggcccctgctttcattttgccccctcggaacctctgcatcaaagaaggagccaccgccaagttcgaagggcgggtccggggttacccagagccccaggtgacatggcacagaaacgggcaacccatcaccagcgggggccgcttcctgctggattgcggcatccgggggactttcagccttgtgattcatgctgtccatgaggaggacaggggaaagtatacctgtgaagccaccaatggcagtggtgctcgccaggtgacagtggagttgacagtagaaggaagttttgcgaagcagcttggtcagcctgttgtttccaaaaccttaggggatagattttcagctccagcagtggagacccgtcctagcatctggggggagtgcccaccaaagtttgctaccaagctgggccgagttgtggtcaaagaaggacagatgggacgattctcctgcaagatcactggccggccccaaccgcaggtcacctggctcaagggaaatgttccactgcagccgagtgcccgtgtgtctgtgtctgagaagaacggcatgcaggttctggaaatccatggagtcaaccaagatgacgtgggagtgtacacgtgcctggtggtgaacgggtcggggaaggcctcgatgtcagctgaactttccatccaaggtttggacagtgccaataggtcatttgtgagagaaacaaaagccaccaattcagatgtcaggaaagaggtgaccaatgtaatctcaaaggagtcgaagctggacagtctggaggctgcagccaaaagcaagaactgctccagcccccagagaggtggctccccaccctgggctgcaaacagccagcctcagcccccaagggagtccaagctggagtcatgcaaggactcgcccagaacggccccgcagaccccggtccttcagaagacttccagctccatcaccctgcaggccgcaagagttcagccggaaccaagagcaccaggcctgggggtcctatcaccttctggagaagagaggaagaggccagctcctccccgtccagccaccttccccaccaggcagcctggcctggggagccaagatgttgtgagcaaggctgctaacaggagaatccccatggagggccagagggattcagcattccccaaatttgagagcaagccccaaagccaggaggtcaaggaaaatcaaactgtcaagttcagatgtgaagggcttgccgtgatggaggtggccccctccttctccagtgtcctgaaggactgcgctgttattgagggccaggattttgtgctgcagtgctccgtacgggggaccccagtgccccggatcacttggctgctgaatgggcagcccatccagtacgctcgctccacctgcgaggccggcgtggctgagctccacatccaggatgccctgccggaggaccatggcacctacacctgcctagctgagaatgccttggggcaggtgtcctgcagcgcctgggtcaccgtccatgaaaagaagagtagcaggaagagtgagtaccttctgcctgtggctcccagcaagcccactgcacccatcttcctgcagggcctctctgatctcaaagtcatggatggaagccaggtcactatgactgtccaagtgtcagggaatccaccccctgaagtcatctggctgcacaatgggaatgagatccaagagtcagaggacttccactttgaacagagaggaactcagcacagcctttgtatccaggaagtgttcccggaggacacgggcacgtacacctgcgaggcctggaacagcgctggagaggtccgcacccaggccgtgctcacggtacaagagcctcacgatggcacccagccctggttcatcagtaagcctcgctcagtgacagcctccctgggccagagtgtcctcatctcctgcgccatagctggtgacccctttcctaccgtgcactggctcagagatggcaaagccctctgcaaagacactggccacttcgaggtgcttcagaatgaggacgtgttcaccctggttctaaagaaggtgcagccctggcatgccggccagtatgagatcctgctcaagaaccgggttggcgaatgcagttgccaggtgtcactgatgctacagaacagctctgccagagcccttccacgggggagggagcctgccagctgcgaggacctctgtggtggaggagttggtgctgatggtggtggtagtgaccgctatgggtccctgaggcctggctggccagcaagagggcagggttggctagaggaggaagacggcgaggacgtgcgaggggtgctgaagaggcgcgtggagacgaggcagcacactgaggaggcgatccgccagcaggaggtggagcagctggacttccgagacctcctggggaagaaggtgagtacaaagaccctatcggaagacgacctgaaggagatcccagccgagcagatggatttccgtgccaacctgcagcggcaagtgaagccaaagactgtgtctgaggaagagaggaaggtgcacagcccccagcaggtcgattttcgctctgtcctggccaagaaggggacttccaagacccccgtgcctgagaaggtgccaccgccaaaacctgccaccccggattttcgctcagtgctgggtggcaagaagaaattaccagcagagaatggcagcagcagtgccgagaccctgaatgccaaggcagtggagagttccaagcccctgagcaatgcacagccttcagggcccttgaaacccgtgggcaacgccaagcctgctgagaccctgaagccaatgggcaacgccaagcctgccgagaccctgaagcccatgggcaatgccaagcctgatgagaacctgaaatccgctagcaaagaagaactcaagaaagacgttaagaatgatgtgaactgcaagagaggccatgcagggaccacagataatgaaaagagatcagagagccaggggacagccccagccttcaagcagaagctgcaagatgttcatgtggcagagggcaagaagctgctgctccagtgccaggtgtcttctgaccccccagccaccatcatctggacgctgaacggaaagaccctcaagaccaccaagttcatcatcctctcccaggaaggctcactctgctccgtctccatcgagaaggcactgcctgaggacagaggcttatacaagtgtgtagccaagaatgacgctggccaggcggagtgctcctgccaagtcaccgtggatgatgctccagccagtgagaacaccaaggccccagagatgaaatcccggaggcccaagagctctcttcctcccgtgctaggaactgagagtgatgcgactgtgaaaaagaaacctgcccccaagacacctccgaaggcagcaatgccccctcagatcatccagttccctgaggaccagaaggtacgcgcaggagagtcagtggagctgtttggcaaagtgacaggcactcagcccatcacctgtacctggatgaagttccgaaagcagatccaggaaagcgagcacatgaaggtggagaacagcgagaatggcagcaagctcaccatcctggccgcgcgccaggagcactgcggctgctacacactgctggtggagaacaagctgggcagcaggcaggcccaggtcaacctcactgtcgtggataagccagaccccccagctggcacaccttgtgcctctgacattcggagctcctcactgaccctgtcctggtatggctcctcatatgatgggggcagtgctgtacagtcctacagcatcgagatctgggactcagccaacaagacgtggaaggaactagccacatgccgcagcacctctttcaacgtccaggacctgctgcctgaccacgaatataagttccgtgtacgtgcaatcaacgtgtatggaaccagtgagccaagccaggagtctgaactcacaacggtaggagagaaacctgaagagccgaaggatgaagtggaggtgtcagatgatgatgagaaggagcccgaggttgattaccggacagtgacaatcaatactgaacaaaaagtatctgacttctacgacattgaggagagattaggatctgggaaatttggacaggtctttcgacttgtagaaaagaaaactcgaaaagtctgggcagggaagttcttcaaggcatattcagcaaaagagaaagagaatatccggcaggagattagcatcatgaactgcctccaccaccctaagctggtccagtgtgtggatgcctttgaagaaaaggccaacatcgtcatggtcctggagatcgtgtcaggaggggagctgtttgagcgcatcattgacgaggactttgagctgacggagcgtgagtgcatcaagtacatgcggcagatctcggagggagtggagtacatccacaagcagggcatcgtgcacctggacctcaagccggagaacatcatgtgtgtcaacaagacgggcaccaggatcaagctcatcgactttggtctggccaggaggctggagaatgcggggtctctgaaggtcctctttggcaccccagaatttgtggctcctgaagtgatcaactatgagcccatcggctacgccacagacatgtggagcatcggggtcatctgctacatcctagtcagtggcctttcccccttcatgggagacaacgataacgaaaccttggccaacgttacctcagccacctgggacttcgacgacgaggcattcgatgagatctccgacgatgccaaggatttcatcagcaatctgctgaagaaagatatgaaaaaccgcctggactgcacgcagtgccttcagcatccatggctaatgaaagataccaagaacatggaggccaagaaactctccaaggaccggatgaagaagtacatggcaagaaggaaatggcagaaaacgggcaatgctgtgagagccattggaagactgtcctctatggcaatgatctcagggctcagtggcaggaaatcctcaacagggtcaccaaccagcccgctcaatgcagaaaaactagaatctgaagaagatgtgtcccaagctttccttgaggctgttgctgaggaaaagcctcatgtaaaaccctatttctctaagaccattcgcgatttagaagttgtggagggaagtgctgctagatttgactgcaagattgaaggatacccagaccccgaggttgtctggttcaaagatgaccagtcaatcagggagtcccgccacttccagatagactacgatgaggacgggaactgctctttaattattagtgatgtttgcggggatgacgatgccaagtacacctgcaaggctgtcaacagtcttggagaagccacctgcacagcagagctcattgtggaaacgatggaggaaggtgaaggggaaggggaagaggaagaagagtgaaacaaagccagagaaaagcagtttctaagtcatattaaaaggactatttctctaaaactcaaaaaaaaaaaaaaaactcaagatagtaaaagcacctagtgtgatagattatcggttaggtcatttgtgggttgattcttcagaaacagcagttgatacctagcagcgttattgatgggcattaatctatgttagttggcaccttaagatactagtgcagctagatttcatttagggaaatcaccagtaacttgactgaccaattgattttagagagaaagtaaccaaaccaaatatttatctgggcaaagtcataaattctccacttgaatgcgctcatgaaaaataaggccaaaacaagagttctgggccacagctcagcccagagggttcctggggatgggaggcctctctctccccaccccctgactctagagaactgggttttctcccagtactccagcaattcatttctgaaagcagttgagccactttattccaaagtacactgcagatgttcaaactctccatttctctttccccttccacctgccagttttgctgactctcaacttgtcatgagtgtaagcattaaggacattatgcttcttcgattctgaagacaggtccctgctcatggatgactctggcttccttaggaaaatatttttcttccaaaatcagtaggaaatctaaacttatcccctctttgcagatgtctagcagcttcagacatttggttaagaacccatgggaaaaaaaaaatccttgctaatgtggtttcctttgtaaaccaggattcttatttgtgctgttatagaatatcagctctgaacgtgtggtaaagatttttgtgtttgaatataggagaaatcagtttgctgaaaagttagtcttaattatctattggccacgatgaaacagatttcaactgataaagagctggagaactccatgtactttggaatctcctccaagatagccagagtttaatacatcttcattctcaacactctccaaagaacttgacctaccttatgggttccatatttttcttcttaaatgtgcatcaatcatgccttgcccccaacctttaaatatattcttagacctggtaaatgcactcagacttgcgtctttaggaatttttaactttctttcactacattggcacttaaattttttctttataaagctttttgaaggtcataaacaaagaccataattgatgatagacctaatacatttcctctgtgtgtgtgtgtaacattccaaatactttttttttcttttccactgtttgtaaggtgcaacaatttaatatttttaagggactttttaagagttccttaagaaccaatttaaaattacttcagtgcaatcctacacagtatcaacattagaattttgatattagtcttatgttatcttccattctatttttatctgctttttgctgctagtttcaaactgccagtatttttccttttgcttttaaaatagttacaatatttttcatgatagccacagtattgccacagtttattataataaagggtttttatttgatttagcgcattcaaagcttttttctatcacttttgtgttcagaatataacctttgtgtgcgtgtatgttgtgtgtgtgcatgtgtggcgtatatgtgtgttacaggttaatgccttcttggaattgtgttaatgttctcttggtttattatgccatcagaatggtaaatgagaacactacaactgtagtcagctcacaatttttaaataaaggataccacagtgcatgctgtttgttc

SEQ ID NO: 1340 - protein, 992 aa, Homo sapiens
MDFRANLQRQVKPKTVSEEERKVHSPQQVDFRSVLAKKGTSKTPVPEKVPPPKPATPDFRSVLGGKKKLPAENGSSSAETLNAKAVESSKPLSNAQPSGPLKPVGNAKPAETLKPMGNAKPAETLKPMGNAKPDENLKSASKEELKKDVKNDVNCKRGHAGTTDNEKRSESQGTAPAFKQKLQDVHVAEGKKLLLQCQVSSDPPATIIWTLNGKTLKTTKFIILSQEGSLCSVSIEKALPEDRGLYKCVAKNDAGQAECSCQVTVDDAPASENTKAPEMKSRRPKSSLPPVLGTESDATVKKKPAPKTPPKAAMPPQIIQFPEDQKVRAGESVELFGKVTGTQPITCTWMKFRKQIQESEHMKVENSENGSKLTILAARQEHCGCYTLLVENKLGSRQAQVNLTVVDKPDPPAGTPCASDIRSSSLTLSWYGSSYDGGSAVQSYSIEIWDSANKTWKELATCRSTSFNVQDLLPDHEYKFRVRAINVYGTSEPSQESELTTVGEKPEEPKDEVEVSDDDEKEPEVDYRTVTINTEQKVSDFYDIEERLGSGKFGQVFRLVEKKTRKVWAGKFFKAYSAKEKENIRQEISIMNCLHHPKLVQCVDAFEEKANIVMVLEIVSGGELFERIIDEDFELTERECIKYMRQISEGVEYIHKQGIVHLDLKPENIMCVNKTGTRIKLIDFGLARRLENAGSLKVLFGTPEFVAPEVINYEPIGYATDMWSIGVICYILVSGLSPFMGDNDNETLANVTSATWDFDDEAFDEISDDAKDFISNLLKKDMKNRLDCTQCLQHPWLMKDTKNMEAKKLSKDRMKKYMARRKWQKTGNAVRAIGRLSSMAMISGLSGRKSSTGSPTSPLNAEKLESEEDVSQAFLEAVAEEKPHVKPYFSKTIRDLEVVEGSAARFDCKIEGYPDPEVVWFKDDQSIRESRHFQIDYDEDGNCSLIISDVCGDDDAKYTCKAVNSLGEATCTAELIVETMEEGEGEGEEEEE

SEQ ID NO: 1341 - DNA, 5770 bp, Homo sapiens
ccggctgcctctgctgcagttcagagcaacttcaggagcttcccagccgagagcttcaggacgcctttcctgtcccactggcccagttgccacaacaaacaacagagaagacggtgaccatgggggatgtgaagctggttgcctcgtcacacatttccaaaacctccctcagtgtggatccctcaagagttgactccatgcccctgacagaggcccctgctttcattttgccccctcggaacctctgcatcaaagaaggagccaccgccaagttcgaagggcgggtccggggttacccagagccccaggtgacatggcacagaaacgggcaacccatcaccagcgggggccgcttcctgctggattgcggcatccgggggactttcagccttgtgattcatgctgtccatgaggaggacaggggaaagtatacctgtgaagccaccaatggcagtggtgctcgccaggtgacagtggagttgacagtagaaggtgattttgcgaagcagcttggtcagcctgttgtttccaaaaccttaggggatagattttcagctccagcagtggagacccgtcctagcatctggggggagtgcccaccaaagtttgctaccaagctgggccgagttgtggtcaaagaaggacagatgggacgattctcctgcaagatcactggccggccccaaccgcaggtcacctggctcaagggaaatgttccactgcagccgagtgcccgtgtgtctgtgtctgagaagaacggcatgcaggttctggaaatccatggagtcaaccaagatgacgtgggagtgtacacgtgcctggtggtgaacgggtcggggaaggcctcgatgtcagctgaactttccatccaaggtttggacagtgccaataggtcatttgtgagagaaacaaaagccaccaattcagatgtcaggaaagaggtgaccaatgtaatctcaaaggagtcgaagctggacagtctggaggctgcagccaaaagcaagaactgctccagcccccagagaggtggctccccaccctgggctgcaaacagccagcctcagcccccaagggagtccaagctggagtcatgcaaggactcgcccagaacggccccgcagaccccggtccttcagaagacttccagctccatcaccctgcaggccgcaagagttcagccggaaccaagagcaccaggcctgggggtcctatcaccttctggagaagagaggaagaggccagctcctccccgtccagccaccttccccaccaggcagcctggcctggggagccaagatgttgtgagcaaggctgctaacaggagaatccccatggagggccagagggattcagcattccccaaatttgagagcaagccccaaagccaggaggtcaaggaaaatcaaactgtcaagttcagatgtgaagtttccgggattccaaagcctgaagtggcctggttcctggaaggcacccccgtgaggagacaggaaggcagcattgaggtttatgaagatgctggctcccattacctctgcctgctgaaagcccggaccagggacagtgggacatacagctgcactgcttccaacgcccaaggccagctgtcctgtagctggaccctccaagtggaaaggcttgccgtgatggaggtggccccctccttctccagtgtcctgaaggactgcgctgttattgagggccaggattttgtgctgcagtgctccgtacgggggaccccagtgccccggatcacttggctgctgaatgggcagcccatccagtacgctcgctccacctgcgaggccggcgtggctgagctccacatccaggatgccctgccggaggaccatggcacctacacctgcctagctgagaatgccttggggcaggtgtcctgcagcgcctgggtcaccgtccatgaaaagaagagtagcaggaagagtgagtaccttctgcctgtggctcccagcaagcccactgcacccatcttcctgcagggcctctctgatctcaaagtcatggatggaagccaggtcactatgactgtccaagtgtcagggaatccaccccctgaagtcatctggctgcacaatgggaatgagatccaagagtcagaggacttccactttgaacagagaggaactcagcacagcctttgtatccaggaagtgttcccggaggacacgggcacgtacacctgcgaggcctggaacagcgctggagaggtccgcacccaggccgtgctcacggtacaagagcctcacgatggcacccagccctggttcatcagtaagcctcgctcagtgacagcctccctgggccagagtgtcctcatctcctgcgccatagctggtgacccctttcctaccgtgcactggctcagagatggcaaagccctctgcaaagacactggccacttcgaggtgcttcagaatgaggacgtgttcaccctggttctaaagaaggtgcagccctggcatgccggccagtatgagatcctgctcaagaaccgggttggcgaatgcagttgccaggtgtcactgatgctacagaacagctctgccagagcccttccacgggggagggagcctgccagctgcgaggacctctgtggtggaggagttggtgctgatggtggtggtagtgaccgctatgggtccctgaggcctggctggccagcaagagggcagggttggctagaggaggaagacggcgaggacgtgcgaggggtgctgaagaggcgcgtggagacgaggcagcacactgaggaggcgatccgccagcaggaggtggagcagctggacttccgagacctcctggggaagaaggtgagtacaaagaccctatcggaagacgacctgaaggagatcccagccgagcagatggatttccgtgccaacctgcagcggcaagtgaagccaaagactgtgtctgaggaagagaggaaggtgcacagcccccagcaggtcgattttcgctctgtcctggccaagaaggggacttccaagacccccgtgcctgagaaggtgccaccgccaaaacctgccaccccggattttcgctcagtgctgggtggcaagaagaaattaccagcagagaatggcagcagcagtgccgagaccctgaatgccaaggcagtggagagttccaagcccctgagcaatgcacagccttcagggcccttgaaacccgtgggcaacgccaagcctgctgagaccctgaagccaatgggcaacgccaagcctgccgagaccctgaagcccatgggcaatgccaagcctgatgagaacctgaaatccgctagcaaagaagaactcaagaaagacgttaagaatgatgtgaactgcaagagaggccatgcagggaccacagataatgaaaagagatcagagagccaggggacagccccagccttcaagcagaagctgcaagatgttcatgtggcagagggcaagaagctgctgctccagtgccaggtgtcttctgaccccccagccaccatcatctggacgctgaacggaaagaccctcaagaccaccaagttcatcatcctctcccaggaaggctcactctgctccgtctccatcgagaaggcactgcctgaggacagaggcttatacaagtgtgtagccaagaatgacgctggccaggcggagtgctcctgccaagtcaccgtggatgatgctccagccagtgagaacaccaaggccccagagatgaaatcccggaggcccaagagctctcttcctcccgtgctaggaactgagagtgatgcgactgtgaaaaagaaacctgcccccaagacacctccgaaggcagcaatgccccctcagatcatccagttccctgaggaccagaaggtacgcgcaggagagtcagtggagctgtttggcaaagtgacaggcactcagcccatcacctgtacctggatgaagttccgaaagcagatccaggaaagcgagcacatgaaggtggagaacagcgagaatggcagcaagctcaccatcctggccgcgcgccaggagcactgcggctgctacacactgctggtggagaacaagctgggcagcaggcaggcccaggtcaacctcactgtcgtggataagccagaccccccagctggcacaccttgtgcctctgacattcggagctcctcactgaccctgtcctggtatggctcctcatatgatgggggcagtgctgtacagtcctacagcatcgagatctgggactcagccaacaagacgtggaaggaactagccacatgccgcagcacctctttcaacgtccaggacctgctgcctgaccacgaatataagttccgtgtacgtgcaatcaacgtgtatggaaccagtgagccaagccaggagtctgaactcacaacggtaggagagaaacctgaagagccatcgatgaagtggaggtgtcaggatgatgagaaggagcccgaggttgattaccggacagtgacaatcaatactgaacaaaaagtatctgacttctacgacattgaggagagattaggatctgggaaatttggacaggtctttcgacttgtagaaaagaaaactcgaaaagtctgggcagggaagttcttcaaggcatattcagcaaaagagaaagagaatatccggcaggagattagcatcatgaactgcctccaccaccctaagctggtccagtgtgtggatgcctttgaagaaaaggccaacatcgtcatggtcctggagatcgtgtcaggaggggagctgtttgagcgcatcattgacgaggactttgagctgacggagcgtgagtgcatcaagtacatgcggcagatctcggagggagtggagtacatccacaagcagggcatcgtgcacctggacctcaagccggagaacatcatgtgtgtcaacaagacgggcaccaggatcaagctcatcgactttggtctggccaggaggctggagaatgcggggtctctgaaggtcctctttggcaccccagaatttgtggctcctgaagtgatcaactatgagcccatcggctacgccacagacatgtggagcatcggggtcatctgctacatcctaaaccgcctggactgcacgcagtgccttcagcatccatggctaatgaaagataccaagaacatggaggccaagaaactctccaaggaccggatgaagaagtacatggcaagaaggaaatggcagaaaacgggcaatgctgtgagagccattggaagactgtcctctatggcaatgatctcagggctcagtggcaggaaatcctcaacagggtcaccaaccagcccgctcaatgcagaaaaactagaatctgaagaagatgtgtcccaagctttccttgaggctgttgctgaggaaaagcctcatgtaaaaccctatttctctaagaccattcgcgatttagaagttgtggagggaagtgctgctagatttgactgcaagattgaaggatacccagaccccgaggttgtctggttcaaagatgaccagtcaatcagggagtcccgccacttccagatagactacgatgaggacgggaactgctctttaattattagtgatgtttgcggggatgacgatgccaagtacacctgcaaggctgtcaacagtcttggagaagccacctgcacagcagagctcattgtggaaacgatggaggaaggtgaaggggaaggggaagaggaagaagagtgaaacaaagccagagaaaagcagtttctaagtcatattaaaaggactatttctctaaaactcaa

SEQ ID NO: 1342 - protein, 1862 aa, Homo sapiens
MGDVKLVASSHISKTSLSVDPSRVDSMPLTEAPAFILPPRNLCIKEGATAKFEGRVRGYPEPQVTWHRNGQPITSGGRFLLDCGIRGTFSLVIHAVHEEDRGKYTCEATNGSGARQVTVELTVEGDFAKQLGQPVVSKTLGDRFSAPAVETRPSIWGECPPKFATKLGRVVVKEGQMGRFSCKITGRPQPQVTWLKGNVPLQPSARVSVSEKNGMQVLEIHGVNQDDVGVYTCLVVNGSGKASMSAELSIQGLDSANRSFVRETKATNSDVRKEVTNVISKESKLDSLEAAAKSKNCSSPQRGGSPPWAANSQPQPPRESKLESCKDSPRTAPQTPVLQKTSSSITLQAARVQPEPRAPGLGVLSPSGEERKRPAPPRPATFPTRQPGLGSQDVVSKAANRRIPMEGQRDSAFPKFESKPQSQEVKENQTVKFRCEVSGIPKPEVAWFLEGTPVRRQEGSIEVYEDAGSHYLCLLKARTRDSGTYSCTASNAQGQLSCSWTLQVERLAVMEVAPSFSSVLKDCAVIEGQDFVLQCSVRGTPVPRITWLLNGQPIQYARSTCEAGVAELHIQDALPEDHGTYTCLAENALGQVSCSAWVTVHEKKSSRKSEYLLPVAPSKPTAPIFLQGLSDLKVMDGSQVTMTVQVSGNPPPEVIWLHNGNEIQESEDFHFEQRGTQHSLCIQEVFPEDTGTYTCEAWNSAGEVRTQAVLTVQEPHDGTQPWFISKPRSVTASLGQSVLISCAIAGDPFPTVHWLRDGKALCKDTGHFEVLQNEDVFTLVLKKVQPWHAGQYEILLKNRVGECSCQVSLMLQNSSARALPRGREPASCEDLCGGGVGADGGGSDRYGSLRPGWPARGQGWLEEEDGEDVRGVLKRRVETRQHTEEAIRQQEVEQLDFRDLLGKKVSTKTLSEDDLKEIPAEQMDFRANLQRQVKPKTVSEEERKVHSPQQVDFRSVLAKKGTSKTPVPEKVPPPKPATPDFRSVLGGKKKLPAENGSSSAETLNAKAVESSKPLSNAQPSGPLKPVGNAKPAETLKPMGNAKPAETLKPMGNAKPDENLKSASKEELKKDVKNDVNCKRGHAGTTDNEKRSESQGTAPAFKQKLQDVHVAEGKKLLLQCQVSSDPPATIIWTLNGKTLKTTKFIILSQEGSLCSVSIEKALPEDRGLYKCVAKNDAGQAECSCQVTVDDAPASENTKAPEMKSRRPKSSLPPVLGTESDATVKKKPAPKTPPKAAMPPQIIQFPEDQKVRAGESVELFGKVTGTQPITCTWMKFRKQIQESEHMKVENSENGSKLTILAARQEHCGCYTLLVENKLGSRQAQVNLTVVDKPDPPAGTPCASDIRSSSLTLSWYGSSYDGGSAVQSYSIEIWDSANKTWKELATCRSTSFNVQDLLPDHEYKFRVRAINVYGTSEPSQESELTTVGEKPEEPSMKWRCQDDEKEPEVDYRTVTINTEQKVSDFYDIEERLGSGKFGQVFRLVEKKTRKVWAGKFFKAYSAKEKENIRQEISIMNCLHHPKLVQCVDAFEEKANIVMVLEIVSGGELFERIIDEDFELTERECIKYMRQISEGVEYIHKQGIVHLDLKPENIMCVNKTGTRIKLIDFGLARRLENAGSLKVLFGTPEFVAPEVINYEPIGYATDMWSIGVICYILNRLDCTQCLQHPWLMKDTKNMEAKKLSKDRMKKYMARRKWQKTGNAVRAIGRLSSMAMISGLSGRKSSTGSPTSPLNAEKLESEEDVSQAFLEAVAEEKPHVKPYFSKTIRDLEVVEGSAARFDCKIEGYPDPEVVWFKDDQSIRESRHFQIDYDEDGNCSLIISDVCGDDDAKYTCKAVNSLGEATCTAELIVETMEEGEGEGEEEEE

SEQ ID NO: 1343 - DNA, 5872 bp, Homo sapiens
ggcgctgagcgagctcggagcccgcgctgtgcgcctgcggccggggcgccccgccgagcgccggtgccccggctcccgggccgccttcgccgcgcgggaaggattcttcaaaattaacagaaaccaattcgggccagctgaagagaaaaaataaaggtggctcccggctgcctctgctgcagttcagagcaacttcaggagcttcccagccgagagcttcaggacgcctttcctgtcccactggcccagttgccacaacaaacaacagagaagacggtgaccatgggggatgtgaagctggttgcctcgtcacacatttccaaaacctccctcagtgtggatccctcaagagttgactccatgcccctgacagaggcccctgctttcattttgccccctcggaacctctgcatcaaagaaggagccaccgccaagttcgaagggcgggaagttttgcgaagcagcttggtcagcctgttgtttccaaaaccttaggggatagattttcagctccagcagtggagacccgtcctagcatctggggggagtgcccaccaaagtttgctaccaagctgggccgagttgtggtcaaagaaggacagatgggacgattctcctgcaagatcactggccggccccaaccgcaggtcacctggctcaagggaaatgttccactgcagccgagtgcccgtgtgtctgtgtctgagaagaacggcatgcaggttctggaaatccatggagtcaaccaagatgacgtgggagtgtacacgtgcctggtggtgaacgggtcggggaaggcctcgatgtcagctgaactttccatccaaggtttggacagtgccaataggtcatttgtgagagaaacaaaagccaccaattcagatgtcaggaaagaggtgaccaatgtaatctcaaaggagtcgaagctggacagtctggaggctgcagccaaaagcaagaactgctccagcccccagagaggtggctccccaccctgggctgcaaacagccagcctcagcccccaagggagtccaagctggagtcatgcaaggactcgcccagaacggccccgcagaccccggtccttcagaagacttccagctccatcaccctgcaggccgcaagagttcagccggaaccaagagcaccaggcctgggggtcctatcaccttctggagaagagaggaagaggccagctcctccccgtccagccaccttccccaccaggcagcctggcctggggagccaagatgttgtgagcaaggctgctaacaggagaatccccatggagggccagagggattcagcattccccaaatttgagagcaagccccaaagccaggaggtcaaggaaaatcaaactgtcaagttcagatgtgaagtttccgggattccaaagcctgaagtggcctggttcctggaaggcacccccgtgaggagacaggaaggcagcattgaggtttatgaagatgctggctcccattacctctgcctgctgaaagcccggaccagggacagtgggacatacagctgcactgcttccaacgcccaaggccagctgtcctgtagctggaccctccaagtggaaaggcttgccgtgatggaggtggccccctccttctccagtgtcctgaaggactgcgctgttattgagggccaggattttgtgctgcagtgctccgtacgggggaccccagtgccccggatcacttggctgctgaatgggcagcccatccagtacgctcgctccacctgcgaggccggcgtggctgagctccacatccaggatgccctgccggaggaccatggcacctacacctgcctagctgagaatgccttggggcaggtgtcctgcagcgcctgggtcaccgtccatgaaaagaagagtagcaggaagagtgagtaccttctgcctgtggctcccagcaagcccactgcacccatcttcctgcagggcctctctgatctcaaagtcatggatggaagccaggtcactatgactgtccaagtgtcagggaatccaccccctgaagtcatctggctgcacaatgggaatgagatccaagagtcagaggacttccactttgaacagagaggaactcagcacagcctttgtatccaggaagtgttcccggaggacacgggcacgtacacctgcgaggcctggaacagcgctggagaggtccgcacccaggccgtgctcacggtacaagagcctcacgatggcacccagccctggttcatcagtaagcctcgctcagtgacagcctccctgggccagagtgtcctcatctcctgcgccatagctggtgacccctttcctaccgtgcactggctcagagatggcaaagccctctgcaaagacactggccacttcgaggtgcttcagaatgaggacgtgttcaccctggttctaaagaaggtgcagccctggcatgccggccagtatgagatcctgctcaagaaccgggttggcgaatgcagttgccaggtgtcactgatgctacagaacagctctgccagagcccttccacgggggagggagcctgccagctgcgaggacctctgtggtggaggagttggtgctgatggtggtggtagtgaccgctatgggtccctgaggcctggctggccagcaagagggcagggttggctagaggaggaagacggcgaggacgtgcgaggggtgctgaagaggcgcgtggagacgaggcagcacactgaggaggcgatccgccagcaggaggtggagcagctggacttccgagacctcctggggaagaaggtgagtacaaagaccctatcggaagacgacctgaaggagatcccagccgagcagatggatttccgtgccaacctgcagcggcaagtgaagccaaagactgtgtctgaggaagagaggaaggtgcacagcccccagcaggtcgattttcgctctgtcctggccaagaaggggacttccaagacccccgtgcctgagaaggtgccaccgccaaaacctgccaccccggattttcgctcagtgctgggtggcaagaagaaattaccagcagagaatggcagcagcagtgccgagaccctgaatgccaaggcagtggagagttccaagcccctgagcaatgcacagccttcagggcccttgaaacccgtgggcaacgccaagcctgctgagaccctgaagccaatgggcaacgccaagcctgccgagaccctgaagcccatgggcaatgccaagcctgatgagaacctgaaatccgctagcaaagaagaactcaagaaagacgttaagaatgatgtgaactgcaagagaggccatgcagggaccacagataatgaaaagagatcagagagccaggggacagccccagccttcaagcagaagctgcaagatgttcatgtggcagagggcaagaagctgctgctccagtgccaggtgtcttctgaccccccagccaccatcatctggacgctgaacggaaagaccctcaagaccaccaagttcatcatcctctcccaggaaggctcactctgctccgtctccatcgagaaggcactgcctgaggacagaggcttatacaagtgtgtagccaagaatgacgctggccaggcggagtgctcctgccaagtcaccgtggatgatgctccagccagtgagaacaccaaggccccagagatgaaatcccggaggcccaagagctctcttcctcccgtgctaggaactgagagtgatgcgactgtgaaaaagaaacctgcccccaagacacctccgaaggcagcaatgccccctcagatcatccagttccctgaggaccagaaggtacgcgcaggagagtcagtggagctgtttggcaaagtgacaggcactcagcccatcacctgtacctggatgaagttccgaaagcagatccaggaaagcgagcacatgaaggtggagaacagcgagaatggcagcaagctcaccatcctggccgcgcgccaggagcactgcggctgctacacactgctggtggagaacaagctgggcagcaggcaggcccaggtcaacctcactgtcgtggataagccagaccccccagctggcacaccttgtgcctctgacattcggagctcctcactgaccctgtcctggtatggctcctcatatgatgggggcagtgctgtacagtcctacagcatcgagatctgggactcagccaacaagacgtggaaggaactagccacatgccgcagcacctctttcaacgtccaggacctgctgcctgaccacgaatataagttccgtgtacgtgcaatcaacgtgtatggaaccagtgagccaagccaggagtctgaactcacaacggtaggagagaaacctgaagagccgaaggatgaagtggaggtgtcagatgatgatgagaaggagcccgaggttgattaccggacagtgacaatcaatactgaacaaaaagtatctgacttctacgacattgaggagagattaggatctgggaaatttggacaggtctttcgacttgtagaaaagaaaactcgaaaagtctgggcagggaagttcttcaaggcatattcagcaaaagagaaagagaatatccggcaggagattagcatcatgaactgcctccaccaccctaagctggtccagtgtgtggatgcctttgaagaaaaggccaacatcgtcatggtcctggagatcgtgtcaggaggggagctgtttgagcgcatcattgacgaggactttgagctgacggagcgtgagtgcatcaagtacatgcggcagatctcggagggagtggagtacatccacaagcagggcatcgtgcacctggacctcaagccggagaacatcatgtgtgtcaacaagacgggcaccaggatcaagctcatcgactttggtctggccaggaggctggagaatgcggggtctctgaaggtcctctttggcaccccagaatttgtggctcctgaagtgatcaactatgagcccatcggctacgccacagacatgtggagcatcggggtcatctgctacatcctagtcagtggcctttcccccttcatgggagacaacgataacgaaaccttggccaacgttacctcagccacctgggacttcgacgacgaggcattcgatgagatctccgacgatgccaaggatttcatcagcaatctgctgaagaaagatatgaaaaaccgcctggactgcacgcagtgccttcagcatccatggctaatgaaagataccaagaacatggaggccaagaaactctccaaggaccggatgaagaagtacatggcaagaaggaaatggcagaaaacgggcaatgctgtgagagccattggaagactgtcctctatggcaatgatctcagggctcagtggcaggaaatcctcaacagggtcaccaaccagcccgctcaatgcagaaaaactagaatctgaagaagatgtgtcccaagctttccttgaggctgttgctgaggaaaagcctcatgtaaaaccctatttctctaagaccattcgcgatttagaagttgtggagggaagtgctgctagatttgactgcaagattgaaggatacccagaccccgaggttgtctggttcaaagatgaccagtcaatcagggagtcccgccacttccagatagactacgatgaggacgggaactgctctttaattattagtgatgtttgcggggatgacgatgccaagtacacctgcaaggctgtcaacagtcttggagaagccacctgcacagcagagctcattgtggaaacgatggaggaaggtgaaggggaaggggaagaggaagaagagtgaaacaaagccagagaaaagcagtttctaagtcatattaaaaggactatttctct

SEQ ID NO: 1344 - protein, 992 aa, Homo sapiens; identical to SEQ ID NO: 1340

SEQ ID NO: 1345 - DNA, 3064 bp, Homo sapiens
agttgggctgctggagtgcggcgccaccgcggaggacaggggcagctggcgggcagcgggtgagggggtggcggggacgcgagtggcggccgcggggccccggacaagggtccgcagagctgcagccttcgagggccagccctctccgagtccggggctgggtcccaccagtgacaaggcggcagccccgcgcacaccaaagagaaggcggctgtggcggcagcggcagccccagccatgctgtgttatgtgacgaggccggacgcggtgctgatggaggtggaggtggaggcgaaagccaacggcgaggactgcctcaaccaggtgtgcaggcgactgggaatcatagaagttgactattttggactgcagtttacgggtagcaaaggtgaaagtttatggctaaacctgagaaaccggatctcccagcagatggatgggctagccccttacaggcttaaacttagagtcaagttcttcgtggagcctcatctcatcttacaggagcagactaggcatatctttttcttgcacatcaaggaggccctcttggcaggccacctcttgtgttccccagagcaggcagtggaactcagtgccctcctggcccagaccaagtttggagactacaaccagaacactgccaagtataactatgaggagctctgtgccaaggagctctcctctgccaccttgaacagcattgttgcaaaacataaggagttggaggggaccagccaggcttcagctgaataccaagttttgcagattgtgtcggcaatggaaaactatggcatagaatggcattctgtgcgggatagcgaagggcagaaactgctcattggggttggacctgaaggaatctcaatttgtaaagatgactttagcccaattaataggatagcttatcctgtggtgcagatggccacccagtcaggaaagaatgtatatttgacggtcaccaaggaatctgggaacagcatcgtgctcttgtttaaaatgatcagcaccagggcggccagcgggctctaccgagcgataacagagacgcacgcattctacaggtgtgacacagtgaccagcgccgtgatgatgcagtatagccgtgacttgaagggccacttggcatctctgtttctgaatgaaaacattaaccttggcaagaaatatgtctttgatattaaaagaacatcaaaggaggtgtatgaccatgccaggagggctctgtacaatgctggcgttgtggacctcgtttcaagaaacaaccagagcccttcacactcgcctctgaagtcctcagaaagcagcatgaactgcagcagctgcgagggcctcagctgccagcagacccgggtgctgcaggagaagctacgcaagctgaaggaagccatgctgtgcatggtgtgctgcgaggaggagatcaactccaccttctgtccctgtggccacactgtgtgctgtgagagctgcgccgcccagctacagtcatgtcccgtctgcaggtcgcgtgtggagcatgtccagcacgtctatctgccaacgcacaccagtcttctcaatctgactgtaatctaatctgttgtgcttttgttggacttggcatgtttccatgaactgcactattataaactattaaaatgatagattgtggagaaagtaattattccaacacccatctgccatgcgatgttaaaaaaaaaaaaaaggaagaaaaataacacagctactcctcactgcaaaaacatatccatgcgtagaatcaacaactccagtcatgggaccaggaggagctctgggacgcagacacattccttggatgttgattttttttatgatctagtaaaggaataggtaaagtctttgatgtcagtgaagtggcaacatagccaaaaagttgggtaccttttaggaaatgatgttgtaagtctccttaatgtatcctgaggtaagtttcctactggcagcagattttgtaagaattacttttaagaatttcattctttttgtatggtcatggagctccaaccatttttaataggaaagtcttttgtaaattgttgtcgttttaatgtcatttctgtctttataacttgatcaagaatgattggaaggcaaacaggtttacaaatcaattctgtgacttttaaaaagttgacaatgttgtcagatttaaaccagtgtggctagtaaaaagcagctcactcaatgtgggtggctccctattcctttacgctccccctatccctaccccacaagcctttcgattataaaatactaccaatcttgttataagattactgtggagtagtcaagtactccccgggccttctgagctggtggaatattttatttcagactgaaaacagagagcactctccttgggaagggaaagcggagcttgctgagtgagagatggagcctcatggtgtacaactgagggtagttaactcatcacttctcccaagcactcgatcccagcttcacccactggtgttgctttgcttgaactgttcaagccttttatagccttaccataagtatttagatatggtgtccttttctgtttttggggggggagttttgttgtgtttttttaaagtaagtgcttaagtattaactttgggttgtcccctctgtatgtttcgaaggggttttggttctttttgcttctgttttcttaaacatgttttccactcccacttgggcattttggaagctggtcagctagcaggttttctgggatgtcgggagacctagatgaccttatcgggtgcaatactagctaaggtaaagctagaaacctacactgtcactttactgagatttctgagtatacttttcatattgccttaatgtagcagtaatgtgtttatgcatttgtttctttgcacagacattttgtcaaatattaaaactctacttttttatggcacatattagcatataagcctttattccaagaggtatttattttttcacttgtaaaaaaataatgtttccacgtaaagaactctgttatatcctagaggactctgtcttttatattcgggataataaagacttt

SEQ ID NO: 1346 - protein, 445 aa, Homo sapiens
MLCYVTRPDAVLMEVEVEAKANGEDCLNQVCRRLGIIEVDYFGLQFTGSKGESLWLNLRNRISQQMDGLAPYRLKLRVKFFVEPHLILQEQTRHIFFLHIKEALLAGHLLCSPEQAVELSALLAQTKFGDYNQNTAKYNYEELCAKELSSATLNSIVAKHKELEGTSQASAEYQVLQIVSAMENYGIEWHSVRDSEGQKLLIGVGPEGISICKDDFSPINRIAYPVVQMATQSGKNVYLTVTKESGNSIVLLFKMISTRAASGLYRAITETHAFYRCDTVTSAVMMQYSRDLKGHLASLFLNENINLGKKYVFDIKRTSKEVYDHARRALYNAGVVDLVSRNNQSPSHSPLKSSESSMNCSSCEGLSCQQTRVLQEKLRKLKEAMLCMVCCEEEINSTFCPCGHTVCCESCAAQLQSCPVCRSRVEHVQHVYLPTHTSLLNLTVI

SEQ ID NO: 1347 - DNA, 3064 bp, Homo sapiens
agttgggctgctggagtgcggcgccaccgcggaggacaggggcagctggcgggcagcgggtgagggggtggcggggacgcgagtggcggccgcggggccccggacaagggtccgcagagctgcagccttcgagggccagccctctccgagtccggggctgggtcccaccagtgacaaggcggcagccccgcgcacaccaaagagaaggcggctgtggcggcagcggcagccccagccatgctgtgttatgtgacgaggccggacgcggtgctgatggaggtggaggtggaggcgaaagccaacggcgaggactgcctcaaccaggtgtgcaggcgactgggaatcatagaagttgactattttggactgcagtttacgggtagcaaaggtgaaagtttatggctaaacctgagaaaccggatctcccagcagatggatgggctagccccttacaggcttaaacttagagtcaagttcttcgtggagcctcatctcatcttacaggagcagactaggcatatctttttcttgcacatcaaggaggccctcttggcaggccacctcttgtgttccccagagcaggcagtggaactcagtgccctcctggcccagaccaagtttggagactacaaccagaacactgccaagtataactatgaggagctctgtgccaaggagctctcctctgccaccttgaacagcattgttgcaaaacataaggagttggaggggaccagccaggcttcagctgaataccaagttttgcagattgtgtcggcaatggaaaactatggcatagaatggcattctgtgcgggatagcgaagggcagaaactgctcattggggttggacctgaaggaatctcaatttgtaaagatgactttagcccaattaataggatagcttatcctgtggtgcagatggccacccagtcaggaaagaatgtatatttgacggtcaccaaggaatctgggaacagcatcgtgctcttgtttaaaatgatcagcaccagggcggccagcgggctctaccgagcgataacagagacgcacgcattctacaggcacgtatctctgaccagcgccgtgatgatgcagtatagccgtgacttgaagggccacttggcatctctgtttctgaatgaaaacattaaccttggcaagaaatatgtctttgatattaaaagaacatcaaaggaggtgtatgaccatgccaggagggctctgtacaatgctggcgttgtggacctcgtttcaagaaacaaccagagcccttcacactcgcctctgaagtcctcagaaagcagcatgaactgcagcagctgcgagggcctcagctgccagcagacccgggtgctgcaggagaagctacgcaagctgaaggaagccatgctgtgcatggtgtgctgcgaggaggagatcaactccaccttctgtccctgtggccacactgtgtgctgtgagagctgcgccgcccagctacagtcatgtcccgtctgcaggtcgcgtgtggagcatgtccagcacgtctatctgccaacgcacaccagtcttctcaatctgactgtaatctaatctgttgtgcttttgttggacttggcatgtttccatgaactgcactattataaactattaaaatgatagattgtggagaaagtaattattccaacacccatctgccatgcgatgttaaaaaaaaaaaaaaggaagaaaaataacacagctactcctcactgcaaaaacatatccatgcgtagaatcaacaactccagtcatgggaccaggaggagctctgggacgcagacacattccttggatgttgattttttttatgatctagtaaaggaataggtaaagtctttgatgtcagtgaagtggcaacatagccaaaaagttgggtaccttttaggaaatgatgttgtaagtctccttaatgtatcctgaggtaagtttcctactggcagcagattttgtaagaattacttttaagaatttcattctttttgtatggtcatggagctccaaccatttttaataggaaagtcttttgtaaattgttgtcgttttaatgtcatttctgtctttataacttgatcaagaatgattggaaggcaaacaggtttacaaatcaattctgtgacttttaaaaagttgacaatgttgtcagatttaaaccagtgtggctagtaaaaagcagctcactcaatgtgggtggctccctattcctttacgctccccctatccctaccccacaagcctttcgattataaaatactaccaatcttgttataagattactgtggagtagtcaagtactccccgggccttctgagctggtggaatattttatttcagactgaaaacagagagcactctccttgggaagggaaagcggagcttgctgagtgagagatggagcctcatggtgtacaactgagggtagttaactcatcacttctcccaagcactcgatcccagcttcacccactggtgttgctttgcttgaactgttcaagccttttatagccttaccataagtatttagatatggtgtccttttctgtttttggggggggagttttgttgtgtttttttaaagtaagtgcttaagtattaactttgggttgtcccctctgtatgtttcgaaggggttttggttctttttgcttctgttttcttaaacatgttttccactcccacttgggcattttggaagctggtcagctagcaggttttctgggatgtcgggagacctagatgaccttatcgggtgcaatactagctaaggtaaagctagaaacctacactgtcactttactgagatttctgagtatacttttcatattgccttaatgtagcagtaatgtgtttatgcatttgtttctttgcacagacattttgtcaaatattaaaactctacttttttatggcacatattagcatataagcctttattccaagaggtatttattttttcacttgtaaaaaaataatgtttccacgtaaagaactctgttatatcctagaggactctgtcttttatattcgggataataaagacttt

SEQ ID NO: 1348 - protein, 445 aa, Homo sapiens
MLCYVTRPDAVLMEVEVEAKANGEDCLNQVCRRLGIIEVDYFGLQFTGSKGESLWLNLRNRISQQMDGLAPYRLKLRVKFFVEPHLILQEQTRHIFFLHIKEALLAGHLLCSPEQAVELSALLAQTKFGDYNQNTAKYNYEELCAKELSSATLNSIVAKHKELEGTSQASAEYQVLQIVSAMENYGIEWHSVRDSEGQKLLIGVGPEGISICKDDFSPINRIAYPVVQMATQSGKNVYLTVTKESGNSIVLLFKMISTRAASGLYRAITETHAFYRHVSLTSAVMMQYSRDLKGHLASLFLNENINLGKKYVFDIKRTSKEVYDHARRALYNAGVVDLVSRNNQSPSHSPLKSSESSMNCSSCEGLSCQQTRVLQEKLRKLKEAMLCMVCCEEEINSTFCPCGHTVCCESCAAQLQSCPVCRSRVEHVQHVYLPTHTSLLNLTVI

SEQ ID NO: 1349 - DNA, 906 bp, Homo sapiens
gcggccgcggggccccggacaagggtccgcagagctgcagccttcgagggccagccctctccgagtccggggctgggtcccaccagtgacaaggcggcagccccgcgcacaccaaagagaaggcggctgtggcggcagcggcagccccagccatgctgtgttatgtgacgaggccggacgcggtgctgatggaggtggaggtggaggcgaaagccaacggcgaggactgcctcaaccaggcatatctttttcttgcacatcaaggaggccctcttggcaggccacctcttgtgttccccagagcaggcagtggaactcagtgccctcctggcccagaccaagtttggagactacaaccagaacactgccaagtataactatgaggagctctgtgccaaggagctctcctctgccaccttgaacagcattgttgcaaaacataaggagttggaggggaccagccaggcttcagctgaataccaagttttgcagattgtgtcggcaatggaaaactatggcatagaatggcattctgtgcgggatagcgaagggcagaaactgctcattggggttggacctgaaggaatctcaatttgtaaagatgactttagcccaattaataggatagcttatcctgtggtgcagatggccacccagtcaggaaagaatgtatatttgacggtcaccaaggaatctgggaacagcatcgtgctcttgtttaaaatgatcagcaccagggcggccagcgggctctaccgagcgataacagagacgcacgcattctacaggcacgtatctctgaccagcgccgtgatgatgcagtatagccgtgacttgaagggccacttggcatctctgtttctgaatgaaaacattaaccttggcaagaaatatgtctttgatatt

SEQ ID NO: 1350 - protein, 134 aa, Homo sapiens
MENYGIEWHSVRDSEGQKLLIGVGPEGISICKDDFSPINRIAYPVVQMATQSGKNVYLTVTKESGNSIVLLFKMISTRAASGLYRAITETHAFYRHVSLTSAVMMQYSRDLKGHLASLFLNENINLGKKYVFDI

SEQ ID NO: 1351 - DNA, 8053 bp, Homo sapiens
gccgcggcgcgggactgctcacctccaagcgctcgcgcggggatcgcggctcctgctcactttgcggcccgctgtcctcctgcccgccccgagggcccccggccggagcgcagagggagggggccgcgctcgccagcaccccgccgccttcccccgcctgggggaagaatgtgccaccagctgttctccgcttgcgagcgctgcgcccagtagtgaggaacttggaggaagaagagacaaaggctgccgtcgggacgggcgagttagggacttgggtttgggcgaacaaaaggtgagaaggacaagaagggaccgggcgatggcagcaggggagccccgcgggcgcgcgtcctcgggagtggcgccgtgacacgcatggtttccccggacccgcggcggcgctgacttccgcgagtcggagcggcactcggcgagtccgggactgcgctggaacaatggataacttcttcaccgagggaacacgggtctggctgagagaaaatggccagcattttccaagtactgtaaattcctgtgcagaaggcatcgtcgtcttccggacagactatggtcaggtattcacttacaagcagagcacaattacccaccagaaggtgactgctatgcaccccacgaacgaggagggcgtggatgacatggcgtccttgacagagctccatggcggctccatcatgtataacttattccagcggtataagagaaatcaaatatatacctacatcggctccatcctggcctccgtgaacccctaccagcccatcgccgggctgtacgagcctgccaccatggagcagtacagccggcgccacctgggcgagctgcccccgcacatcttcgccatcgccaacgagtgctaccgctgcctgtggaagcgccacgacaaccagtgcatcctcatcagtggtgaaagtggggcaggtaaaaccgaaagcactaaattgatcctcaagtttctgtcagtcatcagtcaacagtctttggaattgtccttaaaggagaagacatcctgtgttgaacgagctattcttgaaagcagccccatcatggaagctttcggcaatgcgaagaccgtgtacaacaacaactctagtcgctttgggaagtttgttcagctgaacatctgtcagaaaggaaatattcagggcgggagaattgtagattatttattagaaaaaaaccgagtagtaaggcaaaatcccggggaaaggaattatcacatattttatgcactgctggcagggctggaacatgaagaaagagaagaattttatttatctacgccagaaaactaccactacttgaatcagtctggatgtgtagaagacaagacaatcagtgaccaggaatcctttagggaagttattacggcaatggacgtgatgcagttcagcaaggaggaagttcgggaagtgtcgaggctgcttgctggtatactgcatcttgggaacatagaatttatcactgctggtggggcacaggtttccttcaaaacagctttgggcagatctgcggagttacttgggctggacccaacacagctcacagatgctttgacccagagatcaatgttcctcaggggagaagagatcctcacgcctctcaatgttcaacaggcagtagacagcagggactccctggccatggctctgtatgcgtgctgctttgagtgggtaatcaagaagatcaacagcaggatcaaaggcaatgaggacttcaagtctattggcatcctcgacatctttggatttgaaaactttgaggttaatcactttgaacagttcaatataaactatgcaaacgagaaacttcaggagtacttcaacaagcatattttttctttagaacaactagaatatagccgggaaggattagtgtgggaagatattgactggatagacaatggagaatgcctggacttgattgagaagaaacttggcctcctagcccttatcaatgaagaaagccattttcctcaagccacagacagcaccttattggagaagctacacagtcagcatgcgaataaccacttttatgtgaagcccagagttgcagttaacaattttggagtgaagcactatgctggagaggtgcaatatgatgtccgaggtatcttggagaagaacagagatacatttcgagatgaccttctcaatttgctaagagaaagccgatttgactttatctacgatctttttgaacatgtttcaagccgcaacaaccaggataccttgaaatgtggaagcaaacatcggcggcctacagtcagctcacagttcaaggactcactgcattccttaatggcaacgctaagctcctctaatcctttctttgttcgctgtatcaagccaaacatgcagaagatgccagaccagtttgaccaggcggttgtgctgaaccagctgcggtactcagggatgctggagactgtgagaatccgcaaagctgggtatgcggtccgaagaccctttcaggacttttacaaaaggcaagagggagctgaattggattctctttcttttcaaagggtgctgatgaggaatctggctctgcctgaggacgtccgagggaagtgcacgagcctgctgcagctctatgatgcctccaacagcgagtggcagctggggaagaccaaggtctttcttcgagaatccttggaacagaaactggagaagcggagggaagaggaagtgagccacgcggccatggtgattcgggcccatgtcttgggcttcttagcacgaaaacaatacagaaaggtcctttattgtgtggtgataatacagaagaattacagagcattccttctgaggaggagatttttgcacctgaaaaaggcagccatagttttccagaagcaactcagaggtcagattgctcggagagtttacagacaattgctggcagagaaaagggagcaagaagaaaagaagaaacaggaagaggaagaaaagaagaaacgggaggaagaagaaagagaaagagagagagagcgaagagaagccgagctccgcgcccagcaggaagaagaaacgaggaagcagcaagaactcgaagccttgcagaagagccagaaggaagctgaactgacccgtgaactggagaaacagaaggaaaataagcaggtggaagagatcctccgtctggagaaagaaatcgaggacctgcagcgcatgaaggagcagcaggagctgtcgctgaccgaggcttccctgcagaagctgcaggagcggcgggaccaggagctccgcaggctggaggaggaagcgtgcagggcggcccaggagttcctcgagtccctcaatttcgacgagatcgacgagtgtgtccggaatatcgagcggtccctgtcggtgggaagcgaattttccagcgagctggctgagagcgcatgcgaggagaagcccaacttcaacttcagccagccctacccagaggaggaggtcgatgagggcttcgaagccgacgacgacgccttcaaggactcccccaaccccagcgagcacggccactcagaccagcgaacaagtggcatccggaccagcgatgactcttcagaggaggacccatacatgaacgacacggtggtgcccaccagccccagtgcggacagcacggtgctgctcgccccatcagtgcaggactccgggagcctacacaactcctccagcggcgagtccacctactgcatgccccagaacgctggggacttgccctccccagacggcgactacgactacgaccaggatgactatgaggacggtgccatcacttccggcagcagcgtgaccttctccaactcctacggcagccagtggtcccccgactaccgctgctctgtggggacctacaacagctcgggtgcctaccggttcagctctgagggggcgcagtcctcgtttgaagatagtgaagaggactttgattccaggtttgatacagatgatgagctttcataccggcgtgactctgtgtacagctgtgtcactctgccgtatttccacagctttctgtacatgaaaggtggcctgatgaactcttggaaacgccgctggtgcgtcctcaaggatgaaaccttcttgtggttccgctccaagcaggaggccctcaagcaaggctggctccacaaaaaaggggggggctcctccacgctgtccaggagaaattggaagaagcgctggtttgtcctccgccagtccaagctgatgtactttgaaaacgacagcgaggagaagctcaagggcaccgtagaagtgcgaacggcaaaagagatcatagataacaccaccaaggagaatgggatcgacatcattatggccgataggactttccacctgattgcagagtccccagaagatgccagccagtggttcagcgtgctgagtcaggtccacgcgtccacggaccaggagatccaggagatgcatgatgagcaggcaaacccacagaatgctgtgggcaccttggatgtggggctgattgattctgtgtgtgcctctgacagccctgatagacccaactcgtttgtgatcatcacggccaaccgggtgctgcactgcaacgccgacacgccggaggagatgcaccactggataaccctgctgcagaggtccaaaggggacaccagagtggagggccaggaattcatcgtgagaggatggttgcacaaagaggtgaagaacagtccaaagatgtcttcactgaaactgaagaaacggtggtttgtactcacccacaattccctggattactacaagagttcagagaagaacgcgctcaaactggggaccctggtcctcaacagcctctgctctgtcgtccccccagatgagaagatattcaaagagacaggctactggaacgtcaccgtgtacgggcgcaagcactgttaccggctctacaccaagctgctcaacgaggccacccggtggtccagtgccattcaaaacgtgactgacaccaaggccccgatcgacacccccacccagcagctgattcaagatatcaaggagaactgcctgaactcggatgtggtggaacagatttacaagcggaacccgatccttcgatacacccatcaccccttgcactccccgctcctgccccttccgtatggggacataaatctcaacttgctcaaagacaaaggctataccacccttcaggatgaggccatcaagatattcaattccctgcagcaactggagtccatgtctgacccaattccaataatccagggcatcctacagacagggcatgacctgcgacctctgcgggacgagctgtactgccagcttatcaaacagaccaacaaagtgccccaccccggcagtgtgggcaacctgtacagctggcagatcctgacatgcctgagctgcaccttcctgccgagtcgagggattctcaagtatctcaagttccatctgaaaaggatacgggaacagtttccaggaagcgagatggaaaaatacgctctcttcacttacgaatctcttaagaaaaccaaatgccgagagtttgtgccttcccgagatgaaatagaagctctgatccacaggcaggaaatgacatccacggtctattgccatggcggcggctcctgcaagatcaccatcaactcccacaccaccgctggggaggtggtggagaagctgatccgaggcctggccatggaggacagcaggaacatgtttgctttgtttgaatacaacggccacgtcgacaaagccattgaaagtcgaaccgtcgtagctgatgtcttagccaagtttgaaaagctggctgccacatccgaggttggggacctgccatggaaattctacttcaaactttactgcttcctggacacagacaacgtgccaaaagacagtgtggagtttgcatttatgtttgaacaggcccacgaagcggttatccatggccaccatccagccccggaagaaaacctccaggttcttgctgccctgcgactccagtatctgcagggggattatactctgcacgctgccatcccacctctcgaagaggtttattccctgcagagactcaaggcccgcatcagccagtcaaccaaaaccttcaccccttgtgaacggctggagaagaggcggacgagcttcctagaggggaccctgaggcggagcttccggacaggatccgtggtccggcagaaggtcgaggaggagcagatgctggacatgtggattaaggaagaagtctcctctgctcgagccagtatcattgacaagtggaggaaatttcagggaatgaaccaggaacaggccatggccaagtacatggccttgatcaaggagtggcctggctatggctcgacgctgtttgatgtggagtgcaaggaaggtggcttccctcaggaactctggttgggtgtcagcgcggacgccgtctccgtctacaagcgtggagagggaagaccactggaagtcttccagtatgaacacatcctctcttttggggcacccctggcgaatacgtataagatcgtggtcgatgagagggagctgctctttgaaaccagtgaggtggtggatgtggccaagctcatgaaagcctacatcagcatgatcgtgaagaagcgctacagcacgacacgctccgccagcagccagggcagctccaggtgaaggcgggacagagcccacctgtctttgctacctgaacgcaccaccctctggcctaggctggctccagtgtgccatgcccagccaaaacaaacacagagctgcccaggctttctggaagcttctggtctgagggaggtgtctccgaggatccttttgcctgccgccttcattgatcctgtattaagctgtcaactttaacagtctgcacagtttccaaagctttactactcttagaggacacatgccttaaaaaaggaggggaggaaccacgctgccaccaaagcagccggaagtgccttaacttgtggaaccaacactaatcgaccgtaactgtgctactgaagggaactgcctttcccccttctgggggagacttaacagagcgtggaaggggggcattctctgtcaatgatgcactaacctcccaacctgatttccccgaatctgagggaaggtgagggagtgggaagggggatggagagctcgaggggacagtgtgtttgagctggagtgctgcgggcagcctttctcatggaatgacatgaatcaacttttttctttgtttcatcttttaagtgtacgtgcttgcctgttcgtgcatgtgttcataaactcaacactttaatcatggtttcatgagcattaaaaagcaaagggaaaaaggatgtgtaatggtgtacacagtctgtatattttaataatgcagagctatagtctcaattgttactttataaggtggttttattaacaaacccaaatcctggattttcctgtctttgctgtattttgaaaaacacgtgttgactccattgttttacatgtagcaaagtctgccatctgtgtctgctgtattataaacagataagcagcctacaagataactgtatttataaaccactcttcaacagctggctccagtgctggttttagaacaagaatgaagtcattttggagtctttcatgtctaaaagatttaagttaaaaacaaagtgttacttggaaggttagcttctatcattctggatagattacagatataataaccatgttgactatgggggagagacgctgcattccagaaacgtcttaacacttgagtgaatcttcaaaggaccctgacattaaatgctgaggctttaatacacacatattttatcccaagtttataatggtggtctgaacaaggcacctgtaaataaatcagcatttatgaccagaagaaaaataatctggtcttggactttttatttttatatggaaaagttttaaggacttgggccaactaagtctacccacacgaaaaaagaaatttgccttgtccctttgtgtacaaccatgcaaaactgtttgttggctcacagaagttctgacaataaaagatactagct

SEQ ID NO: 1352 - protein, 2122 aa, Homo sapiens
EGQEGTGRWQQGSPAGARPREWRRDTHGFPGPAAALTSASRSGTRRVRDCAGTMDNFFTEGTRVWLRENGQHFPSTVNSCAEGIVVFRTDYGQVFTYKQSTITHQKVTAMHPTNEEGVDDMASLTELHGGSIMYNLFQRYKRNQIYTYIGSILASVNPYQPIAGLYEPATMEQYSRRHLGELPPHIFAIANECYRCLWKRHDNQCILISGESGAGKTESTKLILKFLSVISQQSLELSLKEKTSCVERAILESSPIMEAFGNAKTVYNNNSSRFGKFVQLNICQKGNIQGGRIVDYLLEKNRVVRQNPGERNYHIFYALLAGLEHEEREEFYLSTPENYHYLNQSGCVEDKTISDQESFREVITAMDVMQFSKEEVREVSRLLAGILHLGNIEFITAGGAQVSFKTALGRSAELLGLDPTQLTDALTQRSMFLRGEEILTPLNVQQAVDSRDSLAMALYACCFEWVIKKINSRIKGNEDFKSIGILDIFGFENFEVNHFEQFNINYANEKLQEYFNKHIFSLEQLEYSREGLVWEDIDWIDNGECLDLIEKKLGLLALINEESHFPQATDSTLLEKLHSQHANNHFYVKPRVAVNNFGVKHYAGEVQYDVRGILEKNRDTFRDDLLNLLRESRFDFIYDLFEHVSSRNNQDTLKCGSKHRRPTVSSQFKDSLHSLMATLSSSNPFFVRCIKPNMQKMPDQFDQAVVLNQLRYSGMLETVRIRKAGYAVRRPFQDFYKRQEGAELDSLSFQRVLMRNLALPEDVRGKCTSLLQLYDASNSEWQLGKTKVFLRESLEQKLEKRREEEVSHAAMVIRAHVLGFLARKQYRKVLYCVVIIQKNYRAFLLRRRFLHLKKAAIVFQKQLRGQIARRVYRQLLAEKREQEEKKKQEEEEKKKREEEERERERERREAELRAQQEEETRKQQELEALQKSQKEAELTRELEKQKENKQVEEILRLEKEIEDLQRMKEQQELSLTEASLQKLQERRDQELRRLEEEACRAAQEFLESLNFDEIDECVRNIERSLSVGSEFSSELAESACEEKPNFNFSQPYPEEEVDEGFEADDDAFKDSPNPSEHGHSDQRTSGIRTSDDSSEEDPYMNDTVVPTSPSADSTVLLAPSVQDSGSLHNSSSGESTYCMPQNAGDLPSPDGDYDYDQDDYEDGAITSGSSVTFSNSYGSQWSPDYRCSVGTYNSSGAYRFSSEGAQSSFEDSEEDFDSRFDTDDELSYRRDSVYSCVTLPYFHSFLYMKGGLMNSWKRRWCVLKDETFLWFRSKQEALKQGWLHKKGGGSSTLSRRNWKKRWFVLRQSKLMYFENDSEEKLKGTVEVRTAKEIIDNTTKENGIDIIMADRTFHLIAESPEDASQWFSVLSQVHASTDQEIQEMHDEQANPQNAVGTLDVGLIDSVCASDSPDRPNSFVIITANRVLHCNADTPEEMHHWITLLQRSKGDTRVEGQEFIVRGWLHKEVKNSPKMSSLKLKKRWFVLTHNSLDYYKSSEKNALKLGTLVLNSLCSVVPPDEKIFKETGYWNVTVYGRKHCYRLYTKLLNEATRWSSAIQNVTDTKAPIDTPTQQLIQDIKENCLNSDVVEQIYKRNPILRYTHHPLHSPLLPLPYGDINLNLLKDKGYTTLQDEAIKIFNSLQQLESMSDPIPIIQGILQTGHDLRPLRDELYCQLIKQTNKVPHPGSVGNLYSWQILTCLSCTFLPSRGILKYLKFHLKRIREQFPGSEMEKYALFTYESLKKTKCREFVPSRDEIEALIHRQEMTSTVYCHGGGSCKITINSHTTAGEVVEKLIRGLAMEDSRNMFALFEYNGHVDKAIESRTVVADVLAKFEKLAATSEVGDLPWKFYFKLYCFLDTDNVPKDSVEFAFMFEQAHEAVIHGHHPAPEENLQVLAALRLQYLQGDYTLHAAIPPLEEVYSLQRLKARISQSTKTFTPCERLEKRRTSFLEGTLRRSFRTGSVVRQKVEEEQMLDMWIKEEVSSARASIIDKWRKFQGMNQEQAMAKYMALIKEWPGYGSTLFDVECKEGGFPQELWLGVSADAVSVYKRGEGRPLEVFQYEHILSFGAPLANTYKIVVDERELLFETSEVVDVAKLMKAYISMIVKKRYSTTRSASSQGSSR

SEQ ID NO: 1353 - DNA, 2054 bp, Homo sapiens
gatgcaggctgggtgtggagggtgcgagtaggctggagtacaccagggagttcccagcaggccactaggagccacccaggatgcccggcaacctcatgagtcagacaagcagggctgtgtctatctggaagtttccagccaagctaggtaaaacacatggacacagggctctggaggccacgggcatgatgcttcgggtcctggtgggggctgtcctccctgccatgctactggctgccccaccacccatcaacaagctggcactgttcccagataagagtgcctggtgcgaagccaagaacatcacccagatcgtgggccacagcggctgtgaggccaagtccatccagaacagggcgtgcctaggacagtgcttcagctacagcgtccccaacaccttcccacagtccacagagtccctggttcactgtgactcctgcatgccagcccagtccatgtgggagattgtgacgctggagtgcccgggccacgaggaggtgcccagggtggacaagctggtggagaagatcctgcactgtagctgccaggcctgcggcaaggagcctagtcacgaggggctgagcgtctatgtgcagggcgaggacgggccgggatcccagcccggcacccaccctcacccccatccccacccccatcctggcgggcagacccctgagcccgaggacccccctggggccccccacacagaggaagagggggctgaggactgaggcccccccaactcttcctcccctctcatccccctgtggaatgttgggtctcactctctggggaagtcaggggagaagctgaagcccccctttggcactggatggacttggcttcagactcggacttgaatgctgcccggttgccatggagatctgaaggggcggggttagagccaagctgcacaatttaatatattcaagagtggggggaggaagcagaggtcttcagggctctttttttggggggggtggtctcttcctgtctggcttctagagatgtgcctgtgggagggggaggaagttggctgagccattgagtgctgggggaggccatccaagatggcatgaatcgggctaaggtccctgggggtgcagatggtactgctgaggtcccgggcttagtgtgagcatcttgccagcctcaggcttgagggagggctgggctagaaagaccactggcagaaacaggaggctccggcccacaggtttccccaaggcctctcaccccacttcccatctccagggaagcgtcgccccagtggcactgaagtggccctccctcagcggaggggtttgggagtcaggcctgggcaggaccctgctgactcgtggcgcgggagctgggagccaggctctccgggcctttctctggcttccttggcttgcctggtgggggaaggggaggaggggaagaaggaaagggaagagtcttccaaggccagaaggagggggacaaccccccaagaccatccctgaagacgagcatccccctcctctccctgttagaaatgttagtgccccgcactgtgccccaagttctaggccccccagaaagctgccagagccggccgccttctcccctctcccagggatgctctttgtaaatatcggatgggtgtgggagtgaggggttacctccctcgccccaaggttccagaggccctaggcgggatgggctcgctgaacctcgaggaactccaggacgaggaggacatgggacttgcgtggacagtcagggttcacttgggctctctctagctccccaattctgcctgcctcctccctcccagctgcactttaaccctagaaggtggggacctggggggagggacagggcaggcgggcccatgaagaaagcccctcgttgcccagcactgtctgcgtctgctcttctgtgcccagggtggctgccagcccactgcctcctgcctggggtggcctggccctcctggctgttgcgacgcgggcttctggagcttgtcaccattggacagtctccctgatggaccctcagtcttctcatgaataaattccttcaacgcc

SEQ ID NO: 1354 - protein, 180 aa, Homo sapiens
MLRVLVGAVLPAMLLAAPPPINKLALFPDKSAWCEAKNITQIVGHSGCEAKSIQNRACLGQCFSYSVPNTFPQSTESLVHCDSCMPAQSMWEIVTLECPGHEEVPRVDKLVEKILHCSCQACGKEPSHEGLSVYVQGEDGPGSQPGTHPHPHPHPHPGGQTPEPEDPPGAPHTEEEGAED

SEQ ID NO: 1355 - DNA, 2014 bp, Homo sapiens
cgcagcgcagcccagccgagcgtcgcggggccgccccccgccctgccggccgcctcgccgagcctcctggggcgcccgggcccgcgacccccgcacccagctccgcaggaccggcgggcgcgcgcgggctctggaggccacgggcatgatgcttcgggtcctggtgggggctgtcctccctgccatgctactggctgccccaccacccatcaacaagctggcactgttcccagataagagtgcctggtgcgaagccaagaacatcacccagatcgtgggccacagcggctgtgaggccaagtccatccagaacagggcgtgcctaggacagtgcttcagctacagcgtccccaacaccttcccacagtccacagagtccctggttcactgtgactcctgcatgccagcccagtccatgtgggagattgtgacgctggagtgcccgggccacgaggaggtgcccagggtggacaagctggtggagaagatcctgcactgtagctgccaggcctgcggcaaggagcctagtcacgaggggctgagcgtctatgtgcagggcgaggacgggccgggatcccagcccggcacccaccctcacccccatccccacccccatcctggcgggcagacccctgagcccgaggacccccctggggccccccacacagaggaagagggggctgaggactgaggcccccccaactcttcctcccctctcatccccctgtggaatgttgggtctcactctctggggaagtcaggggagaagctgaagcccccctttggcactggatggacttggcttcagactcggacttgaatgctgcccggttgccatggagatctgaaggggcggggttagagccaagctgcacaatttaatatattcaagagtggggggaggaagcagaggtcttcagggctctttttttggggggggtggtctcttcctgtctggcttctagagatgtgcctgtgggagggggaggaagttggctgagccattgagtgctgggggaggccatccaagatggcatgaatcgggctaaggtccctgggggtgcagatggtactgctgaggtcccgggcttagtgtgagcatcttgccagcctcaggcttgagggagggctgggctagaaagaccactggcagaaacaggaggctccggcccacaggtttccccaaggcctctcaccccacttcccatctccagggaagcgtcgccccagtggcactgaagtggccctccctcagcggaggggtttgggagtcaggcctgggcaggaccctgctgactcgtggcgcgggagctgggagccaggctctccgggcctttctctggcttccttggcttgcctggtgggggaaggggaggaggggaagaaggaaagggaagagtcttccaaggccagaaggagggggacaaccccccaagaccatccctgaagacgagcatccccctcctctccctgttagaaatgttagtgccccgcactgtgccccaagttctaggccccccagaaagctgccagagccggccgccttctcccctctcccagggatgctctttgtaaatatcggatgggtgtgggagtgaggggttacctccctcgccccaaggttccagaggccctaggcgggatgggctcgctgaacctcgaggaactccaggacgaggaggacatgggacttgcgtggacagtcagggttcacttgggctctctctagctccccaattctgcctgcctcctccctcccagctgcactttaaccctagaaggtggggacctggggggagggacagggcaggcgggcccatgaagaaagcccctcgttgcccagcactgtctgcgtctgctcttctgtgcccagggtggctgccagcccactgcctcctgcctggggtggcctggccctcctggctgttgcgacgcgggcttctggagcttgtcaccattggacagtctccctgatggaccctcagtcttctcatgaataaattccttcaacgcc

SEQ ID NO: 1356 - protein, 180 aa, Homo sapiens; identical to SEQ ID NO: 1354

SEQ ID NO: 1357 - DNA, 1589 bp, Homo sapiens
agtttcccgggagagacgaaagcaggaacgagagcggagcggagcacagtccgccgagcacaagctccagcatcccgtcaggggttgcaggtgtgtgggaggcttgaaactgttacaatatggctttccttggactcttctctttgctggttctgcaaagtatggctacaggggccactttccctgaggaagccattgctgacttgtcagtgaatatgtataatcgtcttagagccactggtgaagatgaaaatattctcttctctccattgagtattgctcttgcaatgggaatgatggaacttggggcccaaggatctacccagaaagaaatccgccactcaatgggatatgacagcctaaaaaatggtgaagaattttctttcttgaaggagttttcaaacatggtaactgctaaagagagccaatatgtgatgaaaattgccaattccttgtttgtgcaaaatggatttcatgtcaatgaggagtttttgcaaatgatgaaaaaatattttaatgcagcagtaaatcatgtggacttcagtcaaaatgtagccgtggccaactacatcaataagtgggtggagaataacacaaacaatctggtgaaagatttggtatccccaagggattttgatgctgccacttatctggccctcattaatgctgtctatttcaaggggaactggaagtcgcagtttaggcctgaaaatactagaaccttttctttcactaaagatgatgaaagtgaagtccaaattccaatgatgtatcagcaaggagaattttattatggggaatttagtgatggctccaatgaagctggtggtatctaccaagtcctagaaataccatatgaaggagatgaaataagcatgatgctggtgctgtccagacaggaagttcctcttgctactctggagccattagtcaaagcacagctggttgaagaatgggcaaactctgtgaagaagcaaaaagtagaagtatacctgcccaggttcacagtggaacaggaaattgatttaaaagatgttttgaaggctcttggaataactgaaattttcatcaaagatgcaaatttgacaggcctctctgataataaggagatttttctttccaaagcaattcacaagtccttcctagaggttaatgaagaaggctcagaagctgctgctgtctcaggaatgattgcaattagtaggatggctgtgctgtatcctcaagttattgtcgaccatccatttttctttcttatcagaaacaggagaactggtacaattctattcatgggacgagtcatgcatcctgaaacaatgaacacaagtggacatgatttcgaagaactttaagttactttatttgaataacaaggaaaacagtaactaagcacattatgtttgcaactggtatatatttaggatttgtgttttacagtatatcttaagataatatttaaaatagttccagataaaaacaatatatgtaaattataagtaacttgtcaaggaatgttatcagtattaagctaatggtcctgttatgtcattgtgtttgtgtgctgttgtttaaaataaaagtacctattg

SEQ ID NO: 1358 - protein, 410 aa, Homo sapiens
MAFLGLFSLLVLQSMATGATFPEEAIADLSVNMYNRLRATGEDENILFSPLSIALAMGMMELGAQGSTQKEIRHSMGYDSLKNGEEFSFLKEFSNMVTAKESQYVMKIANSLFVQNGFHVNEEFLQMMKKYFNAAVNHVDFSQNVAVANYINKWVENNTNNLVKDLVSPRDFDAATYLALINAVYFKGNWKSQFRPENTRTFSFTKDDESEVQIPMMYQQGEFYYGEFSDGSNEAGGIYQVLEIPYEGDEISMMLVLSRQEVPLATLEPLVKAQLVEEWANSVKKQKVEVYLPRFTVEQEIDLKDVLKALGITEIFIKDANLTGLSDNKEIFLSKAIHKSFLEVNEEGSEAAAVSGMIAISRMAVLYPQVIVDHPFFFLIRNRRTGTILFMGRVMHPETMNTSGHDFEEL

SEQ ID NO: 1359 - DNA, 2214 bp, Homo sapiens
tctctctctgcttctttccttttctctctcatggtagggttatgagtcagttgccaaaaggtggggacatttcctgatgcatttgcaacactgagaagttatcttaagggaggctgggccccattctactcatctggcccagaaagtgaacaccttgggggccactaaggcagccctgctaggggagacgctccaacctgtcttctctctgtctcctggcagctctcttggcctcctagtttctacctaatcatgtccctggtggaggccatcagcctctggaatgaaggggtgctggcagcggacaagaaggactggaagggagccctggatgccttcagtgccgtccaggacccccactcccggatttgcttcaacattggctgcatgtacactatcctgaagaacatgactgaagcagagaaggcctttaccagaagcattaaccgagacaagcacttggcagtggcttacttccaacgagggatgctctactaccagacagagaaatatgatttggctatcaaagaccttaaagaagccttgattcagcttcgagggaaccagctgatagactataagatcctggggctccagttcaagctgtttgcctgtgaggtgttatataacattgctttcatgtatgccaagaaggaggaatggaaaaaagctgaagaacagttagcattggccacgagcatgaagtctgagcccagacattccaaaatcgacaaggcgatggagtgtgtctggaagcagaagctatatgagccagtggtgatccctgtgggcaagctgtttcgaccaaatgagagacaagtggctcagctggccaagaaggattacctaggcaaggcgacggtcgtggcatctgtggtggatcaagacagtttctctgggtttgcccctctgcaaccacaggcagctgagcctccacccagaccgaaaaccccagagatcttcagggctctggaaggggaggctcaccgtgtgctatttgggtttgtgcctgagacaaaagaagagctccaggtcatgccagggaacattgtctttgtcttgaagaagggcaatgataactgggccacggtcatgttcaacgggcagaaggggcttgttccctgcaactaccttgaaccagttgagctgcggatccaccctcagcagcagccccaggaggaaagctctccgcagtccgacatcccagctcctcctagttccaaagcccctggaagaccccagctgtcaccaggccagaaacaaaaagaagagcctaaggaagtgaagctcagtgttcccatgccctacacactcaaggtgcactacaagtacacggtagtcatgaagactcagcccgggctcccctacagccaggtccgggacatggtgtctaagaaactggagctccggctggaacacactaagctgagctatcggcctcgggacagcaatgagctggtgcccctttcagaagacagcatgaaggatgcctggggccaggtgaaaaactactgcctgactctgtggtgtgagaacacagtgggtgaccaaggctttccagatgaacccaaggaaagtgaaaaagctgatgctaataaccagacaacagaacctcagcttaagaaaggcagccaagtggaggcactcttcagttatgaggctacccaaccagaggacctggagtttcaggaaggggatataatcctggtgttatcaaaggtgaatgaagaatggctggaaggggagtgcaaagggaaggtgggcattttccccaaagtttttgttgaagactgcgcaactacagatttggaaagcactcggagagaagtctaggatgtttcacaaactacaaagctgaagaaaatgaagccctattacttgtttgtaagatttagcacccttctgctgtatactgtactgagacattacagtttggaagtgttaactatttattccctgttaaaatttaacctactagacaatgatgtgagtacccaggatgatttcctggggcacagtgggtgaggagatggggacaggtgaatggaggagttaggggagaggaaaagtggatggaagtgtctggaaagggcacgagagagtcttccaggtactgatcctgtttcttgctctgagtgctagctagccagctgtgttcacactgtaaacattcatcaagctgtacatttggtgcacttttctgtgtcataccac

SEQ ID NO: 1360 - protein, 526 aa, Homo sapiens
MSLVEAISLWNEGVLAADKKDWKGALDAFSAVQDPHSRICFNIGCMYTILKNMTEAEKAFTRSINRDKHLAVAYFQRGMLYYQTEKYDLAIKDLKEALIQLRGNQLIDYKILGLQFKLFACEVLYNIAFMYAKKEEWKKAEEQLALATSMKSEPRHSKIDKAMECVWKQKLYEPVVIPVGKLFRPNERQVAQLAKKDYLGKATVVASVVDQDSFSGFAPLQPQAAEPPPRPKTPEIFRALEGEAHRVLFGFVPETKEELQVMPGNIVFVLKKGNDNWATVMFNGQKGLVPCNYLEPVELRIHPQQQPQEESSPQSDIPAPPSSKAPGRPQLSPGQKQKEEPKEVKLSVPMPYTLKVHYKYTVVMKTQPGLPYSQVRDMVSKKLELRLEHTKLSYRPRDSNELVPLSEDSMKDAWGQVKNYCLTLWCENTVGDQGFPDEPKESEKADANNQTTEPQLKKGSQVEALFSYEATQPEDLEFQEGDIILVLSKVNEEWLEGECKGKVGIFPKVFVEDCATTDLESTRREV

SEQ ID NO: 1361 - DNA, 2497 bp, Homo sapiens
gaggcacagacagaggcgcggaggctcggagagagaagacgtggagggagggacagagcctggacagcggtggacacggcatcgtgcgcggggaagagggcagcacgcagcaggcgccgagcgccgggcaccgagaagggcagcccgggtgatctccggccgtccatgcacagagcgccttcccccacagccgagcagccgccgggcggaggggacagcgcccgccggaccctgcagcccagactcaagcccagtgcccgagccatggcactgcctcggacgctgggggagctgcagctgtaccgggtcctgcagcgcgccaacctcctttcctactatgagaccttcatccagcagggaggggacgacgtgcagcagctgtgtgaggcgggtgaggaggagtttctggagatcatggcacttgtgggcatggccaccaagcccctccatgtccggcgcctgcagaaggcactgagagagtgggccaccaatccagggctcttcagtcaaccagtgcctgctgttcccgtctccagcatcccgctcttcaagatctctgagactgcgggtacccggaaagggagcatgagcaatgggcatggcagcccaggggaaaaggcaggcagtgcccgcagttttagccccaagagcccccttgaacttggagagaagctatcaccactgcctgggggacctggggcaggggacccccggatctggccaggccggagcactccagagtcggacgttggggcaggaggagaagaggaggctggctcgccccccttctccccccctgcagggggaggagtccctgaggggactggggctggggggctggcagcaggtgggactgggggtggtccagaccgactggagccagagatggtacgcatggtggtggaaagtgtggagaggatcttccggagcttcccaaggggggatgctggggaggtcacatccctgctaaagctgaataagaagctggcacggagcgttgggcacatctttgagatggatgataatgacagccagaaggaagaggagatccgcaaatacagcatcatctatggccgtttcgactctaagcggcgggagggcaagcagctcagcctgcacgagctcaccatcaacgaggctgctgcccagttctgcatgagggacaacacgctcttattacggagagtggagctcttctctttgtcccgccaagtagcccgagagagcacctacttgtcctccttgaagggctccaggcttcaccctgaagaactgggaggccctccactgaagaagctgaaacaagaggttggagaacagagtcaccctgaaatccagcagcctcccccaggccctgagtcctatgtacccccataccgccccagcctggaggaggacagcgccagcctgtctggggagagtctggatggacatttgcaggctgtggggtcatgtccaaggctgacgccgccccctgctgacctgcctctggcattgccagcccatgggctatggagccgacacatcctgcagcagacactgatggacgaggggctgcggctcgcccgcctcgtctcccacgaccgcgtgggccgcctcagcccctgtgtgcctgcgaagccacctctcgcagagttcgaggaagggctgctggacagatgtcctgccccaggaccccatcccgcgctggtggagggtcgcaggagcagcgtgaaagtggaggctgaggccagccggcagtgagggttggactggtgtcttcagacccaggacctcagacttctggctcacacagacccccacgctctccatccccggaatctagtcacaaccctggatccttcctctgcccttctcctgcctccccacctgctccatgggcataagactgtggggcttcaagcaataacaagcagaggcctggagagaggacacaaggagggtgcgtggtgccctcacccctgcccagagcgagggggcaaggactctgcctccagggcatctggggttttcccctccctcacacaacacactcccattctctttaggtttgcaccagtggtgtgagcagttggactcagtttggacaagggggaaagggggacttccctgggaaggtccagctaaaagtggcaacatttgcccccagaattgggggcctgggaacactggacctgctccttctcccctctccttccccgtttttgtgcttctggtttgtttctttaattaatttaacaagtgctgcagtttgccctcccattcccatctatcccccaagtcctttgcaatttcttccctgccctacataggggcggtgggtgtgggatcccttcactggccccctcgggaggcctgggttggactcagggtctcctccagctgggggctggaccgcagcacctatctgagcagttagagcgtctttcttttcagattgtgtacagtagattatttattttgttattttggaataaaatttattttatggcttagg

SEQ ID NO: 1362 - protein, 525 aa, Homo sapiens
MHRAPSPTAEQPPGGGDSARRTLQPRLKPSARAMALPRTLGELQLYRVLQRANLLSYYETFIQQGGDDVQQLCEAGEEEFLEIMALVGMATKPLHVRRLQKALREWATNPGLFSQPVPAVPVSSIPLFKISETAGTRKGSMSNGHGSPGEKAGSARSFSPKSPLELGEKLSPLPGGPGAGDPRIWPGRSTPESDVGAGGEEEAGSPPFSPPAGGGVPEGTGAGGLAAGGTGGGPDRLEPEMVRMVVESVERIFRSFPRGDAGEVTSLLKLNKKLARSVGHIFEMDDNDSQKEEEIRKYSIIYGRFDSKRREGKQLSLHELTINEAAAQFCMRDNTLLLRRVELFSLSRQVARESTYLSSLKGSRLHPEELGGPPLKKLKQEVGEQSHPEIQQPPPGPESYVPPYRPSLEEDSASLSGESLDGHLQAVGSCPRLTPPPADLPLALPAHGLWSRHILQQTLMDEGLRLARLVSHDRVGRLSPCVPAKPPLAEFEEGLLDRCPAPGPHPALVEGRRSSVKVEAEASRQ

SEQ ID NO: 1363 - DNA, 2252 bp, Homo sapiens
cagagcctggacagcggtggacacggcatcgtgcgcggggaagagggcagcacgcagcaggcgccgagcgccgggcaccgagaagggcagcccgggtgatctccggccgtccatgcacagagcgccttcccccacagccgagcagccgccgggcggaggggacagcgcccgccggaccctgcagcccagactcaagcccagtgcccgagccatggcactgcctcggacgctgggggagctgcagctgtaccgggtcctgcagcgcgccaacctcctttcctactatgagaccttcatccagcagggaggggacgacgtgcagcagctgtgtgaggcgggtgaggaggagtttctggagatcatggcacttgtgggcatggccaccaagcccctccatgtccggcgcctgcagaaggcactgagagagtgggccaccaatccagggctcttcagtcaaccagtgcctgctgttcccgtctccagcatcccgctcttcaagatctctgagactgcgggtacccggaaagggagcatgagcaatgggcatggcagcccaggggaaaaggcaggcagtgcccgcagttttagccccaagagcccccttgaacttggagagaagctatcaccactgcctgggggacctggggcaggggacccccggatctggccaggccggagcactccagagtcggacgttggggcaggaggagaagaggaggctggctcgccccccttctccccccctgcagggggaggagtccctgaggggactggggctggggggctggcagcaggtgggactgggggtggtccagaccgactggagccagagatggtacgcatggtggtggaaagtgtggagaggatcttccggagcttcccaaggggggatgctggggaggtcacatccctgctaaagctgaataagaagctggcacggagcgttgggcacatctttgagatggatgataatgacagccagaaggaagaggagatccgcaaatacagcatcatctatggccgtttcgactctaagcggcgggagggcaagcagctcagcctgcacgagctcaccatcaacgaggctgctgcccagttctgcatgagggacaacacgctcttattacggagagtggagctcttctctttgtcccgccaagtagcccgagagagcacctacttgtcctccttgaagggctccaggcttcaccctgaagaactgggaggccctccactgaagaagctgaaacaagaggttggagaacagagtcaccctgaaatccagcagcctcccccaggccctgagtcctatgtacccccataccgccccagcctggaggaggacagcgccagcctgtctggggagagtctggatggacatttgcaggagttcgaggaagggctgctggacagatgtcctgccccaggaccccatcccgcgctggtggagggtcgcaggagcagcgtgaaagtggaggctgaggccagccggcagtgagggttggactggtgtcttcagacccaggacctcagacttctggctcacacagacccccacgctctccatccccggaatctagtcacaaccctggatccttcctctgcccttctcctgcctccccacctgctccatgggcataagactgtggggcttcaagcaataacaagcagaggcctggagagaggacacaaggagggtgcgtggtgccctcacccctgcccagagcgagggggcaaggactctgcctccagggcatctggggttttcccctccctcacacaacacactcccattctctttaggtttgcaccagtggtgtgagcagttggactcagtttggacaagggggaaagggggacttccctgggaaggtccagctaaaagtggcaacatttgcccccagaattgggggcctgggaacactggacctgctccttctcccctctccttccccgtttttgtgcttctggtttgtttctttaattaatttaacaagtgctgcagtttgccctcccattcccatctatcccccaagtcctttgcaatttcttccctgccctacataggggcggtgggtgtgggatcccttcactggccccctcgggaggcctgggttggactcagggtctcctccagctgggggctggaccgcagcacctatctgagcagttagagcgtctttcttttcagattgtgtacagtagattatttattttgttattttggaataaaatttattttatggcttagg

SEQ ID NO: 1364 - protein, 461 aa, Homo sapiens
MHRAPSPTAEQPPGGGDSARRTLQPRLKPSARAMALPRTLGELQLYRVLQRANLLSYYETFIQQGGDDVQQLCEAGEEEFLEIMALVGMATKPLHVRRLQKALREWATNPGLFSQPVPAVPVSSIPLFKISETAGTRKGSMSNGHGSPGEKAGSARSFSPKSPLELGEKLSPLPGGPGAGDPRIWPGRSTPESDVGAGGEEEAGSPPFSPPAGGGVPEGTGAGGLAAGGTGGGPDRLEPEMVRMVVESVERIFRSFPRGDAGEVTSLLKLNKKLARSVGHIFEMDDNDSQKEEEIRKYSIIYGRFDSKRREGKQLSLHELTINEAAAQFCMRDNTLLLRRVELFSLSRQVARESTYLSSLKGSRLHPEELGGPPLKKLKQEVGEQSHPEIQQPPPGPESYVPPYRPSLEEDSASLSGESLDGHLQEFEEGLLDRCPAPGPHPALVEGRRSSVKVEAEASRQ

SEQ ID NO: 1365 - DNA, 969 bp, Homo sapiens
atgcacagagcgccttcccccacagccgagcagccgccgggcggaggggacagcgcccgccggaccctgcagcccagactcaagcccagtgcccgagccatggcactgcctcggacgctgggggagctgcagctgtaccgggtcctgcagcgcgccaacctcctttcctactatgagaccttcatccagcagggaggggacgacgtgcagcagctgtgtgaggcgggtgaggaggagtttctggagatcatggcacttgtgggcatggccaccaagcccctccatgtccggcgcctgcagaaggcactgagagagtgggccaccaatccagggctcttcagtcaaccagtgcctgctgttcccgtctccagcatcccgctcttcaagatctctgagactgcgggtacccggaaagggagcatgagcaatgggcatggcagcccaggggaaaaggcaggcagtgcccgcagttttagccccaagagcccccttgaacttggagagaagctatcaccactgcctgggggacctggggcaggggacccccggatctggccaggccggagcactccagagtcggacgttggggcaggaggagaagaggaggctggctcgccccccttctccccccctgcagggggaggagtccctgaggggactggggctggggggctggcagcaggtgggactgggggtggtccagaccgactggagccagagatggtacgcatggtggtggaaagtgtggagaggatcttccggagcttcccaaggggggatgctggggaggtcacatccctgctaaagctgaataagaagctggcacggagcgttgggcacatctttgagatggatgataatgacagccagaaggaagaggagatccgcaaatacagcatcatctatggccgtttcgactctaagcggcgggagggcaagcagctcagcctgcacgaggcttcaccctga

SEQ ID NO: 1366 - protein, 322 aa, Homo sapiens
MHRAPSPTAEQPPGGGDSARRTLQPRLKPSARAMALPRTLGELQLYRVLQRANLLSYYETFIQQGGDDVQQLCEAGEEEFLEIMALVGMATKPLHVRRLQKALREWATNPGLFSQPVPAVPVSSIPLFKISETAGTRKGSMSNGHGSPGEKAGSARSFSPKSPLELGEKLSPLPGGPGAGDPRIWPGRSTPESDVGAGGEEEAGSPPFSPPAGGGVPEGTGAGGLAAGGTGGGPDRLEPEMVRMVVESVERIFRSFPRGDAGEVTSLLKLNKKLARSVGHIFEMDDNDSQKEEEIRKYSIIYGRFDSKRREGKQLSLHEASP

SEQ ID NO: 1367 - DNA, 723 bp, Homo sapiens
atgcacagagcgccttcccccacagccgagcagccgccgggcggaggggacagcgcccgccggaccctgcagcccagactcaagcccagtgcccgagccatggcactgcctcggacgctgggggagctgcagctgtaccgggtcctgcagcgcgccaacctcctttcctactatgagaccttcatccagcagggaggggacgacgtgcagcagctgtgtgaggcgggtgaggaggagtttctggagatcatggcacttgtgggcatggccaccaagcccctccatgtccggcgcctgcagaaggcactgagagagtgggccaccaatccagggctcttcagtcaaccagtgcctgctgttcccgtctccagcatcccgctcttcaagatctctgagactgcgggtacccggaaagggagcatgagcaatgggcatggcagcccaggggaaaaggcaggcagtgcccgcagttttagccccaagagcccccttgaacttggagagaagctatcaccactgcctgggggacctggggcaggggacccccggatctggccaggccggagcactccagagtcggactccctgaggggaggctggggggctggcagcaggtgggactgggggtggtccagaccgactggagccagagatggtacgcatgcctgtctggggagagtctggatggacatttgcaggctgtggggtcatgtccaaggctga

SEQ ID NO: 1368 - protein, 240 aa, Homo sapiens [sequence omitted]

SEQ ID NO: 1369 - DNA, 3753 bp, Homo sapiens
caggaactgggccagttccggtcccttccttttggggctctcactctggaggatggggtggatgggagaaaaaaccgggaagatcctgacggagttcctccagttctatgaagaccagtatggcgtggctctcttcaacagcatgcgccatgagattgagggcacggggctgccgcaggcccagctgctctggcgcaaggtgccactggacgagcgcatcgtcttctcggggaacctcttccagcaccaggaggacagcaagaagtggagaaaccgcttcagcctcgtgccccacaactacgggctggtgctctacgaaaacaaagcggcctatgagcggcaggtcccaccacgagccgtcatcaacagtgcaggctacaaaatcctcacgtccgtggaccaatacctggagctcattggcaactccttaccagggaccacggcaaagtcgggcagtgcccccatcctcaagtgccccacacagttcccgctcatcctctggcatccttatgcgcgtcactactacttctgcatgatgacagaagccgagcaggacaagtggcaggctgtgctgcaggactgcatccggcactgcaacaatggaatccctgaggactccaaggtagagggccctgcgttcacagatgccatccgcatgtaccgacagtccaaggagctgtacggcacctgggagatgctgtgtgggaacgaggtgcagatcctgagcaacctggtgatggaggagctgggccctgagctgaaggcagagctcggcccgcggctgaaggggaaaccgcaggagcggcagcggcagtggatccagatctcggacgccgtgtaccacatggtgtacgagcaggccaaggcgcgcttcgaggaggtgctgtccaaggtgcagcaggtgcagccggccatgcaggccgtcatccgaactgacatggaccaaattatcacctccaaggagcaccttgccagcaagatccgagccttcatcctccccaaggcagaggtgtgcgtgcggaaccatgtccagccctacatcccatccatcctggaggccctgatggtccccaccagccagggcttcactgaggtgcgagatgtcttcttcaaggaggtcacggacatgaacctgaacgtcatcaacgagggcggcattgacaagctgggcgagtacatggagaagctgtcccggctggcgtaccaccccctgaagatgcagagctgctatgagaagatggagtcgctgcgactggacgggctgcagcagcgatttgatgtgtccagcacgtccgtgttcaagcagcgagcccagatccacatgcgggagcaaatggacaatgccgtgtatacgttcgagaccctcctgcaccaggagctggggaaggggcccaccaaggaggagctgtgcaagtccatccagcgggtcctggagcgggtgctgaagaaatacgactacgacagcagctctgtgcggaagaggttcttccgggaggcgctgctgcagatcagcatcccgttcctgctcaagaagctggcccctacctgcaagtcggagctgccccggttccaggagctgatcttcgaggactttgccaggttcatcctggtggaaaacacgtacgaggaggtggtgctgcagaccgtcatgaaggacatcctgcaggctgtgaaggaggccgcggtgcagaggaagcacaacctctaccgggacagcatggtcatgcacaacagcgaccccaacctgcacctgctggccgagggcgcccccatcgactggggcgaggagtacagcaacagcggcgggggcggcagccccagccccagcaccccggagtcagccaccctctcggaaaagcgacggcgcgccaagcaggtggtctctgtggtccaggatgaggaggtggggctgccctttgaggctagccctgagtcaccaccacctgcgtccccggacggtgtcactgagatccgaggcctgctggcccaaggtctgcggcctgagagccccccaccagccggccccctgctcaacggggcccccgctggggagagtccccagcctaaggccgcccccgaggcctcctcgccgcctgcctcacccctccagcatctcctgcctggaaaggctgtggaccttgggccccccaagcccagcgaccaggagactggagagcaggtgtccagccccagcagccaccccgccctccacaccaccaccgaggacagtgcaggggtgcagactgagttctaggccagtgggtccctgactgctgcacatggcacaggccgttcccttccggacccaggcaggctcagctctggggagggcaccctggtctgtgccttgtgggtggaggcggggcagggctgtgtggcaccgccagggagcgggcccacctgagtcactttattgggttcagtcaacactttcttgctccctgttttctcttctgtgggatgatctcagatgcaggggctggttttggggttttcctgcttgtgccaagggctggacactgctggggggctggaaagcccctcccttcctgtccttctgtggcctccatcccctcatgggtgctgccatccttcctggagagagggaggtgaaagctggtgtgagcccagtgggttcccgcccactcacccaggagctggctgggccaggaccgggagagggagcactgctgccctcctggccctgctccttccgcagttaggggtggaccgagcctcgctttccccactgttctggagggaaggggaaggagggggtcttcaggctggagccaggctgggggtgctgggtggagagatgagatttagggggtgcctcatggggtgggcaggcctggggtgaaatgagaaaggcccagaacgtgcaggtctgcggaggggaagtgtcctgagtgaaggaggggacccccatcctgggggatgctgggagtgagtgagtgagatggctgagtgagggttatggggagcctgaggttttatgggcctgtgtatccccttctcccggccccagcctgcctccctcctgcccgcctggcccacaggtctccctctggtccctgtccctctggtggttggggatggagcggcagcaaggggtgtaatggggctgggttctgtcttctacaggccaccccgaggtcctcagtggttgcctggggagccggacggggctcctgaggggtacaggttgggtgggccctccctgagggtctggggtcaggctttggcctctgctgcctctcagtcaccaagtcacctccctctgaaaatccagtcccttctttggatgtccttgtgagtcactctgggcctggctgtcgtccctcctcagcttcttgttcctgggacaagggtcaagccaggatgggcccaggcctgggatcccccaccccaggacccccaggccccctcccctgctgctttgcggggggcagggcagaaatggactccttttgggtccccgaggtggggtcccctcccagccctgcatcctccgtgccctagacctgctccccagaggaggggccttgacccacaggacgtgtggtggcgcctggcactcagggacccccagctgccgcagccctggtctctggcgcatctcttccctcttgtcccgaagatctgcgcctctagtgccttttgaggggttcccatcatccctccctgatattgtattgaaaatattatgcacactgttcatgcttctactaatcaataaacgctttattt

SEQ ID NO: 1370 - protein, 733 aa, Homo sapiens
MGWMGEKTGKILTEFLQFYEDQYGVALFNSMRHEIEGTGLPQAQLLWRKVPLDERIVFSGNLFQHQEDSKKWRNRFSLVPHNYGLVLYENKAAYERQVPPRAVINSAGYKILTSVDQYLELIGNSLPGTTAKSGSAPILKCPTQFPLILWHPYARHYYFCMMTEAEQDKWQAVLQDCIRHCNNGIPEDSKVEGPAFTDAIRMYRQSKELYGTWEMLCGNEVQILSNLVMEELGPELKAELGPRLKGKPQERQRQWIQISDAVYHMVYEQAKARFEEVLSKVQQVQPAMQAVIRTDMDQIITSKEHLASKIRAFILPKAEVCVRNHVQPYIPSILEALMVPTSQGFTEVRDVFFKEVTDMNLNVINEGGIDKLGEYMEKLSRLAYHPLKMQSCYEKMESLRLDGLQQRFDVSSTSVFKQRAQIHMREQMDNAVYTFETLLHQELGKGPTKEELCKSIQRVLERVLKKYDYDSSSVRKRFFREALLQISIPFLLKKLAPTCKSELPRFQELIFEDFARFILVENTYEEVVLQTVMKDILQAVKEAAVQRKHNLYRDSMVMHNSDPNLHLLAEGAPIDWGEEYSNSGGGGSPSPSTPESATLSEKRRRAKQVVSVVQDEEVGLPFEASPESPPPASPDGVTEIRGLLAQGLRPESPPPAGPLLNGAPAGESPQPKAAPEASSPPASPLQHLLPGKAVDLGPPKPSDQETGEQVSSPSSHPALHTTTEDSAGVQTEF

SEQ ID NO: 1371 - DNA, 2980 bp, Homo sapiens
gcttctggtacttttgacgcgtctgctaacgtagtccctcagtgcgcatccggacgtaggaggtggaggttgtggaattcgccgttcgaaagcagggactaaaagccccacttcgtcttacgttccgaaaggaaggcgtctgttgagcctttctctcagtcgtgagggaggcgtcgacggcgtgcggaagtcctgagttgaggcttgcgggatcctttccggagaaagcgcaggctaaagccgcaggtgaagatgtccaactacgtgaacgacatgtggccgggctcgccgcaggagaaggattcgccctcgacctcgcggtcgggcgggtccagccggctgtcgtcgcggtctaggagccgctctttttccagaagctctcggtcccattcccgcgtctcgagccggttttcgtccaggagtcggaggagcaagtccaggtcccgttcccgaaggcgccaccagcggaagtacaggcgctactcgcggtcatactcgcggagccggtcgcgatcccgcagccgccgttaccgagagaggcgctacgggttcaccaggagatactaccggtctccttcgcggtaccggtcccggtcccgtagcaggtcgcgctctcggggaaggtcgtactgcggaagggcgtacgcgatcgcgcggggacagcgctactacggctttggtcgcacagtgtacccggaggagcacagcagatggagggacagatccaggacgaggtcgcggagcagaaccccctttcgcttaagtgaaaaagatcgaatggagctgttagaaatagcaaaaaccaatgcagcgaaagctctaggaacaaccaacattgacttgccagctagtctcagaactgttccttcagccaaagaaacaagccgtggaataggtgtatcaagtaatggtgcaaagcctgaagtaagtattctaggtttgtcggaacaaaactttcagaaagccaactgtcaaatctgattagccacttatatcttagactatactttttgggaagtctagagatgtatataatgtgctaaattcaaagtagcaaatctgaagataggcaatgtcaaacccatgaaaatgggagattaatgagctttatttggccgtgcatggtgcctcatgcctgtaatgaggcagatggcttgagtccaggagttcaagactagcctgggcaatgtggcaaaaccgcgtgtttacaaaaaatacaaaaattagccaggcatggtggtgcatgcctgtagtcccagctgtttgggaggctgaggcaggaggatctttgagcctaggatgctaaggttgcagtgagccaagatggcaccattgcactctagcctgggcagcagagcgagaccctgtctcaaaaaatacatttatttttttcattttcagttaacagtgtactcttataacaccgttattagctggtactttggtgatttctattactagtttttctaagctatttacagagtgtttgtagctttcatttgcagcattatgttcccacaaattctgtactcagcatatacagtatagtttatctgctctatttctgtcttatagaaatcatgaatgtggtctgcagacattgatgaagaaaatctgttggtaattgatacatgggctaaagcatcagaggtttaatttgaagtttatgttcacacactgaaaacttagtttttttgttggtagatccatgtgcatgctagaatttgggacaggcactatttgcataaagtattaaagtcaatttttaaactaagcaaaggtacacgttgtaacggtggggcatctgtgaaaaagatgtccctttcataatatatgcaatatattccagatgttttgagagattacagaagaggaggcctgcttcacttgcagataagtttattataattctccagaaatgtgcaggatgtgcattagcaaattgcactgtacttttcactccagcctgggtgacagagcaagactcccgtctcgggggcttaaaaaaaaaaaatgctgtatctaaatgaatctgtgtaattgggcccagatgtgggtttgctcagtattagtagacaaggtctttgttcagacgattaggtgcctaactggcaaatgccttagtttcttaaaacgtattttctgatgtggctttacatttcaaaagtgaacttgattcaacctgagaaaactgattaaaaaattagtttaaatttgccagcagggaagtaaaataattatgggaagagtgtcttaagcctaatattaaatcagttttgttaaggggaaaactcaatagttctgttacttaggctgttagatccaagttgatttttgtgtctacagctaaattttgtttacaattaggctattttttaatataggatttagaaaccaagggtatgtgttttaaaattacactttttcttaacctgtctagctgtcggaaaaggtaacagaagatggaactcgaaatcccaatgaaaaacctacccagcaaagaagcatagcttttagctctaataattctgtagcaaagccaatacaaaaatcagctaaagctgccacagaagaggcatcttcaagatcaccaaaaatagatcagaaaaaaagtccatatggactgtggatacctatctaaaagaagaaaactgatggctaagtttgcatgaaaactgcactttattgcaagttagtgtttctagcattatcccatccctttgagccattcaggggtacttgtgcatttaaaaaccaacacaaaaagatgtaaatacttaacactcaaatattaacattttaggtttctcttgcagatatgagagatagcacagatggaccaaaggttatgcacaggtgggagtcttttgtatatagttgtaaatattgtcttggttatgtaaaaatgaaattttttagacacagtaattgaactgtattcctgttttgtatatttaataaatttcttgttttcattctt

SEQ ID NO: 1372 - protein, 242 aa, Homo sapiens
MSNYVNDMWPGSPQEKDSPSTSRSGGSSRLSSRSRSRSFSRSSRSHSRVSSRFSSRSRRSKSRSRSRRRHQRKYRRYSRSYSRSRSRSRSRRYRERRYGFTRRYYRSPSRYRSRSRSRSRSRGRSYCGRAYAIARGQRYYGFGRTVYPEEHSRWRDRSRTRSRSRTPFRLSEKDRMELLEIAKTNAAKALGTTNIDLPASLRTVPSAKETSRGIGVSSNGAKPEVSILGLSEQNFQKANCQI

SEQ ID NO: 1373 - DNA, 2398 bp, Homo sapiens
ggagtacgccatttgagagtaggcgtgagaagttgctctgtgtgctgagcgttctaaaggaaggcgtccgttggccttcgtacccgtcttgagtgaggtgacgagtgttttctagtactggggtcggccgcgcagccctctcaggggtgggtggcaggaagagtgccgggtcccgcgtggtgcaaaaggtgggttcaggtttgcggccacacagcgctactcaggactttttagtcttgtttattttctccgtgcctgttcccgccccccgcagctccacctctgggagaggggcgggttcagctccaggaggcggggacttcccggcttggcgtggctggggtgtcccgtggaccccagtctcggcgcggtgacccacttatgggacttggcctttctttgttgtttgtttaaggcagggtttctcagcctgggcactactgaggttttgggccggctaattctgtctgggttggggagggtgctgtcccgtgcttcgcaggttgtgtagctgcatcccccgcctctacccagtggatgcaagtagcagccccagtgaaccaaaaatgcccccagactttgccaaatatcccctcccggggaagatcgcctcgcttgagaaccactgttggaggagagcctgggttttcgggaggtaaccgtttacaaaggggagaacggtaagaagccggaagcaacgatgacttagctacgtgaaagacttgcggccgggctcgcccctcttctagaagccgtcagtttgggtctcgcgtctggaatcaccgtcaaggagtcagatccagccccggagagggagcagggtcgaggtctccttgcagaaggcgccaccgcaggaagcacaggcgcaacgtgcggtctccctagcggaggcgctcgcgatcctgcagccgccggtccgggaggtgctcggtagccctccttggtgcctgtccggtagctggtcactctcgggggaaggtcgtgtgcagaagggcacatgcgatcacacagagacggcgttgctgcggctttgacccgatggtgcacccgaaagaacacagagggtgaagggagagatccaggaagtggtcgcggagcagaaccccccttcacttcagttaaaaaggaagtcctgagttgaggcttgcgggatcctttccggagaaagcgcaggctaaagccgcaggtgaagatgtccaactacgtgaacgacatgtggccgggctcgccgcaggagaaggattcgccctcgacctcgcggtcgggcgggtccagccggctgtcgtcgcggtctaggagccgctctttttccagaagctctcggtcccattcccgcgtctcgagccggttttcgtccaggagtcggaggagcaagtccaggtcccgttcccgaaggcgccaccagcggaagtacaggcgctactcgcggtcatactcgcggagccggtcgcgatcccgcagccgccgttaccgagagaggcgctacgggttcaccaggagatactaccggtctccttcgcggtaccggtcccggtcccgtagcaggtcgcgctctcggggaaggtcgtactgcggaagggcgtacgcgatcgcgcggggacagcgctactacggctttggtcgcacagtgtacccggaggagcacagcagatggagggacagatccaggacgaggtcgcggagcagaaccccctttcgcttaagtgaaaaagatcgaatggagctgttagaaatagcaaaaaccaatgcagcgaaagctctaggaacaaccaacattgacttgccagctagtctcagaactgttccttcagccaaagaaacaagccgtggaataggtgtatcaagtaatggtgcaaagcctgaactgtcggaaaaggtaacagaagatggaactcgaaatcccaatgaaaaacctacccagcaaagaagcatagcttttagctctaataattctgtagcaaagccaatacaaaaatcagctaaagctgccacagaagaggcatcttcaagatcaccaaaaatagatcagaaaaaaagtccatatggactgtggatacctatctaaaagaagaaaactgatggctaagtttgcatgaaaactgcactttattgcaagttagtgtttctagcattatcccatccctttgagccattcaggggtacttgtgcatttaaaaaccaacacaaaaagatgtaaatacttaacactcaaatattaacattttaggtttctcttgcagatatgagagatagcacagatggaccaaaggttatgcacaggtgggagtcttttgtatatagttgtaaatattgtcttggttatgtaaaaatgaaattttttagacacagtaattgaactgtattcctgttttgtatatttaataaatttcttgttttc

SEQ ID NO: 1374 - protein, 290 aa, Homo sapiens
MSNYVNDMWPGSPQEKDSPSTSRSGGSSRLSSRSRSRSFSRSSRSHSRVSSRFSSRSRRSKSRSRSRRRHQRKYRRYSRSYSRSRSRSRSRRYRERRYGFTRRYYRSPSRYRSRSRSRSRSRGRSYCGRAYAIARGQRYYGFGRTVYPEEHSRWRDRSRTRSRSRTPFRLSEKDRMELLEIAKTNAAKALGTTNIDLPASLRTVPSAKETSRGIGVSSNGAKPELSEKVTEDGTRNPNEKPTQQRSIAFSSNNSVAKPIQKSAKAATEEASSRSPKIDQKKSPYGLWIPI

SEQ ID NO: 1375 - DNA, 693 bp, Homo sapiens
cagccttataagctgagggagtggagaggcccggggccaggaaagcagagacagacaaagcgttaggagaagaagagaggcagggaagacaagccaggcacgatggccaccttcccaccagcaaccagcgccccccagcagcccccaggcccggaggacgaggactccagcctggatgaatctgacctctatagcctggcccattcctacctcggaggtggaggccggaaaggtcgcaccaagagagaagctgctgccaacaccaaccgccccagccctggcgggcacgagaggaaactggtgaccaagctgcagaattcagagaggaagaagcgaggggcacggcgctgagacagagctggagatgaggccagaccatggacactacacccagcaatagagacgggactgcggaggaaggaggacccaggacaggatccaggccggcttgccacaccccccacccctaggacttattcccgctgactgagtctctgaggggctaccaggaaagcgcctccaaccctagcaaaagtgcaagatggggagtgagaggctgggaatggaggggcagagccaggaagatcccccagaaaagaaagctacagaagaaactggggctcctccagggtggcagcaacaataaatagacacgcacggcagccacagcttgggtgtgtgttcatccttgtt

SEQ ID NO: 1376 - protein, 82 aa, Homo sapiens
MATFPPATSAPQQPPGPEDEDSSLDESDLYSLAHSYLGGGGRKGRTKREAAANTNRPSPGGHERKLVTKLQNSERKKRGARR

SEQ ID NO: 1377 - DNA, 1668 bp, Homo sapiens
agcgctgcgtgggccatggtgcagctccgaccgcgagcgtctcgcgccccggcgtcggcggaggcgatggtggacgagggccagctggcctcggaggaggaggaggcggagcacgggctgttgctcgggcagcccagcagcggcgcggccgccgagcccctggaggaagacgaggaaggggacgatgagtttgacgatgaggccccggaggagctgactttcgccagcgcccaggcggaagcgagagaagaggagcggcgagtgcgggagaccgtgcgcagggataaaacgctcctgaaggagaagaggaagcgacgcgaggagctgttcatcgaacagaagaaaagaaaactccttccagacactattttggagaagttaaccacagcttcacagactaacatcaagaaatcgccaggaaaggtgaaagaagttaatttgcaaaagaaaaatgaagactgtgaaaaaggaaatgactccaagaaagttaaagtacaaaaagtacagtctgtcagccagaataaaagctacttggccgtaaggctaaaagaccaagatctgagagattcaaggcaacaagcagcacaagccttcatacataattcattatatgggccaggaaccaacaggactactgtaaataagttcctgtctcttgccaacaagaggttaccagtgaaaagagctgctgtccagtttttgaataatgcttggggaatccaaaaaaaacaaaatgccaagaggtttaaaagacggtggatggtcagaaagatgaaaactaagaagtaaatcaatgctaaatgaagaatctgtactttgtatgtatagaatttatctaataaatcattcatagatcattttaaaggatcattataaaaatcataaacctatttgaggaagtgctcaaccacatttcattcttctggagtagaactgtgccttgcaatcctagaggaaaaagtggtttaagaaggaattgttttctttttaatatatttaactgaattcaagccatacccacatcagcaacagcacctcttctactctccccgggttagaggggtggcaaaaatggcacggactaaaaggagaaatggatattccagcaaagtctctaactgcagcctgtagacaatttgctattaaagattcagtgcacaaaatatagctaacagcttttaaatttttacttttaaccagtctggggatttgcttgcctggtgagtctcatatgccatattatgaatatgaaaataatgaagttaatttcctgttgcctttctgtgtcagccacaatatcaggtctaaccctaatccagggatgccagtaaactgaaggcaattttaggttgtagaactcagattaattgtagaaaccattaattttaattgctctaattttcatagtaatcataaaaagtatgcaagtacctaatatataaactcaattgacactgtatctgtagaagtaaatttttaatggctggttaattatatcactacattttattgcaatatagtactcatttaagcacttaaaaatggaaggtgtacaaagattaaattaagacacggtaaattgactaaatatttggtttttatataaataaaggtcataaccacaccgttgacatgtaatactgttataatacaacagttaaacttgtg

SEQ ID NO: 1378 - protein, 257 aa, Homo sapiens
MVQLRPRASRAPASAEAMVDEGQLASEEEEAEHGLLLGQPSSGAAAEPLEEDEEGDDEFDDEAPEELTFASAQAEAREEERRVRETVRRDKTLLKEKRKRREELFIEQKKRKLLPDTILEKLTTASQTNIKKSPGKVKEVNLQKKNEDCEKGNDSKKVKVQKVQSVSQNKSYLAVRLKDQDLRDSRQQAAQAFIHNSLYGPGTNRTTVNKFLSLANKRLPVKRAAVQFLNNAWGIQKKQNAKRFKRRWMVRKMKTKK

SEQ ID NO: 1379 - DNA, 1750 bp, Homo sapiens
acacacacaagctaagacatatggttctatcttcagaaaacaatatggtgtttagagcctagatacgtaggtaacctttccagagatgtgacagaagtccttatacttcagttgttcagtcagattggaccctgtaaaagctgtaaaatgataacagagcatacaagcaatgacccatattgctttgtggaattttatgaacacagagatgcagctgctgcattagctgctatgaatgggagaaaaattttgggaaaggaggtcaaagtaaactgggcaaccacaccaagtagccagaaaaaagatacttccaatcacttccatgtgtttgttggggatttgagtccagaaattacaacagaagatatcaaatcagcatttgccccctttggtaaaatatcggatgcccgggtagttaaagacatggcaactggaaaatccaaaggctatggttttgtatctttttataacaaactggatgcagaaaatgcgattgtgcatatgggcggtcagtggttgggtggtcgtcaaatccgaaccaattgggccactcgtaaaccacctgcacctaaaagtacacaagaaaacaacactaagcagttgagatttgaagatgtagtaaaccagtcaagtccaaaaaattgtactgtgtactgtggaggaattgcgtctgggttaacagatcagcttatgagacagacattctcaccatttggacaaattatggaaataagagttttcccagaaaagggctattcatttgtcagattttcaacccatgaaagtgcagcccatgccattgtttcggtgaacggtactacgattgaaggacatgtggttaaatgctattggggtaaagaatctcctgatatgactaaaaacttccaacaggtaattcgatttttcatagcattctttaaggtttccatcttacatgtcacataaaagctttggaaactctgtaaaatgaacaataaaataaagcatatagctactttcagttgattgtatttcaaaattgattatttgcggtattaactgaatcttaatactttcttttcacaggtgtcaccaccccaataaacttagacaatgataaataacagagtcctattcacataagggtgcttacttagtttttctcttccttgtctcccactctttcttcatatacggtgtttcttatgtgttccctaaaacaatactttgctttttcctaggttgactatagtcaatggggccaatggagccaagtgtatggaaacccacaacagtatggacagtatatggcaaatgggtggcaagtaccgccttatggagtatacgggcaaccatggaatcaacaaggatttggagtagatcaatcaccttctgctgcttggatgggtggatttggtgctcagcctccccaaggacaagctcctccccctgtaatacctcctcctaaccaagccggatatggtatggcaagttaccaaacacagtgagccgggactctaaaaaaaaattgtaattcatgataggcttcgatttcctgtgacactctgaagacatgaaagtagacatcggaaaatgaaaatatttattttaaaaattgaaatgtttggaacctttagcacagatttgctttggtgaaggacacgtgtcttctagttctgcctttttaagtttttgttcatgatggatatgaacatgatttttctttatgtacaaaaactaaaataaagtcaataaagacaattctgactac

SEQ ID NO: 1380 - protein, 265 aa, Homo sapiens
MITEHTSNDPYCFVEFYEHRDAAAALAAMNGRKILGKEVKVNWATTPSSQKKDTSNHFHVFVGDLSPEITTEDIKSAFAPFGKISDARVVKDMATGKSKGYGFVSFYNKLDAENAIVHMGGQWLGGRQIRTNWATRKPPAPKSTQENNTKQLRFEDVVNQSSPKNCTVYCGGIASGLTDQLMRQTFSPFGQIMEIRVFPEKGYSFVRFSTHESAAHAIVSVNGTTIEGHVVKCYWGKESPDMTKNFQQVIRFFIAFFKVSILHVT

SEQ ID NO: 1381 - DNA, 2219 bp, Homo sapiens
gcagaagtgcttccctctctcatttccaggaccacaattcccagagacttcggcttcacgacgtttctctttttgcccgatctctcccggagctggctgggcttcggccggccagaggcccacagcgacgacgtgatccgtcgtgagcgggtcccagggtttcctcggcggcccttttttctctcccctcggtcgtcccccttgcaggctgtcgcggctggcctgagcggtgacctggcgggtcgcgcctgcgctctgccctgtttcctgcctggctggtggcggcggccattttgttcatcctcctcctcctcctgctcctcctggttggagcgcagtgtccggagcgggctggggggagagagcccgagagcagggttcggtgccttttcctctgtccccagccggtgcccagagcccccctccccttcctccccaccccctcccctccccaaccctgccctcccccttgtcccgggatcgctccgtcgcacccaccatgatggaagacgacgggcagccccggactctatacgtaggtaacctttccagagatgtgacagaagtccttatacttcagttgttcagtcagattggaccctgtaaaagctgtaaaatgataacagagcatacaagcaatgacccatattgctttgtggaattttatgaacacagagatgcagctgctgcattagctgctatgaatgggagaaaaattttgggaaaggaggtcaaagtaaactgggcaaccacaccaagtagccagaaaaaagatacttccaatcacttccatgtgtttgttggggatttgagtccagaaattacaacagaagatatcaaatcagcatttgccccctttggtaaaatatcggatgcccgggtagttaaagacatggcaactggaaaatccaaaggctatggttttgtatctttttataacaaactggatgcagaaaatgcgattgtgcatatgggcggtcagtggttgggtggtcgtcaaatccgaaccaattgggccactcgtaaaccacctgcacctaaaagtacacaagaaaacaacactaagcagttgagatttgaagatgtagtaaaccagtcaagtccaaaaaattgtactgtgtactgtggaggaattgcgtctgggttaacagatcagcttatgagacagacattctcaccatttggacaaattatggaaataagagttttcccagaaaagggctattcatttgtcagattttcaacccatgaaagtgcagcccatgccattgtttcggtgaacggtactacgattgaaggacatgtggttaaatgctattggggtaaagaatctcctgatatgactaaaaacttccaacaggtaattcgatttttcatagcattctttaaggtttccatcttacatgtcacataaaagctttggaaactctgtaaaatgaacaataaaataaagcatatagctactttcagttgattgtatttcaaaattgattatttgcggtattaactgaatcttaatactttcttttcacaggtgtcaccaccccaataaacttagacaatgataaataacagagtcctattcacataagggtgcttacttagtttttctcttccttgtctcccactctttcttcatatacggtgtttcttatgtgttccctaaaacaatactttgctttttcctaggttgactatagtcaatggggccaatggagccaagtgtatggaaacccacaacagtatggacagtatatggcaaatgggtggcaagtaccgccttatggagtatacgggcaaccatggaatcaacaaggatttggagtagatcaatcaccttctgctgcttggatgggtggatttggtgctcagcctccccaaggacaagctcctccccctgtaatacctcctcctaaccaagccggatatggtatggcaagttaccaaacacagtgagccgggactctaaaaaaaaattgtaattcatgataggcttcgatttcctgtgacactctgaagacatgaaagtagacatcggaaaatgaaaatatttattttaaaaattgaaatgtttggaacctttagcacagatttgctttggtgaaggacacgtgtcttctagttctgcctttttaagtttttgttcatgatggatatgaacatgatttttctttatgtacaaaaactaaaataaagtcaataaagacaattctgactac

SEQ ID NO: 1382 - protein, 265 aa, Homo sapiens; identical to SEQ ID NO: 1380

SEQ ID NO: 1383 - DNA, 1934 bp, Homo sapiens
tcttcacgtcccagcgcgggtgggcgccggcggctcctcttaaccacaggttccagaagtcctctgcagaagtgcttccctctctcatttccaggaccacaattcccagagacttcggcttcacgacgtttctctttttgcccgatctctcccggagctggctgggcttcggccggccagaggcccacagcgacgacgtgatccgtcgtgagcgggtcccagggtttcctcggcggcccttttttctctcccctcggtcgtcccccttgcaggctgtcgcggctggcctgagcggtgacctggcgggtcgcgcctgcgctctgccctgtttcctgcctggctggtggcggcggccattttgttcatcctcctcctcctcctgctcctcctggttggagcgcagtgtccggagcgggctggggggagagagcccgagagcagggttcggtgccttttcctctgtccccagccggtgcccagagcccccctccccttcctccccaccccctcccctccccaaccctgccctcccccttgtcccgggatcgctccgtcgcacccaccatgatggaagacgacgggcagccccggactctatacgtaggtaacctttccagagatgtgacagaagtccttatacttcagttgttcagtcagattggaccctgtaaaagctgtaaaatgataacagagcatacaagcaatgacccatattgctttgtggaattttatgaacacagagatgcagctgctgcattagctgctatgaatgggagaaaaattttgggaaaggaggtcaaagtaaactgggcaaccacaccaagtagccagaaaaaagatacttccaatcacttccatgtgtttgttggggatttgagtccagaaattacaacagaagatatcaaatcagcatttgccccctttggtaaaatatcggatgcccgggtagttaaagacatggcaactggaaaatccaaaggctatggttttgtatctttttataacaaactggatgcagaaaatgcgattgtgcatatgggcggtcagtggttgggtggtcgtcaaatccgaaccaattgggccactcgtaaaccacctgcacctaaaagtacacaagaaaacaacactaagcagttgagatttgaagatgtagtaaaccagtcaagtccaaaaaattgtactgtgtactgtggaggaattgcgtctgggttaacagatcagcttatgagacagacattctcaccatttggacaaattatggaaataagagttttcccagaaaagggctattcatttgtcagattttcaacccatgaaagtgcagcccatgccattgtttcggtgaacggtactacgattgaaggacatgtggttaaatgctattggggtaaagaatctcctgatatgactaaaaacttccaacaggttgactatagtcaatggggccaatggagccaagtgtatggaaacccacaacagtatggacagtatatggcaaatgggtggcaagtaccgccttatggagtatacgggcaaccatggaatcaacaaggatttggagtagatcaatcaccttctgctgcttggatgggtggatttggtgctcagcctccccaaggacaagctcctccccctgtaatacctcctcctaaccaagccggatatggtatggcaagttaccaaacacagtgagccgggactctaaaaaaaaattgtaattcatgataggcttcgatttcctgtgacactctgaagacatgaaagtagacatcggaaaatgaaaatatttattttaaaaattgaaatgtttggaacctttagcacagatttgctttggtgaaggacacgtgtcttctagttctgcctttttaagtttttgttcatgatggatatgaacatgatttttctttatgtacaaaaactaaaataaagtc

SEQ ID NO: 1384 - protein, 375 aa, Homo sapiens
MMEDDGQPRTLYVGNLSRDVTEVLILQLFSQIGPCKSCKMITEHTSNDPYCFVEFYEHRDAAAALAAMNGRKILGKEVKVNWATTPSSQKKDTSNHFHVFVGDLSPEITTEDIKSAFAPFGKISDARVVKDMATGKSKGYGFVSFYNKLDAENAIVHMGGQWLGGRQIRTNWATRKPPAPKSTQENNTKQLRFEDVVNQSSPKNCTVYCGGIASGLTDQLMRQTFSPFGQIMEIRVFPEKGYSFVRFSTHESAAHAIVSVNGTTIEGHVVKCYWGKESPDMTKNFQQVDYSQWGQWSQVYGNPQQYGQYMANGWQVPPYGVYGQPWNQQGFGVDQSPSAAWMGGFGAQPPQGQAPPPVIPPPNQAGYGMASYQTQ

SEQ ID NO: 1385 - DNA, 2877 bp, Homo sapiens
ctgctcgcggcgccgcctcctgctcctcccgctgctgctgccgctgccgccctgagtcactgcctgcgcagctccggccgcctggctccccatactagtcgccgatatttggagttcttacaacatggcagacattgacaacaaagaacagtctgaacttgatcaagatttggatgatgttgaagaagtagaagaagaggaaactggtgaagaaacaaaactcaaagcacgtcagctaactgttcagatgatgcaaaatcctcagattcttgcagcccttcaagaaagacttgatggtctggtagaaacaccaacaggatacattgaaagcctgcctagggtagttaaaagacgagtgaatgctctcaaaaacctgcaagttaaatgtgcacagatagaagccaaattctatgaggaagttcacgatcttgaaaggaagtatgctgttctctatcagcctctatttgataagcgatttgaaattattaatgcaatttatgaacctacggaagaagaatgtgaatggaaaccagatgaagaagatgagatttcggaggaattgaaagaaaaggccaagattgaagatgagaaaaaagatgaagaaaaagaagaccccaaaggaattcctgaattttggttaactgtttttaagaatgttgacttgctcagtgatatggttcaggaacacgatgaacctattctgaagcacttgaaagatattaaagtgaagttctcagatgctggccagcctatgagttttgtcttagaatttcactttgaacccaatgaatattttacaaatgaagtgctgacaaagacatacaggatgaggtcagaaccagatgattctgatcccttttcttttgatggaccagaaattatgggttgtacagggtgccagatagattggaaaaaaggaaagaatgtcactttgaaaactattaagaagaagcagaaacacaagggacgtgggacagttcgtactgtgactaaaacagtttccaatgactctttctttaacttttttgcccctcctgaagttcctgagagtggagatctggatgatgatgctgaagctatccttgctgcagacttcgaaattggtcactttttacgtgagcgtataatcccaagatcagtgttatattttactggagaagctattgaagatgatgatgatgattatgatgaagaaggtgaagaagcggatgaggaaggggaagaagaaggagatgaggaaaatgatccagactatgacccaaagaaggatcaaaacccagcagagtgcaagcagcagtgaagcaggatgtatgtggccttgaggataacctgcactggtctaccttctgcttccctggaaaggatgaatttacatcatttgacaagcctattttcaagttatttgttgtttgtttgcttgtttttgtttttgcagctaaaataaaaatttcaaatacaattttagttcttacaagataatgtcttaattttgtaccaattcaggtagaagtagaggcctaccttgaattaagggttatactcagtttttaacacattgttgaagaaaaggtaccagctttggaacgagatgctatactaataagcaagtgtaaaaaaaaaaaaaaaagaggaagaaaatcttaagtgattgatgctgttttcttttaaaaaaaaaaaaaaaaattcattttctttgggttagagctagagagaaggccccaagcttctatggtttcttctaattcttattgcttaaagtatgagtatgtcacttacccgtgcttctgtttactgtgtaattaaaatgggtagtactgtttacctaactacctcatggatgtgttaaggcatattgagttaaatctcatataatgtttctcaatcttgttaaaagctcaaaattttgggcctatttgtaatgccagtgtgacactaagcattttgttcacaccacgctttgataactaaactggaaaacaaaggtgttaagtacctctgttctggatctgggcagtcagcactctttttagatctttgtgtggctcctatttttatagaagtggagggatgcactatttcacaaggtccaagatttgttttcagatatttttgatgactgtattgtaaatactacagggatagcactatagtattgtagtcatgagacttaaagtggaaataagactatttttgacaaaagatgccattaaatttcagactgtagagccacatttacaatacctcaggctaattactgttaattttggggttgaacttttttttgacagtgagggtggattattggattgtcattagaggaaggtctagatttcctgctcttaataaaattacattgaattgatttttagaggtaatgaaaacttcctttctgagaagttagtgttaaggtcttggaatgtgaacacattgtttgtagtgctatccattcctctcctgagattttaacttactactggaaatccttaaccaattataatagctttttttctttattttcaaaatgatttcctttgctttgattagacactatgtgctttttttttttaaccatagttcatcgaaatgcagctttttctgaacttcaaagatagaatcccatttttaatgaactgaagtagcaaaatcatctttttcattctttaggaaatagctattgccaaagtgaaggtgtagataatacctagtcttgttacataaaggggatgtggtttgcagaagaattttctttataaaattgaagttttaagggacgtcagtgtttatgccatttttccagttccaaaatgattccattccattctagaaatttgaagtatgtaacctgaaatccttaataaaatttggatttaattttat

SEQ ID NO: 1386 - protein, 391 aa, Homo sapiens
MADIDNKEQSELDQDLDDVEEVEEEETGEETKLKARQLTVQMMQNPQILAALQERLDGLVETPTGYIESLPRVVKRRVNALKNLQVKCAQIEAKFYEEVHDLERKYAVLYQPLFDKRFEIINAIYEPTEEECEWKPDEEDEISEELKEKAKIEDEKKDEEKEDPKGIPEFWLTVFKNVDLLSDMVQEHDEPILKHLKDIKVKFSDAGQPMSFVLEFHFEPNEYFTNEVLTKTYRMRSEPDDSDPFSFDGPEIMGCTGCQIDWKKGKNVTLKTIKKKQKHKGRGTVRTVTKTVSNDSFFNFFAPPEVPESGDLDDDAEAILAADFEIGHFLRERIIPRSVLYFTGEAIEDDDDDYDEEGEEADEEGEEEGDEENDPDYDPKKDQNPAECKQQ

SEQ ID NO: 1387 - DNA, 3551 bp, Homo sapiens
ctgctcgcggcgccgcctcctgctcctcccgctgctgctgccgctgccgccctgagtcactgcctgcgcagctccggccgcctggctccccatactagtcgccgatatttggagttcttacaacatggcagacattgacaacaaagaacagtctgaacttgatcaagatttggatgatgttgaagaagtagaagaagaggaaactggtgaagaaacaaaactcaaagcacgtcagctaactgttcagatgatgcaaaatcctcagattcttgcagcccttcaagaaagacttgatggtctggtagaaacaccaacaggatacattgaaagcctgcctagggtagttaaaagacgagtgaatgctctcaaaaacctgcaagttaaatgtgcacagatagaagccaaattctatgaggaagttcacgatcttgaaaggaagtatgctgttctctatcagcctctatttgataagcgatttgaaattattaatgcaatttatgaacctacggaagaagaatgtgaatggaaaccagatgaagaagatgagatttcggaggaattgaaagaaaaggccaagattgaagatgagaaaaaagatgaagaaaaagaagaccccaaaggaattcctgaattttggttaactgtttttaagaatgttgacttgctcagtgatatggttcaggaacacgatgaacctattctgaagcacttgaaagatattaaagtgaagttctcagatgctggccagcctatgagttttgtcttagaatttcactttgaacccaatgaatattttacaaatgaagtgctgacaaagacatacaggatgaggtcagaaccagatgattctgatcccttttcttttgatggaccagaaattatgggttgtacagggtgccagatagattggaaaaaaggaaagaatgtcactttgaaaactattaagaagaagcagaaacacaagggacgtgggacagttcgtactgtgactaaaacagtttccaatgactctttctttaacttttttgcccctcctgaagttcctgagagtggagatctggatgatgatgctgaagctatccttgctgcagacttcgaaattggtcactttttacgtgagcgtataatcccaagatcagtgttatattttactggagaagctattgaagatgatgatgatgattatgatgaagaaggtgaagaagcggatgaggaaggggaagaagaaggagatgaggaaaatgatccagactatgacccaaagaaggatcaaaacccagcagagtgcaagcagcagtgaagcaggatgtatgtggccttgaggataacctgcactgtaatagcctaaacacaactcttatttacttacagccttatgtttttgtattttcttggtagactaggtaatttttttttaaaggacaggaaactgatattttaaagaccaatttgttctacctagcattttaactagtttttctgccagctatgttgaatgcacaaattctgtcacgcatgttcattcattgctacataatttggttcttctggaatatttttatgtagctcttggagtacagctatgaaaattaacaactgttaaaggaaataccttttttttttttttgtaattttttccttgaagaaccaaagtattttttcagctggttgttgaatagggttaagtccgcttggattagctgtgcctttcattactttgttacagaaatgcagtgacttatactaagacaatttattgtttaaaaaaaaaattggcaagacaactatatggttaagaatttccagtatgaccacacccaataactgttattagagtgttaatggattattgtgttttaggtgacatagttaactgtaaagtaacctgactcagtatagttactggtaccacagtgaggtgaataaaacgggattttcagaagttagcctgaatttaactgtatttttaaatttaacctccattaactaagcatcttttctttgtggtagggtctaccttctgcttccctggaaaggatgaatttacatcatttgacaagcctattttcaagttatttgttgtttgtttgcttgtttttgtttttgcagctaaaataaaaatttcaaatacaattttagttcttacaagataatgtcttaattttgtaccaattcaggtagaagtagaggcctaccttgaattaagggttatactcagtttttaacacattgttgaagaaaaggtaccagctttggaacgagatgctatactaataagcaagtgtaaaaaaaaaaaaaaaagaggaagaaaatcttaagtgattgatgctgttttcttttaaaaaaaaaaaaaaaaattcattttctttgggttagagctagagagaaggccccaagcttctatggtttcttctaattcttattgcttaaagtatgagtatgtcacttacccgtgcttctgtttactgtgtaattaaaatgggtagtactgtttacctaactacctcatggatgtgttaaggcatattgagttaaatctcatataatgtttctcaatcttgttaaaagctcaaaattttgggcctatttgtaatgccagtgtgacactaagcattttgttcacaccacgctttgataactaaactggaaaacaaaggtgttaagtacctctgttctggatctgggcagtcagcactctttttagatctttgtgtggctcctatttttatagaagtggagggatgcactatttcacaaggtccaagatttgttttcagatatttttgatgactgtattgtaaatactacagggatagcactatagtattgtagtcatgagacttaaagtggaaataagactatttttgacaaaagatgccattaaatttcagactgtagagccacatttacaatacctcaggctaattactgttaattttggggttgaacttttttttgacagtgagggtggattattggattgtcattagaggaaggtctagatttcctgctcttaataaaattacattgaattgatttttagaggtaatgaaaacttcctttctgagaagttagtgttaaggtcttggaatgtgaacacattgtttgtagtgctatccattcctctcctgagattttaacttactactggaaatccttaaccaattataatagctttttttctttattttcaaaatgatttcctttgctttgattagacactatgtgctttttttttttaaccatagttcatcgaaatgcagctttttctgaacttcaaagatagaatcccatttttaatgaactgaagtagcaaaatcatctttttcattctttaggaaatagctattgccaaagtgaaggtgtagataatacctagtcttgttacataaaggggatgtggtttgcagaagaattttctttataaaattgaagttttaagggacgtcagtgtttatgccatttttccagttccaaaatgattccattccattctagaaatttgaagtatgtaacctgaaatccttaataaaatttggatttaattttat

SEQ ID NO: 1388 - protein, 391 aa, Homo sapiens; identical to SEQ ID NO: 1386

SEQ ID NO: 1389 - DNA, 2464 bp, Homo sapiens
atccctgcagcgctacccgggtactctggatgcacatagggcggctctcgctcctaccttgtcatcctgctgtctaatccgggggcagcttccctcctccacaccagcagaggctattcttcagcaacaagaatagccgagcctattcgtccgcaacaagagcccaagaagcatcctgcaggctttctgctttttgagtgtattttaaagcaaaaacgagtggaaagctatgtatgctcagttaactatgtctagatgttaaccttttttcaaaaaacacagatggaggcctccctccgaggatgcctggcattctcctctttctgtgggcggcagcgaccccctgcggctccagcctccactacgggatctgcgggaagacacggggaagacgaactccgcacactgcatttgattaatgatttattttgattaacgccgtcacagtgacgccttagagcagtccctgttcacccgggtcccagcctcgaccccgcacggacagcgagggtgtggctttgatagctggtggtgccacttcctggccttggatgagccgtacgcctctgtaaacccaacttcctcacctttgaaacagctgcctggttcagcattaatgaagattagtcagtgacaggcctggtgtgctgagtccgcacatagaacttctgcaatgtcccatcaacctctcagctgcctcactgaaaaggaggacagccccagtgaaagcacaggaaatggacccccccacctggcccacccaaacctggacacgtttaccccggaggagctgctgcagcagatgaaagagctcctgaccgagaaccaccagctgaaagaagccatgaagctaaataatcaagccatgaaagggagatttgaggagctttcggcctggacagagaaacagaaggaagaacgccagttttttgagatacagagcaaagaagcaaaagagcgtctaatggccttgagtcatgagaatgagaaattgaaggaagagcttggaaaactaaaagggaaatcagaaaggtcatctgaggaccccactgatgactccaggcttcccagggccgaagcggagcaggaaaaggaccagctcaggacccaggtggtgaggctacaagcagagaaggcagacctgttgggcatcgtgtctgaactgcagctcaagctgaactccagcggctcctcagaagattcctttgttgaaattaggatggctgaaggagaagcagaagggtcagtaaaagaaatcaagcatagtcctgggcccacgagaacagtctccactggcacggcattgtctaaatataggagcagatctgcagatggggccaagaattacttcgaacatgaggagttaactgtgagccagctcctgctgtgcctaagggaagggaatcagaaggtggagagacttgaagttgcactcaaggaggccaaagaaagagtttcagattttgaaaagaaaacaagtaatcgttctgagattgaaacccagacagaggggagcacagagaaagagaatgatgaagagaaaggcccggagactgttggaagcgaagtggaagcactgaacctccaggtgacatctctgtttaaggagcttcaagaggctcatacaaaactcagcaaagctgagctaatgaagaagagacttcaagaaaagtgtcaggcccttgaaaggaaaaattctgcaattccatcagagttgaatgaaaagcaagagcttgtttatactaacaaaaagttagagctacaagtggaaagcatgctatcagaaatcaaaatggaacaggctaaaacagaggatgaaaagtccaaattaactgtgctacagatgacacacaacaagcttcttcaagaacataataatgcattgaaaacaattgaggaactaacaagaaaagagtcagaaaaagtggacagggcagtgctgaaggaactgagtgaaaaactggaactggcagagaaggctctggcttccaaacagctgcaaatggatgaaatgaagcaaaccattgccaagcaggaagaggacctggaaaccatgaccatcctcagggctcagatggaagtttactgttctgattttcatgctgaaagagcagcgagagagaaaattcatgaggaaaaggagcaactggcattgcagctggcagttctgctgaaagagaatgatgctttcgaagacggaggcaggcagtccttgatggagatgcagagtcgtcatggggcgagaacaagtgactctgaccagcaggcttaccttgttcaaagaggagctgaggacagggactggcggcaacagcggaatattccgattcattcctgccccaagtgtggagaggttctgcctgacatagacacgttacagattcacgtgatggattgcatcatttaagtgttgatgtatcacctccccaaaactgttggtaaatgtcagattttttcctccaag

SEQ ID NO: 1390 - protein, 577 aa, Homo sapiens [sequence omitted]

SEQ ID NO: 1391 - DNA, 2292 bp, Homo sapiens
ggctgccccctccgccaccgccgccgcccgccggcaggttccctggtcagcgtcccatcccggtcgggagttctctccaggcggcacgatgccgaggaaacagtgaccctgagcgaagccaagccgggcggcaggaacttctgcaatgtcccatcaacctctcagctgcctcactgaaaaggaggacagccccagtgaaagcacaggaaatggacccccccacctggcccacccaaacctggacacgtttaccccggaggagctgctgcagcagatgaaagagctcctgaccgagaaccaccagctgaaagaagccatgaagctaaataatcaagccatgaaagggagatttgaggagctttcggcctggacagagaaacagaaggaagaacgccagttttttgagatacagagcaaagaagcaaaagagcgtctaatggccttgagtcatgagaatgagaaattgaaggaagagcttggaaaactaaaagggaaatcagaaaggtcatctgaggaccccactgatgactccaggcttcccagggccgaagcggagcaggaaaaggaccagctcaggacccaggtggtgaggctacaagcagagaaggcagacctgttgggcatcgtgtctgaactgcagctcaagctgaactccagcggctcctcagaagattcctttgttgaaattaggatggctgaaggagaagcagaagggtcagtaaaagaaatcaagcatagtcctgggcccacgagaacagtctccactggcacggcattgtctaaatataggagcagatctgcagatggggccaagaattacttcgaacatgaggagttaactgtgagccagctcctgctgtgcctaagggaagggaatcagaaggtggagagacttgaagttgcactcaaggaggccaaagaaagagtttcagattttgaaaagaaaacaagtaatcgttctgagattgaaacccagacagaggggagcacagagaaagagaatgatgaagagaaaggcccggagactgttggaagcgaagtggaagcactgaacctccaggtgacatctctgtttaaggagcttcaagaggctcatacaaaactcagcaaagctgagctaatgaagaagagacttcaagaaaagtgtcaggcccttgaaaggaaaaattctgcaattccatcagagttgaatgaaaagcaagagcttgtttatactaacaaaaagttagagctacaagtggaaagcatgctatcagaaatcaaaatggaacaggctaaaacagaggatgaaaagtccaaattaactgtgctacagatgacacacaacaagcttcttcaagaacataataatgcattgaaaacaattgaggaactaacaagaaaagagtcagaaaaagtggacagggcagtgctgaaggaactgagtgaaaaactggaactggcagagaaggctctggcttccaaacagctgcaaatggatgaaatgaagcaaaccattgccaagcaggaagaggacctggaaaccatgaccatcctcagggctcagatggaagtttactgttctgattttcatgctgaaagagcagcgagagagaaaattcatgaggaaaaggagcaactggcattgcagctggcagttctgctgaaagagaatgatgctttcgaagacggaggcaggcagtccttgatggagatgcagagtcgtcatggggcgagaacaagtgactctgaccagcaggcttaccttgttcaaagaggagctgaggacagggactggcggcaacagcggaatattccgattcattcctgccccaagtgtggagaggttctgcctgacatagacacgttacagattcacgtgatggattgcatcatttaagtgttgatgtatcacctccccaaaactgttggtaaatgtcagattttttcctccaagagttgtgcttttgtgttatttgttttcactcaaatattttgcctcattattcttgttttaaaagaaagaaaacaggccgggcacagtggctcatgcctgtaatcccagcactttgggaggtcgaggtgggtggatcacttggggtcagggtttgagaccagcctggccaacatggcggaaccctgtctctaccaaaattacaaaaattagccgagcatggtggcgcatgcctgtagtcgcagctactcgcgaggttgaggcaggagaattgcttgaacccaggaagtggcagttgcagtgagccgagacgacaccactgcactccagcctgggtgacagagggagactctgtctcg

SEQ ID NO: 1392 - protein, 577 aa, Homo sapiens [sequence omitted]

SEQ ID NO: 1393 - DNA, 2183 bp, Homo sapiens
atgaccagcccctccccacgcatccagataatctccaccgactctgctgtagcctcacctcagcgcattcagggctctgaacctgcctctggcccattgagtgttttcacatctttgaacaaagagaagattgtcacagaccagcagacaggacagaaaatccagatagtcaccgcagtggacgcctccggatcccccaaacagcagttcatcctgaccagcccagatggagctggaactgggaaggtgatcctggcttccccagagacatccagcgccaagcaactcatattcaccacctcagacaacctcgtccctggcaggatccagattgtcacggattctgcctctgtggagcgtttactggggaagacggacgtccagcggccccaggtggtagagtactgtgtggtctgtggcgacaaagcctccggccgtcactatggggctgtcagttgtgaaggttgcaaaggtttcttcaaaaggagtgtgaggaaaaatttgacctacagctgccggagcaaccaagactgcatcatcaataaacatcaccggaaccgctgtcagttttgccggctgaaaaaatgcttagagatgggcatgaaaatggaatctgtgcagagtgaacggaagcccttcgatgtgcaacgggagaaaccaagcaattgtgctgcttcaactgagaaaatctatatccggaaagacctgagaagtcccctgatagctactcccacgtttgtggcagacaaagatggagcaagacaaacaggtcttcttgatccagggatgcttgtgaacatccagcagcctttgatacgtgaggatggtacagttctcctggccacggattctaaggctgaaacaagccagggagctctgggcacactggcaaatgtagtgacctcccttgccaacctaagtgaatctttgaacaacggtgacacttcagaaatccagccagaggaccagtctgcaagtgagataactcgggcatttgataccttagctaaagcacttaataccacagacagctcctcttctccaagcttggcagatgggatagacaccagtggaggagggagcatccacgtcatcagcagagaccagtcgacacccatcattgaggttgaaggccccctcctttcagacacacacgtcacatttaagctaacaatgcccagtccaatgccagagtacctcaacgtgcactacatctgtgagtctgcatcccgtctgcttttcctctcaatgcactgggctcggtcaatcccagcctttcaggcacttgggcaggactgcaacaccagccttgtgcgggcctgctggaatgagctcttcaccctcggcctggcccagtgtgcccaggtcatgagtctctccaccatcctggctgccattgtcaaccacctgcagaacagcatccaggaagataaactttctggtgaccggataaagcaagtcatggagcacatctggaagctgcaggagttctgtaacagcatggcgaagctggatatagatggctatgagtatgcataccttaaagctatagttctctttagccccgatcatccaggtttgaccagcacaagccagattgaaaaattccaagaaaaggcacagatggagttgcaggactatgttcagaaaacctactcagaagacacctaccgattggcccggatcctcgttcgcctgccggcactcaggctgatgagctccaacataacagaagaacttttttttactggtctcattggcaatgtttcgatagacagcataatcccctacatcctcaagatggagacagcagagtataatggccagatcaccggagccagtctatagcgcaaaccacacacctgccaaggagcaacagaatccttccaggaccgttcacatacaaagaaaagtagtggtattttggtatgtgcaaatatttccatatgttagccatttcctgtctggtttctccttatctgttaatcccagacaatagcaattaaaagactagtaggatcctttcctgacataagaaatgttttaatgccttttgatgaagcagcagattttggaacaatcttttaactcaatttgtatttagaaattctcaaagggcaaaaaacaaaaaaaaaggttttataatgtcagagactagtattaaagaaaactgaaagaacctg

SEQ ID NO: 1394 - protein, 615 aa, Homo sapiens
MTSPSPRIQIISTDSAVASPQRIQGSEPASGPLSVFTSLNKEKIVTDQQTGQKIQIVTAVDASGSPKQQFILTSPDGAGTGKVILASPETSSAKQLIFTTSDNLVPGRIQIVTDSASVERLLGKTDVQRPQVVEYCVVCGDKASGRHYGAVSCEGCKGFFKRSVRKNLTYSCRSNQDCIINKHHRNRCQFCRLKKCLEMGMKMESVQSERKPFDVQREKPSNCAASTEKIYIRKDLRSPLIATPTFVADKDGARQTGLLDPGMLVNIQQPLIREDGTVLLATDSKAETSQGALGTLANVVTSLANLSESLNNGDTSEIQPEDQSASEITRAFDTLAKALNTTDSSSSPSLADGIDTSGGGSIHVISRDQSTPIIEVEGPLLSDTHVTFKLTMPSPMPEYLNVHYICESASRLLFLSMHWARSIPAFQALGQDCNTSLVRACWNELFTLGLAQCAQVMSLSTILAAIVNHLQNSIQEDKLSGDRIKQVMEHIWKLQEFCNSMAKLDIDGYEYAYLKAIVLFSPDHPGLTSTSQIEKFQEKAQMELQDYVQKTYSEDTYRLARILVRLPALRLMSSNITEELFFTGLIGNVSIDSIIPYILKMETAEYNGQITGASL

SEQ ID NO: 1395 - DNA, 2125 bp, Homo sapiens
gagctccaggcgcacatccgcagtcagccacctcgcgcgcgcctccaggagcaaggatggagaggctggtgatcaggatgcccttctctcatctgtctacctacagcctggtttgggtcatggcagcagtggtgctgtgcacagcacaagtgcaagtggtgacccaggatgaaagagagcagctgtacacacctgcttccttaaaatgctctctgcaaaatgcccaggaagccctcattgtgacatggcagaaaaagaaagctgtaagcccagaaaacatggtcaccttcagcgagaaccatggggtggtgatccagcctgcctataaggacaagataaacattacccagctgggactccaaaactcaaccatcaccttctggaatatcaccctggaggatgaagggtgttacatgtgtctcttcaatacctttggttttgggaagatctcaggaacggcctgcctcaccgtctatgtacagcccatagtatcccttcactacaaattctctgaagaccacctaaatatcacttgctctgccactgcccgcccagcccccatggtcttctggaaggtccctcggtcagggattgaaaatagtacagtgactctgtctcacccaaatgggaccacgtctgttaccagcatcctccatatcaaagaccctaagaatcaggtggggaaggaggtgatctgccaggtgctgcacctggggactgtgaccgactttaagcaaaccgtcaacaaaggctattggttttcagttccgctattgctaagcattgtttccctggtaattcttctcgtcctaatctcaatcttactgtactggaaacgtcaccggaatcaggaccgagagccctaaataagtcacacagcaccctgaaagtgattccctggtctacttgaatttgacacaagagaaaagcaggaggaaaaggggccattctccaaaggacctgaaagagcaaaagaggtgggagcgaaagccttaaggatcccacgactttttactgccatctgagctactcagtgtttgaatcccaagaggaagtcagtttacctctcaggtctgttgtaggacttgattttgtaaagcaatgccatgttatgtggttgaaagggcactggacttagttagtatcaggagcactgagctcacagactgacttgggctcctactggtggggacctctgttagtcactttacctcatccaaagtataaaggaattggaccaaataatttaccacatagctctaaaacttaatttaaaatgtaattccagaaaaaaaaagggaataagcaaagggggaagaattgaaagagagagagaagaaagaatacagagagcttaccttttgcctttctgttgatgttacatctcttcttcctatgttcttaggtctatgagtctgtttccccatcatttggtatctagtccagttcctgcttactgctttgctaatagctggccttgctagaatccttggtttcactgctgttcttcatgtgcttctatgagatttactccaacacaaataggactgaatttattgtgaagtaacattggcaatcttaacttattcatttaacttatttttatagctagataaatattgttagtcttagacaatagctcacattttttgagaagcatgccctccctgtccatttgtcttataacatgacccagccctattttacgtcattctaaattcagcctcatataatgaaaatacattatgaaaacagatgtttaggagatttcctgtatagcagtcagccaattcatatgctttgtctctgctggcttctttttccatgcgttaacttttcccaatagcagaggaggcaaatatgagcatacaatccctttgttctaaagatattgttccagctagtggaatgatgttgaatctttaataaccataattagttgctttttcagtatcttctgctttgtctgtgtctatccagtggcctaggaattaaagtgtaagttgttttcgctgttaaattggatatttatatatatatatagcaagattttcatgtgttatttaattctgtattgtttcttatatttgtagtaaaatattgaacaattaaaagtgttgactcc

SEQ ID NO: 1396 - protein, 269 aa, Homo sapiens
MERLVIRMPFSHLSTYSLVWVMAAVVLCTAQVQVVTQDEREQLYTPASLKCSLQNAQEALIVTWQKKKAVSPENMVTFSENHGVVIQPAYKDKINITQLGLQNSTITFWNITLEDEGCYMCLFNTFGFGKISGTACLTVYVQPIVSLHYKFSEDHLNITCSATARPAPMVFWKVPRSGIENSTVTLSHPNGTTSVTSILHIKDPKNQVGKEVICQVLHLGTVTDFKQTVNKGYWFSVPLLLSIVSLVILLVLISILLYWKRHRNQDREP

SEQ ID NO: 1397 - DNA, 5761 bp, Homo sapiens
gtgaccacggaccaggcagtctctaatgaataggcaaggccacaacctccattctcccagaaaagaagaaatgctcatctgaaattcatcacctctctggagtcttcaaactgaccaagcattgaaaagaacacagtttcagaaaacagtttccagtgcctctggccttcctactgaaagcagacacagagtgcatgaagaccgttcaaatatgtcagggacctcctcccatgagtccttctatgactccctctcagacatgcaggaagaaagcaagaatactgacttcttcccgggcctttctgctttcctcagccaggaagagataaacaagagtcttgacctggcccggagagccatagccgactccgaaacagaagattttgactcggaaaaggagatctcgcagattttcagtacttctcctgcaagcctctgtgaacatccttcccataaggagaccaaattgggtgaacacgcctcgaggagacctcaggataacaggtcaacacctgtccagcctctggcagagaaacaaactaagagtatctcttcacctgtttcaaagaggaaacctgccatgtcacccctgctcaccaggcccagctacatccggagcctccgaaaggctgaaaagcgtggtgcaaaaactcccagcacaaacgtaaagcccaaaacgccacatcaaagaaagggtggcccccagagccagctgtgtgacaaggcagctaatttaattgaggagctaacatccatatttaaagccgcaaagccaagaaacagaagcccaaatggggagtcctcgtcaccagacagtgggtacctgtctcctaaaaatcagccgtcagccctgctgagtgcctcagccagccagagccctatggaagaccaaggggagatggaaagagaggtcaagtcccctggggccaggcattgctaccaggacaaccaggacttggcagtgccacacaaccgcaagtctcacccacagccccacagcgccctccacttcccagctgcacctcgattcatccaaaagctgaggagccaagaagtagcagaagggagccgagtttatctggagtgtagagtcactggaaaccccactcctcgagtcagatggttctgtgaagggaaagaactgcacaacactcctgatattcaaatccactgtgagggaggggacctccataccctgatcatagcagaggcctttgaggacgacacaggtcgctacacctgtttggctacgaatcccagcggctcagacacaacatctgctgaggtgttcattgaaggtgccagttcaacagattctgacagtgaaagtttagctttcaaatcaagagctggagctatgccacaagctcaaaagaaaacaacttctgtttccttgacaataggatcatcatctccaaagacaggggtgaccacagctgtgattcaaccactgtctgtccctgtgcaacaggttcacagtccaacttcatatctctgccgacctgatggaaccactactgcctactttcctcctgtttttacaaaggaactgcaaaacacagccgtggcggaaggccaggtggtggttctggagtgccgggtccgtggggcaccccctctgcaggtccagtggtttcggcaagggagtgaaatccaagactctccagatttccgaattctacagaaaaaacctagatctacagctgaacctgaggagatttgcaccctagttatcgctgagactttccctgaagatgcagggatctttacatgttcagcaagaaatgattatggatcagcaaccagcactgcccagctggttgtcacctcagccaacactgaaaactgtagttacgagtcaatgggagaatccaacaatgaccacttccaacactttccacctccccctccaatcttggagacaagttccttggagttggcttcaaagaaaccatctgagatccagcaggtgaacaaccctgagttaggcctgagcagggcagcccttcaaatgcaattcaatgctgctgagagggaaacgaacggagtccatcccagccgtggagtaaatggactgattaacggcaaagctaacagtaataaatctcttccaacaccagctgtcctgctttcacccactaaggagccaccacctctgcttgccaaaccaaaactaggatttccaaagaaggccagtagaactgctagaatagcctccgatgaggaaattcaaggcacaaaggatgctgttattcaagacctggaacgaaaacttcgcttcaaggaggacctcctgaacaatggccagccgaggttaacatacgaagaaagaatggctcgtcgactgctaggtgctgacagtgcaactgtctttaatattcaggagccagaagaggaaacagctaatcaggaatacaaagtctccagctgtgaacagagactcatcagtgaaatagagtacaggctagaaaggtctcctgtggatgaatcaggtgatgaagttcagtatggagatgtgcctgtggaaaatggaatggcaccattctttgagatgaagctgaaacattacaagatctttgagggaatgccagtaactttcacatgtagagtggctggaaatccaaagccaaagatctattggtttaaagatgggaagcagatctctccaaagagtgatcactacaccattcaaagagatctcgatgggacctgctccctccataccacagcctccaccctagatgatgatgggaattatacaattatggctgcaaaccctcagggccgcatcagttgtactggacggctaatggtacaggctgtcaaccaaagaggtcgaagtccccggtctccctcaggccatcctcatgtcagaaggcctcgttctagatcaagggacagtggagacgaaaatgaaccaattcaggagcgattcttcagacctcacttcttgcaggctcctggagatctgactgttcaagaaggaaaactctgcagaatggactgcaaagtcagtgggttaccaaccccagatctaagctggcaactagatggaaagcccgtacgccctgacagtgctcacaagatgctggtgcgtgagaacggggtgcactctctgatcatagagccagtcacgtcacgtgatgccggcatctacacatgtatagctaccaaccgagcaggacagaactcattcagcctggagcttgtggttgctgctaaagaagcacacaaaccccctgtgtttattgagaagctccaaaacacaggagttgctgatgggtacccagtgcggctggaatgtcgtgtattgggagtgccaccacctcagatattttggaagaaagaaaatgaatcactcactcacagcactgaccgagtgagcatgcaccaggacaaccacggctacatctgcctgctcattcagggagccacaaaagaagatgctgggtggtatactgtgtcagccaagaatgaagcagggattgtgtcctgtactgccaggctggacgtttacatttctcgacattaatagtgaaccacaccaggagaacaaatacccaacccagtggcatcagcagtcacagagcaccaagccaaaaaaagtacggccctcagccagtcgctatgcagcactttcggaccagggactagacatcaaagcagcgttccaacctgaggccaacccatctcacctgacactgaatactgccttggtagaaagtgaggacctgtaatccagcattcttgttaaagctgaaacactgaaacagccattgccttgaccaacatattcctttgtcacattatgtaaaaggcagaaacatacctttgactataagaaattaaaaaaaaaacaccaaaataatatttttcttacttgatataccaaacttagtttaagtagataatgctaatacaaatatacacattgcacagaaaatacacatttactgtccaatttaaaactttggaattgctgtgattaaagtgatcaaaatgccaaaatactaaaggaaatcaattgttcacaggtaactacaatttgtattatctacaagtgcctttaaacacaagatataggtgctgtgtagcctgatagtgtgaaatgtttaatgagggagttgtaccacaaacagtactacaatgattctgaagcacagtgtattcagacagatacagtgaaccaagtgcaatatgtaaggatgaaagaagaagagatgacaaagaaatccaagtaaatgccttgtctttgcaaatgtttttatattaaatcataaggaaggaactacttgccttaaatgttaatatcaaaagagttttctaacaaggttaataccttagttcttaacattttttttctttatgtgtagtgttttcatgctaccttggtaggaaacttatttacaaaccatattaaaaggctaatttaaatataaataatataaagtgctctgaataaagcagaaatatattacagttcattccacagaaagcatccaaaccacccaaatgaccaaggcatatatagtatttggaggaatcaggggtttggaaggagtagggaggagaatgaaggaaaatgcaaccagcatgattatagtgtgttcatttagataaaagtagaaggcacaggagaggtagcaaaggccaggcttttctttggttttcttcaaacataggtgaaaaaaacactgccattcacaagtcaaggaacccagggccagctggaagtgtggagcacacatgctgtggagcacacatgctgtggagattgcagtgtgtctgaggtttgtgtagtagtggaagattttaggtatgtagagcaagttgaaaatggattgagactgcatggtggcataaatgagaaattgcctgtagcatctagtctacttgaaggaagtggagacataaggagagacaaaaacaggtttgtgccataaagtattttttcaaagacaccaagatgtggtaaatgaaaattattagttcacttccctgctgccatgaaactttgccttaagaaggtgctggattccaaggtttgtaaaggcatctcggtaaagactgctttttgaatgcatatgattttgcatcagctagactgagttgattctgaccagacttgatggttttaagtcggaaccgataaattttaaaaaggagaaaaaataatttgacctagtagtataaaacatgaggctttaatggtactttgctatgaaaagaaaacactgtattccttatgcaaaacacatgtatctttcattatttataagtggcctctcttagctcagttactcaattcatacgtagtattttttaaaataattttatatctgtgtaccaccccatatatttcatattactgtttcacatgtacagctttctacttctttgtaagaacaccaaccaaccaaggtttaagtgattaataggcttgagcaccgggtggcagatgttctatgcagtgtggttcaagtttctttgaccgcacttatatgcattgctaatatggaatttaagataccatacacagtctctcatggacctatctctattgtagaattatgacttatgtcttacttgccaaatttttctgaatgtgacctttttttgctgatttgctgggtttgggattaactagcattattttgccacctttatattgtatttataaaaaaaaaagtactatcaatcaatcatactactttggattgttgtgctggtgtaatgtggatttaacatcaataaatatttg

SEQ ID NO: 1398 - protein, 1106 aa, Homo sapiens
MSGTSSHESFYDSLSDMQEESKNTDFFPGLSAFLSQEEINKSLDLARRAIADSETEDFDSEKEISQIFSTSPASLCEHPSHKETKLGEHASRRPQDNRSTPVQPLAEKQTKSISSPVSKRKPAMSPLLTRPSYIRSLRKAEKRGAKTPSTNVKPKTPHQRKGGPQSQLCDKAANLIEELTSIFKAAKPRNRSPNGESSSPDSGYLSPKNQPSALLSASASQSPMEDQGEMEREVKSPGARHCYQDNQDLAVPHNRKSHPQPHSALHFPAAPRFIQKLRSQEVAEGSRVYLECRVTGNPTPRVRWFCEGKELHNTPDIQIHCEGGDLHTLIIAEAFEDDTGRYTCLATNPSGSDTTSAEVFIEGASSTDSDSESLAFKSRAGAMPQAQKKTTSVSLTIGSSSPKTGVTTAVIQPLSVPVQQVHSPTSYLCRPDGTTTAYFPPVFTKELQNTAVAEGQVVVLECRVRGAPPLQVQWFRQGSEIQDSPDFRILQKKPRSTAEPEEICTLVIAETFPEDAGIFTCSARNDYGSATSTAQLVVTSANTENCSYESMGESNNDHFQHFPPPPPILETSSLELASKKPSEIQQVNNPELGLSRAALQMQFNAAERETNGVHPSRGVNGLINGKANSNKSLPTPAVLLSPTKEPPPLLAKPKLGFPKKASRTARIASDEEIQGTKDAVIQDLERKLRFKEDLLNNGQPRLTYEERMARRLLGADSATVFNIQEPEEETANQEYKVSSCEQRLISEIEYRLERSPVDESGDEVQYGDVPVENGMAPFFEMKLKHYKIFEGMPVTFTCRVAGNPKPKIYWFKDGKQISPKSDHYTIQRDLDGTCSLHTTASTLDDDGNYTIMAANPQGRISCTGRLMVQAVNQRGRSPRSPSGHPHVRRPRSRSRDSGDENEPIQERFFRPHFLQAPGDLTVQEGKLCRMDCKVSGLPTPDLSWQLDGKPVRPDSAHKMLVRENGVHSLIIEPVTSRDAGIYTCIATNRAGQNSFSLELVVAAKEAHKPPVFIEKLQNTGVADGYPVRLECRVLGVPPPQIFWKKENESLTHSTDRVSMHQDNHGYICLLIQGATKEDAGWYTVSAKNEAGIVSCTARLDVYISRH

SEQ ID NO: 1399 - DNA, 2320 bp, Homo sapiens
aagaatactgacttcttcccgggcctttctgctttcctcagccaggaagagataaacaagagtcttgacctggcccggagagccatagccgactccgaaacagaagattttgactcggaaaaggagatctcgcagattttcagtacttctcctgcaagcctctgtgaacatccttcccataaggagaccaaattgggtgaacacgcctcgaggagacctcaggataacaggtcaacacctgtccagcctctggcagagaaacaaactaagagtatctcttcacctgtttcaaagaggaaacctgccatgtcacccctgctcaccaggcccagctacatccggagcctccgaaaggctgaaaagcgtggtgcaaaaactcccagcacaaacgtaaagcccaaaacgccacatcaaagaaagggtggcccccagagccagctgtgtgacaaggcagctaatttaattgaggagctaacatccatatttaaagccgcaaagccaagaaacagaagcccaaatggggagtcctcgtcaccagacagtgggtacctgtctcctaaaaatcagccgtcagccctgctgagtgcctcagccagccagagccctatggaagaccaaggggagatggaaagagaggtcaagtcccctggggccaggcattgctaccaggacaaccaggacttggcagtgccacacaaccgcaagtctcacccacagccccacagcgccctccacttcccagctgcacctcgattcatccaaaagctgaggagccaagaagtagcagaagggagccgagtttatctggagtgtagagtcactggaaaccccactcctcgagtcagatggttctgtgaagggaaagaactgcacaacactcctgatattcaaatccactgtgagggaggggacctccataccctgatcatagcagaggcctttgaggacgacacaggtcgctacacctgtttggctacgaatcccagcggctcagacacaacatctgctgaggtgttcattgaaggtgccagttcaacagattctgacagtgaaagtttagctttcaaatcaagagctggagctatgccacaagctcaaaagaaaacaacttctgtttccttgacaataggatcatcatctccaaagacaggggtgaccacagctgtgattcaaccactgtctgtccctgtgcaacaggttcacagtccaacttcatatctctgccgacctgatggaaccactactgcctactttcctcctgtttttacaaaggaactgcaaaacacagccgtggcggaaggccaggtggtggttctggagtgccgggtccgtggggcaccccctctgcaggtccagtggtttcggcaagggagtgaaatccaagactctccagatttccgaattctacagaaaaaacctagatctacagctgaacctgatgtcttatacgtctttgttcgagtgagatgccaccagatgaaaattcagtattacaacctggctcatctcatttcctcatggctttcttcatttttataatgtcagaaccatacaagctatgatgcttctttctctcaacaaaatgtgagcctcttgtcactgttggatgaacttttctttgagaagaaaagctgaggaacctgtgggacattgtattcaaattttatctagttaaaaaaaaattatctagcaaaaattgctgtgacatttcaatgcatgaggatcactaaaagaacatcctagtgtttattttttatttttctatttttgttctttaattctgtaatttttctaaatgttccacgtgaactatatacaggcatataccttatttatgcatggaagtattcctataaaatcatacacaatgaattctgctcaatcaactttgaaacacacaaaggaagcttgtaggaaaattggtcttactgagaattcctttagaaaatagtctttttacaaagcaagtgtttttttccttcatctaaatttcatgcatgcatttatttaaacataattatagggagcctaccatgtgtgagatgctaagaatatggccatgaacaaaaattgtttctgcactcagaggttatatttcagcgaaccagaaactaacaaactaattacacaataaattatttagcagggtgaggtggcacatagtcccagctacccaggaggctgaggcaggaggattgcttgagcccaggagttcaaggctgcagtgagctatgatcatgccacttcactccagcctgggcaacagtgaaacccctgtttctaaaaaaaagattttaaaaataaaataaaacaaaattgc

SEQ ID NO: 1400 - protein, 410 aa, Homo sapiens
MSPLLTRPSYIRSLRKAEKRGAKTPSTNVKPKTPHQRKGGPQSQLCDKAANLIEELTSIFKAAKPRNRSPNGESSSPDSGYLSPKNQPSALLSASASQSPMEDQGEMEREVKSPGARHCYQDNQDLAVPHNRKSHPQPHSALHFPAAPRFIQKLRSQEVAEGSRVYLECRVTGNPTPRVRWFCEGKELHNTPDIQIHCEGGDLHTLIIAEAFEDDTGRYTCLATNPSGSDTTSAEVFIEGASSTDSDSESLAFKSRAGAMPQAQKKTTSVSLTIGSSSPKTGVTTAVIQPLSVPVQQVHSPTSYLCRPDGTTTAYFPPVFTKELQNTAVAEGQVVVLECRVRGAPPLQVQWFRQGSEIQDSPDFRILQKKPRSTAEPDVLYVFVRVRCHQMKIQYYNLAHLISSWLSSFL

SEQ ID NO: 1401 - DNA, 2920 bp, Homo sapiens
gagtcgtggccgctgcgccgccaggaggcttcccgggagccggcggggcccaggacctctcgagcgcagcaggcaaggggccggccttttggcagcgcggctgccagttaattttctccgttgcattctgcaaacgagatcgcattcagagcccagaagttgcaagctgggaataagcgagatctgaaagacccccaagaggagcttgtttgggagtgggggcagacggcgttttgcgcccaactgatggttctgtgaagggaaagaactgcacaacactcctgatattcaaatccactgtgagggaggggacctccataccctgatcatagcagaggcctttgaggacgacacaggtcgctacacctgtttggctacgaatcccagcggctcagacacaacatctgctgaggtgttcattgaaggtgccagttcaacagattctgacagtgaaagtttagctttcaaatcaagagctggagctatgccacaagctcaaaagaaaacaacttctgtttccttgacaataggatcatcatctccaaagacaggggtgaccacagctgtgattcaaccactgtctgtccctgtgcaacaggttcacagtccaacttcatatctctgccgacctgatggaaccactactgcctactttcctcctgtttttacaaaggaactgcaaaacacagccgtggcggaaggccaggtggtggttctggagtgccgggtccgtggggcaccccctctgcaggtccagtggtttcggcaagggagtgaaatccaagactctccagatttccgaattctacagaaaaaacctagatctacagctgaacctgaggagatttgcaccctagttatcgctgagactttccctgaagatgcagggatctttacatgttcagcaagaaatgattatggatcagcaaccagcactgcccagctggttgtcacctcagccaacactgaaaactgtagttacgagtcaatgggagaatccaacaatgaccacttccaacactttccacctccccctccaatcttggagacaagttccttggagttggcttcaaagaaaccatctgagatccagcaggtgaacaaccctgagttaggcctgagcagggcagcccttcaaatgcaattcaatgctgctgagagggaaacgaacggagtccatcccagccgtggagtaaatggactgattaacggcaaagctaacagtaataaatctcttccaacaccagctgtcctgctttcacccactaaggagccaccacctctgcttgccaaaccaaaactaggatttccaaagaaggccagtagaactgctagaatagcctccgatgaggaaattcaaggcacaaaggatgctgttattcaagacctggaacgaaaacttcgcttcaaggaggacctcctgaacaatggccagccgaggttaacatacgaagaaagaatggctcgtcgactgctaggtgctgacagtgcaactgtctttaatattcaggagccagaagaggaaacagctaatcaggaatacaaagtctccagctgtgaacagagactcatcagtgaaatagagtacaggctagaaaggtctcctgtggatgaatcaggtgatgaagttcagtatggagatgtgcctgtggaaaatggaatggcaccattctttgagatgaagctgaaacattacaagatctttgagggaatgccagtaactttcacatgtagagtggctggaaatccaaagccaaagatctattggtttaaagatgggaagcagatctctccaaagagtgatcactacaccattcaaagagatctcgatgggacctgctccctccataccacagcctccaccctagatgatgatgggaattatacaattatggctgcaaaccctcagggccgcatcagttgtactggacggctaatggtacaggctgtcaaccaaagaggtcgaagtccccggtctccctcaggccatcctcatgtcagaaggcctcgttctagatcaagggacagtggagacgaaaatgaaccaattcaggagcgattcttcagacctcacttcttgcaggctcctggagatctgactgttcaagaaggaaaactctgcagaatggactgcaaagtcagtgggttaccaaccccagatctaagctggcaactagatggaaagcccgtacgccctgacagtgctcacaagatgctggtgcgtgagaacggggtgcactctctgatcatagagccagtcacgtcacgtgatgccggcatctacacatgtatagctaccaaccgagcaggacagaactcattcagcctggagcttgtggttgctgctaaagaagcacacaaaccccctgtgtttattgagaagctccaaaacacaggagttgctgatgggtacccagtgcggctggaatgtcgtgtattgggagtgccaccacctcagatattttggaagaaagaaaatgaatcactcactcacagcactgaccgagtgagcatgcaccaggacaaccacggctacatctgcctgctcattcagggagccacaaaagaagatgctgggtggtatactgtgtcagccaagaatgaagcagggattgtgtcctgtactgccaggctggacgtttacacccagtggcatcagcagtcacagagcaccaagccaaaaaaagtacggccctcagccagtcgctatgcagcactttcggaccagggactagacatcaaagcagcgttccaacctgaggccaacccatctcacctgacactgaatactgccttggtagaaagtgaggacctgtaatccagcattcttgttaaagctgaaacactgaaacagccattgccttgaccaacatattcctttgtcacattatgtaaaaggcagaaacatacctttgactat

SEQ ID NO: 1402 - protein, 325 aa, Homo sapiens
MQFNAAERETNGVHPSRGVNGLINGKANSNKSLPTPAVLLSPTKEPPPLLAKPKLGFPKKASRTARIASDEEIQGTKDAVIQDLERKLRFKEDLLNNGQPRLTYEERMARRLLGADSATVFNIQEPEEETANQEYKVSSCEQRLISEIEYRLERSPVDESGDEVQYGDVPVENGMAPFFEMKLKHYKIFEGMPVTFTCRVAGNPKPKIYWFKDGKQISPKSDHYTIQRDLDGTCSLHTTASTLDDDGNYTIMAANPQGRISCTGRLMVQAVNQRGRSPRSPSGHPHVRRPRSRSRDSGDENEPIQERFFRPHFLQAPGDLTVQEG

SEQ ID NO: 1403 - DNA, 4349 bp, Homo sapiens
cctgagtcacccggcgggcgaggtataaagcccgatacctgccccgcgcccggtccgcggagcccgctgcagctcccgctcgctccggacgcggaatcgggcagcagcgggaggcggcccggagagccgagggaccctctgaagctccagcaactccagaaccaaatccgactggagcaggaggccggcgctcggcagcctccgccagccccgcgcagcgcgccgccctcgccccccttcccgccgccgcccgccttccccgagctcgcggcctgcacgccgcccgcgtccccggagcccatgagcgcgctggcctcccgctccgcccccgccatgcagtcctccggctccttcaactacgcgcgccccaagcagttcatcgccgcgcagaacctcgggcccgcgtcgggccacggcacgccggcctccagccccagctcgtccagcctcccgtcgcccatgtccccgacgccgaggcagttcggccgcgcccccgtgccgcccttcgcgcagcccttcggcgctgagcccgaggccccgtggggctcctcctcgccgtcgcccccgcccccgccacccccggtcttcagccccacggctgccttcccggtgcccgacgtgttcccactgccgccgccaccaccgccgctcccgagcccgggacaggcgtcccactgctcgtcgcctgccacccgcttcggccacagccagacgcccgcggccttcctcagcgctctgctgccctcgcagccgccgccggcggccgtcaacgccctggggctgcccaagggtgtcacccccgcaggatttccaaagaaggccagtagaactgctagaatagcctccgatgaggaaattcaaggcacaaaggatgctgttattcaagacctggaacgaaaacttcgcttcaaggaggacctcctgaacaatggccagccgaggttaacatacgaagaaagaatggctcgtcgactgctaggtgctgacagtgcaactgtctttaatattcaggagccagaagaggaaacagctaatcaggaatacaaagtctccagctgtgaacagagactcatcagtgaaatagagtacaggctagaaaggtctcctgtggatgaatcaggtgatgaagttcagtatggagatgtgcctgtggaaaatggaatggcaccattctttgagatgaagctgaaacattacaagatctttgagggaatgccagtaactttcacatgtagagtggctggaaatccaaagccaaagatctattggtttaaagatgggaagcagatctctccaaagagtgatcactacaccattcaaagagatctcgatgggacctgctccctccataccacagcctccaccctagatgatgatgggaattatacaattatggctgcaaaccctcagggccgcatcagttgtactggacggctaatggtacaggctgtcaaccaaagaggtcgaagtccccggtctccctcaggccatcctcatgtcagaaggcctcgttctagatcaagggacagtggagacgaaaatgaaccaattcaggagcgattcttcagacctcacttcttgcaggctcctggagatctgactgttcaagaaggaaaactctgcagaatggactgcaaagtcagtgggttaccaaccccagatctaagctggcaactagatggaaagcccgtacgccctgacagtgctcacaagatgctggtgcgtgagaacggggtgcactctctgatcatagagccagtcacgtcacgtgatgccggcatctacacatgtatagctaccaaccgagcaggacagaactcattcagcctggagcttgtggttgctgctaaagaagcacacaaaccccctgtgtttattgagaagctccaaaacacaggagttgctgatgggtacccagtgcggctggaatgtcgtgtattgggagtgccaccacctcagatattttggaagaaagaaaatgaatcactcactcacagcactgaccgagtgagcatgcaccaggacaaccacggctacatctgcctgctcattcagggagccacaaaagaagatgctgggtggtatactgtgtcagccaagaatgaagcagggattgtgtcctgtactgccaggctggacgtttacacccagtggcatcagcagtcacagagcaccaagccaaaaaaagtacggccctcagccagtcgctatgcagcactttcggaccagggactagacatcaaagcagcgttccaacctgaggccaacccatctcacctgacactgaatactgccttggtagaaagtgaggacctgtaatccagcattcttgttaaagctgaaacactgaaacagccattgccttgaccaacatattcctttgtcacattatgtaaaaggcagaaacatacctttgactataagaaattaaaaaaaaaacaccaaaataatatttttcttacttgatataccaaacttagtttaagtagataatgctaatacaaatatacacattgcacagaaaatacacatttactgtccaatttaaaactttggaattgctgtgattaaagtgatcaaaatgccaaaatactaaaggaaatcaattgttcacaggtaactacaatttgtattatctacaagtgcctttaaacacaagatataggtgctgtgtagcctgatagtgtgaaatgtttaatgagggagttgtaccacaaacagtactacaatgattctgaagcacagtgtattcagacagatacagtgaaccaagtgcaatatgtaaggatgaaagaagaagagatgacaaagaaatccaagtaaatgccttgtctttgcaaatgtttttatattaaatcataaggaaggaactacttgccttaaatgttaatatcaaaagagttttctaacaaggttaataccttagttcttaacattttttttctttatgtgtagtgttttcatgctaccttggtaggaaacttatttacaaaccatattaaaaggctaatttaaatataaataatataaagtgctctgaataaagcagaaatatattacagttcattccacagaaagcatccaaaccacccaaatgaccaaggcatatatagtatttggaggaatcaggggtttggaaggagtagggaggagaatgaaggaaaatgcaaccagcatgattatagtgtgttcatttagataaaagtagaaggcacaggagaggtagcaaaggccaggcttttctttggttttcttcaaacataggtgaaaaaaacactgccattcacaagtcaaggaacccagggccagctggaagtgtggagcacacatgctgtggagcacacatgctgtggagattgcagtgtgtctgaggtttgtgtagtagtggaagattttaggtatgtagagcaagttgaaaatggattgagactgcatggtggcataaatgagaaattgcctgtagcatctagtctacttgaaggaagtggagacataaggagagacaaaaacaggtttgtgccataaagtattttttcaaagacaccaagatgtggtaaatgaaaattattagttcacttccctgctgccatgaaactttgccttaagaaggtgctggattccaaggtttgtaaaggcatctcggtaaagactgctttttgaatgcatatgattttgcatcagctagactgagttgattctgaccagacttgatggttttaagtcggaaccgataaattttaaaaaggagaaaaaataatttgacctagtagtataaaacatgaggctttaatggtactttgctatgaaaagaaaacactgtattccttatgcaaaacacatgtatctttcattatttataagtggcctctcttagctcagttactcaattcatacgtagtattttttaaaataattttatatctgtgtaccaccccatatatttcatattactgtttcacatgtacagctttctacttctttgtaagaacaccaaccaaccaaggtttaagtgattaataggcttgagcaccgggtggcagatgttctatgcagtgtggttcaagtttctttgaccgcacttatatgcattgctaatatggaatttaagataccatacacagtctctcatggacctatctctattgtagaattatgacttatgtcttacttgccaaatttttctgaatgtgacctttttttgctgatttgctgggtttgggattaactagcattattttgccacctttatattgtatttataaaaaaaaaagtactatcaatcaatcatactactttggattgttgtgctggtgtaatgtggatttaacatcaataaatatttgacaaat

SEQ ID NO: 1404 - protein, 772 aa, Homo sapiens
PESPGGRGIKPDTCPAPGPRSPLQLPLAPDAESGSSGRRPGEPRDPLKLQQLQNQIRLEQEAGARQPPPAPRSAPPSPPFPPPPAFPELAACTPPASPEPMSALASRSAPAMQSSGSFNYARPKQFIAAQNLGPASGHGTPASSPSSSSLPSPMSPTPRQFGRAPVPPFAQPFGAEPEAPWGSSSPSPPPPPPPVFSPTAAFPVPDVFPLPPPPPPLPSPGQASHCSSPATRFGHSQTPAAFLSALLPSQPPPAAVNALGLPKGVTPAGFPKKASRTARIASDEEIQGTKDAVIQDLERKLRFKEDLLNNGQPRLTYEERMARRLLGADSATVFNIQEPEEETANQEYKVSSCEQRLISEIEYRLERSPVDESGDEVQYGDVPVENGMAPFFEMKLKHYKIFEGMPVTFTCRVAGNPKPKIYWFKDGKQISPKSDHYTIQRDLDGTCSLHTTASTLDDDGNYTIMAANPQGRISCTGRLMVQAVNQRGRSPRSPSGHPHVRRPRSRSRDSGDENEPIQERFFRPHFLQAPGDLTVQEGKLCRMDCKVSGLPTPDLSWQLDGKPVRPDSAHKMLVRENGVHSLIIEPVTSRDAGIYTCIATNRAGQNSFSLELVVAAKEAHKPPVFIEKLQNTGVADGYPVRLECRVLGVPPPQIFWKKENESLTHSTDRVSMHQDNHGYICLLIQGATKEDAGWYTVSAKNEAGIVSCTARLDVYTQWHQQSQSTKPKKVRPSASRYAALSDQGLDIKAAFQPEANPSHLTLNTALVESEDL

SEQ ID NO: 1405 - DNA, 2226 bp, Homo sapiens
agacacacccaggcagcccaccctgcccaggacctggggatgcggggcgggagagcgcggccggcgtgggagagctttatggggctgccccctcgatcgtctgcgaagtggggcgcggggcagtccctggaccggctctgctgtgctccgggcagtcgggggcttgcgggcgctccggggaggatgcgggcaccaccggctggacggtcgcagcctgcagggggccctggggacagcctgcctcatccccccggcgggctcgggccaggtggcagcgcctgggctcgccgcgcggaggcggcggcttctcgggctaggggcggcggcaggggcggccccgggatcacatgggcggaggcaggtccgggagccccgggcgggctctccccagagtcgggtagacggcagcgggagcggtggcgtctccccgccttccctccctcccgggcctgggcgcccagccggacaggtgagcggcagccaggtgagcgcgcccacctgcgcctctccgcgcggcccgccctccccggcgccgggctcctctccgcgcccctgtcggcgcggaaccctggcctcgtccgcggcccagctccctggagcctcgcatcagcgggggcgcccccgcgagctgcgctctccccggccggagcgctcctcctccagcccccagcccgcagggtactttgccctcggagcgaaggaggctccagaactggtagagccgggccatcgggctgggcacctccccgcggcgcccgcagcgcggagtccactgaccggctcaaaggtatggcgttgacggtggatgtggccgggccagcgccctggggcttccgtatcacagggggcagggatttccacacgcccatcatggtgactaaggtggccgagcggggcaaagccaaggacgctgacctccggcctggagacataatcgtggccatcaacggggaaagcgcggagggcatgctgcatgccgaggcccagagcaagatccgccagagcccctcgcccctgcggctgcagctggaccggtctcaggctacgtctccagggcagaccaatggggacagctccttggaagtgctggcgactcgcttccagggctccgtgaggacatacactgagagtcagtcctccttaaggtcctcctactccagcccaacctccctcagcccgagggccggcagccccttctcaccaccaccctctagcagctccctcactggagaggcagccatcagccgcagcttccagagtctggcatgttccccgggcctccccgctgctgaccgcctgtcctactcaggccgccctggaagccgacaggccggcctcggccgcgctggcgactcggcggtgctggtgctgccgccttccccgggccctcgttcctccaggcccagcatggactcggaagggggaagcctcctcctggacgaggactcggaagtcttcaagatgctgcaggaaaatcgcgagggacgggcggccccccgacagtccagctcctttcggctcttgcaggaagccctggaggctgaggagagaggtggcacgccagccttcttgcccagctcactgagcccccagtcctccctgcccgcctccagggccctggccacccctcccaagctccacacttgtgagaagtgcagtaccagcatcgcgaaccaggctgtgcgcatccaggagggccggtaccgccaccccggctgctacacctgtgccgactgtgggctgaacctgaagatgcgcgggcacttctgggtgggtgacgagctgtactgtgagaagcatgcccgccagcgctactccgcacctgccaccctcagctctcgggcctgagcccgccatgccctcagcctgcctcactgctgggccagggtcatgcctatataagttggcatggcagggacaatggtgggcagttgctcttacatgagctaagtttggagacctgaggcccctttgtcctcgctgggtgggccaaggtctgggacctgtcttggactgtgggagactcaccctcaccttgccaggcctctcccctgcaggactggcattgcactagtctgaggtggccactgcctttgatcaacctttgtgtgcgagggtctaagtagggtcgaacacagaagtgggaaggagaggggtgggccaggggctaatggtgtcactgtgtaaagtttttgacatactagctctataaatatatgaatatgg

SEQ ID NO: 1406 - protein, 352 aa, Homo sapiens
MALTVDVAGPAPWGFRITGGRDFHTPIMVTKVAERGKAKDADLRPGDIIVAINGESAEGMLHAEAQSKIRQSPSPLRLQLDRSQATSPGQTNGDSSLEVLATRFQGSVRTYTESQSSLRSSYSSPTSLSPRAGSPFSPPPSSSSLTGEAAISRSFQSLACSPGLPAADRLSYSGRPGSRQAGLGRAGDSAVLVLPPSPGPRSSRPSMDSEGGSLLLDEDSEVFKMLQENREGRAAPRQSSSFRLLQEALEAEERGGTPAFLPSSLSPQSSLPASRALATPPKLHTCEKCSTSIANQAVRIQEGRYRHPGCYTCADCGLNLKMRGHFWVGDELYCEKHARQRYSAPATLSSRA

SEQ ID NO: 1407 - DNA, 1717 bp, Homo sapiens
agagtcgggtagacggcagcgggagcggtggcgtctccccgccttccctccctcccgggcctgggcgcccagccggacaggtgagcggcagccaggtgagcgcgcccacctgcgcctctccgcgcggcccgccctccccggcgccgggctcctctccgcgcccctgtcggcgcggaaccctggcctcgtccgcggcccagctccctggagcctcgcatcagcgggggcgcccccgcgagctgcgctctccccggccggagcgctcctcctccagcccccagcccgcagggtactttgccctcggagcgaaggaggctccagaactggtagagccgggccatcgggctgggcacctccccgcggcgcccgcagcgcggagtccactgaccggctcaaaggtatggcgttgacggtggatgtggccgggccagcgccctggggcttccgtatcacagggggcagggatttccacacgcccatcatggtgactaaggtggccgagcggggcaaagccaaggacgctgacctccggcctggagacataatcgtggccatcaacggggaaagcgcggagggcatgctgcatgccgaggcccagagcaagatccgccagagcccctcgcccctgcggctgcagctggaccggtctcaggctacgtctccagggcagaccaatggggacagctccttggaagtgctggcgactcgcttccagggctccgtgaggacatacactgagagtcagtcctccttaaggtcctcctactccagcccaacctccctcagcccgagggccggcagccccttctcaccaccaccctctagcagctccctcactggagaggcagccatcagccgcagcttccagagtctggcatgttccccgggcctccccgctgctgaccgcctgtcctactcaggccgccctggaagccgacaggccggcctcggccgcgctggcgactcggcggtgctggtgctgccgccttccccgggccctcgttcctccaggcccagcatggactcggaagggggaagcctcctcctggacgaggactcggaagtcttcaagatgctgcaggaaaatcgcgagggacgggcgcccgacagtccagctcctttcggctcttgcaggaagccctggaggctgaggagagaggaaccaggctgtgcgcatccaggagggccggtaccgccaccccggctgctacacctgtgccgactgtgggctgaacctgaagatgcgcgggcacttctgggtgggtgacgagctgtactgtgagaagcatgcccgccagcgctactccgcacctgccaccctcagctctcgggcctgagcccgccatgccctcagcctgcctcactgctgggccagggtcatgcctatataagttggcatggcagggacaatggtgggcagttgctcttacatgagctaagtttggagacctgaggcccctttgtcctcgctgggtgggccaaggtctgggacctgtcttggactgtgggagactcaccctcaccttgccaggcctctcccctgcaggactggcattgcactagtctgaggtggccactgcctttgatcaacctttgtgtgcgagggtctaagtagggtcgaacacagaagtgggaaggagaggggtgggccaggggctaatggtgtcactgtgtaaagtttttgacatactagctctataaatatatgaatatggac

SEQ ID NO: 1408 - protein, 288 aa, Homo sapiens
MALTVDVAGPAPWGFRITGGRDFHTPIMVTKVAERGKAKDADLRPGDIIVAINGESAEGMLHAEAQSKIRQSPSPLRLQLDRSQATSPGQTNGDSSLEVLATRFQGSVRTYTESQSSLRSSYSSPTSLSPRAGSPFSPPPSSSSLTGEAAISRSFQSLACSPGLPAADRLSYSGRPGSRQAGLGRAGDSAVLVLPPSPGPRSSRPSMDSEGGSLLLDEDSEVFKMLQENREGRAPDSPAPFGSCRKPWRLRREEPGCAHPGGPVPPPRLLHLCRLWAEPEDARALLGG

SEQ ID NO: 1409 - DNA, 4611 bp, Homo sapiens
aagcccctgagtagctgctccgggagctgtggtgccctctccttctccctttggctcctctcctgctgccttacagtgcccccagagccggctaggggcatggacttcacctcctggtcctctcttcctcaggtatggcgttgacggtggatgtggccgggccagcgccctggggcttccgtatcacagggggcagggatttccacacgcccatcatggtgactaaggtggccgagcggggcaaagccaaggacgctgacctccggcctggagacataatcgtggccatcaacggggaaagcgcggagggcatgctgcatgccgaggcccagagcaagatccgccagagcccctcgcccctgcggctgcagctggaccggtctcaggctacgtctccagggcagaccaatggggacagctccttggaagtgctggcgactcgcttccagggctccgtgaggacatacactgagagtcagtcctccttaaggtcctcctactccagcccaacctccctcagcccgagggccggcagccccttctcaccaccaccctctagcagctccctcactggagaggcagccatcagccgcagcttccagagtctggcatgttccccgggcctccccgctgctgaccgcctgtcctactcaggccgccctggaagccgacaggccggcctcggccgcgctggcgactcggcggtgctggtgctgccgccttccccgggccctcgttcctccaggcccagcatggactcggaagggggaagcctcctcctggacgaggactcggaagtcttcaagatgctgcaggaaaatcgcgagggacgggcggccccccgacagtccagctcctttcggctcttgcaggaagccctggaggctgaggagagaggtggcacgccagccttcttgcccagctcactgagcccccagtcctccctgcccgcctccagggccctggccacccctcccaagctccacacttgtgagaagtgcagtaccagcatcgcgaaccaggctgtgcgcatccaggagggccggtaccgccaccccggctgctacacctgtgccgactgtgggctgaacctgaagatgcgcgggcacttctgggaggacgcttgtgctatggagggaatgagattgtcactggaagctttggaggggatggtggagggcgccaagcggagggacaggaggaagaccaggagacccatccagccaagctggtgagacaacctctgatcctgaggaccggccgcccaccaagggttgggcccccggggccaggttgatctaccgacaccttccacttctttcctgggagagactgctggcttcattggtgattgatttggaggggggaaaaagggcagggtggctcaggctttaggcccaggtactggggaggcctgaggagccctcctggagctcaggaggccgaggctgccttaagctgtgatcatgccactgcattccagcctgggagagagagaggacctgtctgttgaaaaaaacacaaaaacaaatgaatgcatgtggccagtgccaggtgagctgccctgggggttcactggagttgaggcaggggacagtagtctcccctgccagcctaggattttgggcgtcattcacccactacccctagtgctagtcccagaggatgctgcggagggggcagcctcagctctcttttcagagaagatcaaagctgggcttcccagggtgcctggctggtccctgccggcagctttgtgctctccggctctttgtgaaaggaatcttggcgcagatgtttgtgttgcctcctcaggcacctgtagatataatttacaccatgatatcattgtctcaccttttgcctgggtggctgcctgagaaaggtctttctttttatagaaaagatcaaggctgtctggcgcgggactccatgagccccaggcgctggtcagaaacggggtagtctctttggcgccacctagtgtccagtttggcccatggcggggcccattcacggggcaacactgggcttctgggcacagcgggaatacagaaagatacagcactcctcatgccttcctggaggtagaaggccagtggcagcgactgagctggcatgaatgaataagaggatgtggcactgagcgccaagggctaccttggaacgcaccgaggagcgtcccgtgagttcaaagcagtggccgtgatgcaaaaggagggctgggtcttggagacgtggagaagaggaatgctgagtgatggggtggctgctggggggatgcttagctcagagcagtggctgatggggacactgagataagatcggaggggagctgtcaatgccagaagtggtttgaacttccccttgaggctctagggacattttgttttgagacatggtcttgctctattgcccaggctggagtgcagtggtacaatcttagctcactgcagcctccacctcccaggctcaagagatcctcccacagcctcccaggtagctgggactacaggcgtgcaccaccacacccagctaatttttaagtttttttttttttttaagagatggggtctcactatgttgcccaggctggtctcgaacttcgggccccaagccatcctcccaccttggctttccaaagtgttgggattacaagcgtgagctaaccttgcccagcctctgggaacacttggaaggttttaagcagagaagtgacaggttggaaaagatggtttggattattgatatggacagattcccacctgtatgtagcacgccatgctgggccagcagtgtcataggagtggagggggataagtggggactggggacatgtgaaatgatgggcattccagtgaggcatcgaatgccttctgagggctttgtaggttccagctcaaatccccctctggctcttgttctttggtgtggcagccatctctcctcccaggggtcctgagggtttcagcaccagggttctctgcagccacacaatcagcccggctcgggagcaaactcccctggaagaacggagttatgagttggtcagcagaggaggctggggacaggcagtttttggtcttttacctctgatcttgtccccaacctaagccagctagctgcgtgctcccactccctctgccgcacgccgcccgtctatgttcccggactttgtccagtgcagtgccctcttcccttcctgcactgaggagattaactgaagtgacagattagagttagaagtggcccaaaggagcatctggtacaaccccctttggttagagaagggaaagtgacttttccaaagctgcacagctagacagtcataatggctaagctctgggggtgcttttgatgtgctagggatacttccaatgctttaactcacttaatcctcacaacccgagataggtactgttaccatcctctctgcagacgaggaaaccgaggaccaggaggttcagtaaatggtccaagtactcctagctagtaaggaatggatctacagcctgcctcccaggtttctggcttgtggggggcagagtttgtccctctgtcatcagaggcagccttccaggcacagctctggtcacctctggtcacaactggaggtcaccacagccctccccagcgctctgtaggctctcagctttgtgcttcctcccacgggtactagctccagctgagcttgcaggaaacccacttcctgaagccaggacttccccatgggaagtgcaggggccactgggcagcctgagggctgaccctgctcaggacactgtctgtctcaggaactcatggcagtggtttaccttgtcaggagtgcatggacgggctgcccctcccattccttcaagcatcactcagagagccctggcctggctctaggcttgggactgcggctgccacaggaagggggcatccccctactttgggtgttgggtcagatcctgcccccgtgcccgccagggctcaggttcctctgagctggtcctgggccaggacgcatctgcatggcggtggtggggaggaggggtgcgccatggcctggaggggagtgtgtgttggggtgtgtgtgtggaggttcttttgagtcacacacaaagcattgtgctgagacactgcattcctgctggctgggcttcctgtttccagatgcattcctgtcccagagtcaccacagagactgtttggaatcccgccccacattctccaaattcagggcgcgatctggcaaaggctccctcccccaccctcttactttggagggagtctgggctccctcctacccagggagggctggcagggctctggcacggccggggtgtgattccacacatcttcttggtcttgcataaggcagttcctggagacccagcactctggttctctctctgcctgtgagaagcggaatgggtactgtctaggaggactgggcagggtgggggcaacccagaggacccatggctagcagggaagggcctgggcttgaatgtgactctgttgagacatggccagcaattctggcacttggctgtcattcggctggcctgcgcagagattggctgtgggcctcagtttccccattttataaagttttaaaatctg

SEQ ID NO: 1410 - protein, 379 aa, Homo sapiens
GHGLHLLVLSSSGMALTVDVAGPAPWGFRITGGRDFHTPIMVTKVAERGKAKDADLRPGDIIVAINGESAEGMLHAEAQSKIRQSPSPLRLQLDRSQATSPGQTNGDSSLEVLATRFQGSVRTYTESQSSLRSSYSSPTSLSPRAGSPFSPPPSSSSLTGEAAISRSFQSLACSPGLPAADRLSYSGRPGSRQAGLGRAGDSAVLVLPPSPGPRSSRPSMDSEGGSLLLDEDSEVFKMLQENREGRAAPRQSSSFRLLQEALEAEERGGTPAFLPSSLSPQSSLPASRALATPPKLHTCEKCSTSIANQAVRIQEGRYRHPGCYTCADCGLNLKMRGHFWEDACAMEGMRLSLEALEGMVEGAKRRDRRKTRRPIQPSW

SEQ ID NO: 1411 - DNA, 5502 bp, Homo sapiens
gctctcgaggtgtctggaggctcagcgagcgccggacccaggaggcccaaggagctggaggtgaccctcaggcagcaagaaccccacggaagggcgtgagccctgcagacagctgtgcggcacctcgggctgggctcctgttaggaggaagtgcctgcacccaggcagcggctcagaggcagctgctccatgcagaactgaagctggttctgcagcagaaaggggagaggacacaggagcctggggtgcaggtgcctcccagcaacgccatggaggccaggagccggagtgccgaggagctgaggcgggcggagttggtggaaattatcgtggagacggaggcgcagaccggggtcagcggcatcaacgtagcgggcggcggcaaagagggaatcttcgttcgggagctgcgcgaggactcacccgccgccaggagcctcagcctgcaggaaggggaccagctgctgagtgcccgagtgttcttcgagaacttcaagtacgaggacgcactacgcctgctgcaatgcgccgagccttacaaagtctccttctgcctgaagcgcactgtgcccaccggggacctggctctgcggcccgggaccgtgtctggctacgagatcaagggcccgcgggccaaggtggccaagctggtacgcgtgcttagcccggccccggccctggactgccccagcgatccggtctctgcgccgtgagccccattccccgccatcgtgggccagccttgccctctgtcttgtcactaacccaagctaattccaccctctgccccttcctctctgccccaaactcttccccgggaagggggacagacccaccccagcccagggccctcacccacctcggagaggcgtccccaccatcggatccaggcttgctaggggtcctgaaccaggctacttcgaaccaggaaagccagattccagcctgagtgctggcccaattactgctgagtggccctggacaaagttgtttctctccctgggcctcagtttccccatctctagaatgaggatgttggggaaaatcccggatcaggatctagaagtcttgggtccccgtccctacactcctgttgactcatttggagatcctagatggctgcctgctttcctgggcactcatggtgaaatgacaggcaagaagtggggatgatgtttggggaacaagatacttgacccagcacatcccccgcctggtccaataccaggtggggctcttcctgtccactcccagcctcccactgtcccaccgcctcctgcctctctcctctctccccagaacatccagagtctgtcccctgtgaagaagaagaagatggtgcctggggctctgggggtccccgctgacctggcccctgttgacgtcgagttctcctttcccaagttctcccgcctgcgtcggggcctcaaagccgaggctgtcaagggtcctgtcccggctgcccctgcccgccggcgcctccagctgcctcggctgcgtgtacgagaagtggccgaagaggctcaggcagcccggctggccgccgccgctcctccccccaggaaagccaaggtggaggctgaggtggctgcaggagctcgtttcacagcccctcaggtggagctggttgggccgcggctgccaggggcggaggtgggtgtcccccaggtctcagcccccaaggctgccccctcagcagaggcagctggtggctttgccctccacctgccaacccttgggctcggagccccggctccgcctgctgtggaggccccagccgtgggaatccaggtcccccaggtggagctgcctgccttgccctcactgcccactctgcccacacttccctgcctagagacccgggaaggggctgtgtcggtagtggtgcccaccctggatgtggcagcaccgactgtgggggtggacctggccttgccgggtgcagaggtggaggcccggggagaggcacctgaggtggccctgaagatgccccgccttagttttccccgatttggggctcgagcaaaggaagttgctgaggccaaggtagccaaggtcagccctgaggccagggtgaaaggtcccagacttcgaatgcccacctttgggctttccctcttggagccccggcccgctgctcctgaagttgtagagagcaagctgaagctgcccaccatcaagatgccctcccttggcatcggagtgtcagggcccgaggtcaaggtgcccaagggacctgaagtgaagctccccaaggctcctgaggtcaagcttccaaaagtgcccgaggcagcccttccagaggttcgactcccagaggtggagctccccaaggtgtcagagatgaaactcccaaaggtgccagagatggctgtgccggaggtgcggcttccagaggtagagctgcccaaagtgtcagagatgaaactcccaaaggtgccagagatggctgtgccggaggtgcggcttccagaggtacagctgctgaaagtgtcggagatgaaactcccaaaggtgccagagatggctgtgccggaggtgcggcttccagaggtacagctgccgaaagtgtcagagatgaaactcccagaggtgtcagaggtggctgtgccagaggtgcggcttccagaggtgcagctgccgaaagtgccagagatgaaagtccctgagatgaagcttccaaaggtgcctgagatgaaacttcctgagatgaaactccctgaagtgcaactcccgaaggtgcccgagatggccgtgcccgatgtgcacctcccagaagtgcagcttccaaaagtcccagagatgaagctccctgagatgaaactccctgaggtgaaactcccgaaggtgcccgagatggctgtgcccgatgtgcacctcccggaagtgcagctcccgaaagtcccagagatgaaactccctaaaatgcctgagatggctgtgccagaggttcgactccccgaggtgcagctgccaaaagtctcagagatgaaactccccaaggtgcctgaaatggccgtgcccgatgtgcacctcccagaggtgcagctgcccaaagtctgtgaaatgaaagtccctgacatgaagctcccagagataaaactccccaaggtgcctgagatggctgtgcccgatgtgcacctccccgaggtgcagctgccgaaagtgtcagagattcggctgccggaaatgcaagtgccgaaggttcccgacgtgcatcttccgaaggcaccagaggtgaagctgcccagggctccggaggtgcagctaaaggccaccaaggcagaacaggcagaagggatggaatttggcttcaagatgcccaagatgaccatgcccaagctagggagggcagagtccccatcacgtggcaagccaggcgaggcgggtgctgaggtctcagggaagctggtaacacttccctgtctgcagccagaggtggatggtgaggctcatgtgggtgtcccctctctcactctgccttcagtggagctagacctgccaggagcacttggcctgcaggggcaggtcccagccgctaaaatgggcaagggagagcgggtggagggccctgaggtggcagcaggggtcagggaagtgggcttccgagtgccctctgttgaaattgtcaccccacagctgcccgccgtggaaattgaggaagggcggctggagatgatagagacaaaagtcaagccctcttccaagttctccttacctaagtttggactctcggggccaaaggtggctaaggcagaggctgagggggctgggcgagctaccaagctgaaggtatccaaatttgccatctcactccccaaggctcgggtgggggctgaggctgaggccaaaggggctggggaggcaggcctgctgcctgccctcgatctgtccatcccacagctcagcctggatgcccacctgccctcaggcaaggtagaggtggcaggggccgacctcaagttcaaggggcccaggtttgctctccccaagtttggggtcagaggccgggacactgaggcagcagaactagtgccaggggtggctgagttggagggcaagggctggggctgggatgggagggtgaagatgcccaagctgaagatgccttcctttgggctggctcgagggaaggaagcagaagttcaaggtgatcgtgccagcccgggggaaaaggctgagtccaccgctgtgcagcttaagatccccgaggtggagctggtcacgctgggcgcccaggaggaagggagggcagagggggctgtggccgtcagtggaatgcagctgtcaggcctgaaggtgtccacagccgggcaggtggtcactgagggccatgacgcggggctgaggatgcctccgctgggcatctccctgccacaggtggagctgaccggctttggggaggcaggtaccccagggcagcaggctcagagtacagtcccttcagcagagggcacagcaggctacagggttcaggtgccccaggtgaccctgtctctgcctggagcccaggttgcaggtggtgagctgctggtgggtgagggtgtctttaagatgcccaccgtgacagtgccccagcttgagctggacgtggggctaagccgagaggcacaggcgggcgaggcggccacaggcgagggtgggctgaggctgaagttgcccacactgggggccagagctagggtggggggcgagggtgctgaggagcagcccccaggggccgagcgtaccttctgcctctcactgcccgacgtggagctctcgccatccgggggcaaccatgccgagtaccaggtggcagagggggagggagaggccggacacaagctcaaggtacggctgccccggtttggcctggtgcgggccaaggagggggccgaggagggtgagaaggccaagagccccaaactcaggctgccccgagtgggcttcagccaaagtgagatggtcactggggaagggtcccccagccccgaggaggaggaggaggaggaggaagagggcagtggggaaggggcctcgggtcgccggggccgggtccgggtccgcttgccacgtgtaggcctggcggccccttctaaagcctctcgggggcaggagggcgatgcagcccccaagtcccccgtcagagagaagtcacccaagttccgcttccccagggtgtccctaagccccaaggcccggagtgggagtggggaccaggaagagggtggattgcgggtgcggctgcccagcgtggggttttcagagacaggggctccaggcccggccaggatggagggggctcaggctgcggctgtctgaagcccctagtcagatggggatcccttcttgccttcctttctctaccccctcgctgttgtgtgtgtgataactagcactaaccctaagagggccgggaggtgggtgactgaccagggctggcagggaggcctgctcctgtctctctggcaggagtgcctgtaccccaccaagccatgtgaataaaataatctggaagta

SEQ ID NO: 1412 - protein, 147 aa, Homo sapiens
MEARSRSAEELRRAELVEIIVETEAQTGVSGINVAGGGKEGIFVRELREDSPAARSLSLQEGDQLLSARVFFENFKYEDALRLLQCAEPYKVSFCLKRTVPTGDLALRPGTVSGYEIKGPRAKVAKLVRVLSPAPALDCPSDPVSAP

SEQ ID NO: 1413 - DNA, 4785 bp, Homo sapiens
gccgctccagggcctcggagaggccagccggcccgcggagctgtttaaccgttccgcgggtcctagaaagccagctgccctcaggcttgcttaaaggggagacgccggagtgggtgtgccccgacgtcctgcgagggcagcgccgaggggcgtgtgccctgaaggcccgctgaacagccgcttttggccgggcgcggtggctcacgcctgtaatcccagcactttgggaggccgaggcgggaggatcccttgggcccaggaggagttcgagaccagcctgggcagtgtggcgagaccgtcccccacccccgtctctaaatatatataaacatatatatgtatatgagccactgttgagcgcaatggcgggctctgggcgaggtccggccctagagccccaacgcgacacctcgccgccctctgcaggagctgaggcgggcggagttggtggaaattatcgtggagacggaggcgcagaccggggtcagcggcatcaacgtagcgggcggcggcaaagagggaatcttcgttcgggagctgcgcgaggactcacccgccgccaggagcctcagcctgcaggaaggggaccagctgctgagtgcccgagtgttcttcgagaacttcaagtacgaggacgcactacgcctgctgcaatgcgccgagccttacaaagtctccttctgcctgaagcgcactgtgcccaccggggacctggctctgcggcccgggaccgtgtctggctacgagatcaagggcccgcgggccaaggtggccaagctgaacatccagagtctgtcccctgtgaagaagaagaagatggtgcctggggctctgggggtccccgctgacctggcccctgttgacgtcgagttctcctttcccaagttctcccgcctgcgtcggggcctcaaagccgaggctgtcaagggtcctgtcccggctgcccctgcccgccggcgcctccagctgcctcggctgcgtgtacgagaagtggccgaagaggctcaggcagcccggctggccgccgccgctcctccccccaggaaagccaaggtggaggctgaggtggctgcaggagctcgtttcacagcccctcaggtggagctggttgggccgcggctgccaggggcggaggtgggtgtcccccaggtctcagcccccaaggctgccccctcagcagaggcagctggtggctttgccctccacctgccaacccttgggctcggagccccggctccgcctgctgtggaggccccagccgtgggaatccaggtcccccaggtggagctgcctgccttgccctcactgcccactctgcccacacttccctgcctagagacccgggaaggggctgtgtcggtagtggtgcccaccctggatgtggcagcaccgactgtgggggtggacctggccttgccgggtgcagaggtggaggcccggggagaggcacctgaggtggccctgaagatgccccgccttagttttccccgatttggggctcgagcaaaggaagttgctgaggccaaggtagccaaggtcagccctgaggccagggtgaaaggtcccagacttcgaatgcccacctttgggctttccctcttggagccccggcccgctgctcctgaagttgtagagagcaagctgaagctgcccaccatcaagatgccctcccttggcatcggagtgtcagggcccgaggtcaaggtgcccaagggacctgaagtgaagctccccaaggctcctgaggtcaagcttccaaaagtgcccgaggcagcccttccagaggttcgactcccagaggtggagctccccaaggtgtcagagatgaaactcccaaaggtgccagagatggctgtgccggaggtgcggcttccagaggtagagctgcccaaagtgtcagagatgaaactcccaaaggtgccagagatggctgtgccggaggtgcggcttccagaggtacagctgctgaaagtgtcggagatgaaactcccaaaggtgccagagatggctgtgccggaggtgcggcttccagaggtacagctgccgaaagtgtcagagatgaaactcccagaggtgtcagaggtggctgtgccagaggtgcggcttccagaggtgcagctgccgaaagtgccagagatgaaagtccctgagatgaagcttccaaaggtgcctgagatgaaacttcctgagatgaaactccctgaagtgcaactcccgaaggtgcccgagatggccgtgcccgatgtgcacctcccagaagtgcagcttccaaaagtcccagagatgaagctccctgagatgaaactccctgaggtgaaactcccgaaggtgcccgagatggctgtgcccgatgtgcacctcccggaagtgcagctcccgaaagtcccagagatgaaactccctaaaatgcctgagatggctgtgccagaggttcgactccccgaggtgcagctgccaaaagtctcagagatgaaactccccaaggtgcctgaaatggccgtgcccgatgtgcacctcccagaggtgcagctgcccaaagtctgtgaaatgaaagtccctgacatgaagctcccagagataaaactccccaaggtgcctgagatggctgtgcccgatgtgcacctccccgaggtgcagctgccgaaagtgtcagagattcggctgccggaaatgcaagtgccgaaggttcccgacgtgcatcttccgaaggcaccagaggtgaagctgcccagggctccggaggtgcagctaaaggccaccaaggcagaacaggcagaagggatggaatttggcttcaagatgcccaagatgaccatgcccaagctagggagggcagagtccccatcacgtggcaagccaggcgaggcgggtgctgaggtctcagggaagctggtaacacttccctgtctgcagccagaggtggatggtgaggctcatgtgggtgtcccctctctcactctgccttcagtggagctagacctgccaggagcacttggcctgcaggggcaggtcccagccgctaaaatgggcaagggagagcgggtggagggccctgaggtggcagcaggggtcagggaagtgggcttccgagtgccctctgttgaaattgtcaccccacagctgcccgccgtggaaattgaggaagggcggctggagatgatagagacaaaagtcaagccctcttccaagttctccttacctaagtttggactctcggggccaaaggtggctaaggcagaggctgagggggctgggcgagctaccaagctgaaggtatccaaatttgccatctcactccccaaggctcgggtgggggctgaggctgaggccaaaggggctggggaggcaggcctgctgcctgccctcgatctgtccatcccacagctcagcctggatgcccacctgccctcaggcaaggtagaggtggcaggggccgacctcaagttcaaggggcccaggtttgctctccccaagtttggggtcagaggccgggacactgaggcagcagaactagtgccaggggtggctgagttggagggcaagggctggggctgggatgggagggtgaagatgcccaagctgaagatgccttcctttgggctggctcgagggaaggaagcagaagttcaaggtgatcgtgccagcccgggggaaaaggctgagtccaccgctgtgcagcttaagatccccgaggtggagctggtcacgctgggcgcccaggaggaagggagggcagagggggctgtggccgtcagtggaatgcagctgtcaggcctgaaggtgtccacagccgggcaggtggtcactgagggccatgacgcggggctgaggatgcctccgctgggcatctccctgccacaggtggagctgaccggctttggggaggcaggtaccccagggcagcaggctcagagtacagtcccttcagcagagggcacagcaggctacagggttcaggtgccccaggtgaccctgtctctgcctggagcccaggttgcaggtggtgagctgctggtgggtgagggtgtctttaagatgcccaccgtgacagtgccccagcttgagctggacgtggggctaagccgagaggcacaggcgggcgaggcggccacaggcgagggtgggctgaggctgaagttgcccacactgggggccagagctagggtggggggcgagggtgctgaggagcagcccccaggggccgagcgtaccttctgcctctcactgcccgacgtggagctctcgccatccgggggcaaccatgccgagtaccaggtggcagagggggagggagaggccggacacaagctcaaggtacggctgccccggtttggcctggtgcgggccaaggagggggccgaggagggtgagaaggccaagagccccaaactcaggctgccccgagtgggcttcagccaaagtgagatggtcactggggaagggtcccccagccccgaggaggaggaggaggaggaggaagagggcagtggggaaggggcctcgggtcgccggggccgggtccgggtccgcttgccacgtgtaggcctggcggccccttctaaagcctctcgggggcaggagggcgatgcagcccccaagtcccccgtcagagagaagtcacccaagttccgcttccccagggtgtccctaagccccaaggcccggagtgggagtggggaccaggaagagggtggattgcgggtgcggctgcccagcgtggggttttcagagacaggggctccaggcccggccaggatggagggggctcaggctgcggctgtctga

SEQ ID NO: 1414 - protein, 1460 aa, Homo sapiens
ATPRRPLQELRRAELVEIIVETEAQTGVSGINVAGGGKEGIFVRELREDSPAARSLSLQEGDQLLSARVFFENFKYEDALRLLQCAEPYKVSFCLKRTVPTGDLALRPGTVSGYEIKGPRAKVAKLNIQSLSPVKKKKMVPGALGVPADLAPVDVEFSFPKFSRLRRGLKAEAVKGPVPAAPARRRLQLPRLRVREVAEEAQAARLAAAAPPPRKAKVEAEVAAGARFTAPQVELVGPRLPGAEVGVPQVSAPKAAPSAEAAGGFALHLPTLGLGAPAPPAVEAPAVGIQVPQVELPALPSLPTLPTLPCLETREGAVSVVVPTLDVAAPTVGVDLALPGAEVEARGEAPEVALKMPRLSFPRFGARAKEVAEAKVAKVSPEARVKGPRLRMPTFGLSLLEPRPAAPEVVESKLKLPTIKMPSLGIGVSGPEVKVPKGPEVKLPKAPEVKLPKVPEAALPEVRLPEVELPKVSEMKLPKVPEMAVPEVRLPEVELPKVSEMKLPKVPEMAVPEVRLPEVQLLKVSEMKLPKVPEMAVPEVRLPEVQLPKVSEMKLPEVSEVAVPEVRLPEVQLPKVPEMKVPEMKLPKVPEMKLPEMKLPEVQLPKVPEMAVPDVHLPEVQLPKVPEMKLPEMKLPEVKLPKVPEMAVPDVHLPEVQLPKVPEMKLPKMPEMAVPEVRLPEVQLPKVSEMKLPKVPEMAVPDVHLPEVQLPKVCEMKVPDMKLPEIKLPKVPEMAVPDVHLPEVQLPKVSEIRLPEMQVPKVPDVHLPKAPEVKLPRAPEVQLKATKAEQAEGMEFGFKMPKMTMPKLGRAESPSRGKPGEAGAEVSGKLVTLPCLQPEVDGEAHVGVPSLTLPSVELDLPGALGLQGQVPAAKMGKGERVEGPEVAAGVREVGFRVPSVEIVTPQLPAVEIEEGRLEMIETKVKPSSKFSLPKFGLSGPKVAKAEAEGAGRATKLKVSKFAISLPKARVGAEAEAKGAGEAGLLPALDLSIPQLSLDAHLPSGKVEVAGADLKFKGPRFALPKFGVRGRDTEAAELVPGVAELEGKGWGWDGRVKMPKLKMPSFGLARGKEAEVQGDRASPGEKAESTAVQLKIPEVELVTLGAQEEGRAEGAVAVSGMQLSGLKVSTAGQVVTEGHDAGLRMPPLGISLPQVELTGFGEAGTPGQQAQSTVPSAEGTAGYRVQVPQVTLSLPGAQVAGGELLVGEGVFKMPTVTVPQLELDVGLSREAQAGEAATGEGGLRLKLPTLGARARVGGEGAEEQPPGAERTFCLSLPDVELSPSGGNHAEYQVAEGEGEAGHKLKVRLPRFGLVRAKEGAEEGEKAKSPKLRLPRVGFSQSEMVTGEGSPSPEEEEEEEEEGSGEGASGRRGRVRVRLPRVGLAAPSKASRGQEGDAAPKSPVREKSPKFRFPRVSLSPKARSGSGDQEEGGLRVRLPSVGFSETGAPGPARMEGAQAAAV

SEQ ID NO: 1415 - DNA, 4191 bp, Homo sapiens
gcgacacctcgccgccctctgcaggagctgaggcgggcggagttggtggaaattatcgtggagacggaggcgcagaccggggtcagcggcatcaacgtagcgggcggcggcaaagagggaatcttcgttcgggagctgcgcgaggactcacccgccgccaggagcctcagcctgcaggaaggggaccagctgctgagtgcccgagtgttcttcgagaacttcaagtacgaggacgcactacgcctgctgcaatgcgccgagccttacaaagtctccttctgcctgaagcgcactgtgcccaccggggacctggctctgcggcccgggaccgtgtctggctacgagatcaagggcccgcgggccaaggtggccaagctgaacatccagagtctgtcccctgtgaagaagaagaagatggtgcctggggctctgggggtccccgctgacctggcccctgttgacgtcgagttctcctttcccaagttctcccgcctgcgtcggggcctcaaagccgaggctgtcaagggtcctgtcccggctgcccctgcccgccggcgcctccagctgcctcggctgcgtgtacgagaagtggccgaagaggctcaggcagcccggctggccgccgccgctcctccccccaggaaagccaaggtggaggctgaggtggctgcaggagctcgtttcacagcccctcaggtggagctggttgggccgcggctgccaggggcggaggtgggtgtcccccaggtctcagcccccaaggctgccccctcagcagaggcagctggtggctttgccctccacctgccaacccttgggctcggagccccggctccgcctgctgtggaggccccagccgtgggaatccaggtcccccaggtggagctgcctgccttgccctcactgcccactctgcccacacttccctgcctagagacccgggaaggggctgtgtcggtagtggtgcccaccctggatgtggcagcaccgactgtgggggtggacctggccttgccgggtgcagaggtggaggcccggggagaggcacctgaggtggccctgaagatgccccgccttagttttccccgatttggggctcgagcaaaggaagttgctgaggccaaggtagccaaggtcagccctgaggccagggtgaaaggtcccagacttcgaatgcccacctttgggctttccctcttggagccccggcccgctgctcctgaagttgtagagagcaagctgaagctgcccaccatcaagatgccctcccttggcatcggagtgtcagggcccgaggtcaaggtgcccaagggacctgaagtgaagctccccaaggctcctgaggtcaagcttccaaaagtgcccgaggcagcccttccagaggttcgactcccagaggtggagctccccaaggtgtcagagatgaaactcccaaaggtgccagagatggctgtgccggaggtgcggcttccagaggtagagctgcccaaagtgtcagagatgaaactcccaaaggtgccagagatggctgtgccggaggtgcggcttccagaggtacagctgctgaaagtgtcggagatgaaactcccaaaggtgccagagatggctgtgccggaggtgcggcttccagaggtacagctgccgaaagtgtcagagatgaaactcccagaggtgtcagaggtggctgtgccagaggtgcggcttccagaggtgcagctgccgaaagtgccagagatgaaagtccctgagatgaagcttccaaaggtgcctgagatgaaacttcctgagatgaaactccctgaagtgcaactcccgaaggtgcccgagatggccgtgcccgatgtgcacctcccagaagtgcagcttccaaaagtcccagagatgaagctccctgagatgaaactccctgaggtgaaactcccgaaggtgcccgagatggctgtgcccgatgtgcacctcccggaagtgcagctcccgaaagtcccagagatgaaactccctaaaatgcctgagatggctgtgccagaggttcgactccccgaggtgcagctgccaaaagtctcagagatgaaactccccaaggtgcctgaaatggccgtgcccgatgtgcacctcccagaggtgcagctgcccaaagtctgtgaaatgaaagtccctgacatgaagctcccagagataaaactccccaaggtgcctgagatggctgtgcccgatgtgcacctccccgaggtgcagctgccgaaagtgtcagagattcggctgccggaaatgcaagtgccgaaggttcccgacgtgcatcttccgaaggcaccagaggtgaagctgcccagggctccggaggtgcagctaaaggccaccaaggcagaacaggcagaagggatggaatttggcttcaagatgcccaagatgaccatgcccaagctagggagggcagagtccccatcacgtggcaagccaggcgaggcgggtgctgaggtctcagggaagctggtaacacttccctgtctgcagccagaggtggatggtgaggctcatgtgggtgtcccctctctcactctgccttcagtggagctagacctgccaggagcacttggcctgcaggggcaggtcccagccgctaaaatgggcaagggagagcgggtggagggccctgaggtggcagcaggggtcagggaagtgggcttccgagtgccctctgttgaaattgtcaccccacagctgcccgccgtggaaattgaggaagggcggctggagatgatagagacaaaagtcaagccctcttccaagttctccttacctaagtttggactctcggggccaaaggtggctaaggcagaggctgagggggctgggcgagctaccaagctgaaggtatccaaatttgccatctcactccccaaggctcgggtgggggctgaggctgaggccaaaggggctggggaggcaggcctgctgcctgccctcgatctgtccatcccacagctcagcctggatgcccacctgccctcaggcaaggtagaggtggcaggggccgacctcaagttcaaggggcccaggtttgctctccccaagtttggggtcagaggccgggacactgaggcagcagaactagtgccaggggtggctgagttggagggcaagggctggggctgggatgggaggcttaagatccccgaggtggagctggtgtccacagccgggcaggtggtcactgagggccatgacgcggggctgaggatgcctccgctgggcatctccctgccacaggtggagctgaccggctttggggaggcaggtaccccagggcagcaggctcagagtacagtcccttcagcagagggcacagcaggctacagggttcaggtgccccaggtgaccctgtctctgcctggagcccaggttgcaggtggtgagctgctggtgggtgagggtgtctttaagatgcccaccgtgacagtgccccagcttgagctggacgtggggctaagccgagaggcacaggcgggcgaggcggccacaggcgagggtgggctgaggctgaagttgcccacactgggggccagagctagggtggggggcgagggtgctgaggagcagcccccaggggccgagcgtaccttctgcctctcactgcccgacgtggagctctcgccatccgggggcaaccatgccgagtaccaggtggcagagggggagggagaggccggacacaagctcaaggtacggctgccccggtttggcctggtgcgggccaaggagggggccgaggagggtgagaaggccaagagccccaaactcaggctgccccgagtgggcttcagccaaagtgagatggtcactggggaagggtcccccagccccgaggaggaggaggaggaggaggaagagggcagtggggaaggggcctcgggtcgccggggccgggtccgggtccgcttgccacgtgtaggcctggcggccccttctaaagcctctcgggggcaggagggcgatgcagcccccaagtcccccgtcagagagaagtcacccaagttccgcttccccagggtgtccctaagccccaaggcccggagtgggagtggggaccaggaagagggtggattgcgggtgcggctgcccagcgtggggttttcagagacaggggctccaggcccggccaggatggagggggctcaggctgcggctgtctga

SEQ ID NO: 1416 - protein, 1396 aa, Homo sapiens
ATPRRPLQELRRAELVEIIVETEAQTGVSGINVAGGGKEGIFVRELREDSPAARSLSLQEGDQLLSARVFFENFKYEDALRLLQCAEPYKVSFCLKRTVPTGDLALRPGTVSGYEIKGPRAKVAKLNIQSLSPVKKKKMVPGALGVPADLAPVDVEFSFPKFSRLRRGLKAEAVKGPVPAAPARRRLQLPRLRVREVAEEAQAARLAAAAPPPRKAKVEAEVAAGARFTAPQVELVGPRLPGAEVGVPQVSAPKAAPSAEAAGGFALHLPTLGLGAPAPPAVEAPAVGIQVPQVELPALPSLPTLPTLPCLETREGAVSVVVPTLDVAAPTVGVDLALPGAEVEARGEAPEVALKMPRLSFPRFGARAKEVAEAKVAKVSPEARVKGPRLRMPTFGLSLLEPRPAAPEVVESKLKLPTIKMPSLGIGVSGPEVKVPKGPEVKLPKAPEVKLPKVPEAALPEVRLPEVELPKVSEMKLPKVPEMAVPEVRLPEVELPKVSEMKLPKVPEMAVPEVRLPEVQLLKVSEMKLPKVPEMAVPEVRLPEVQLPKVSEMKLPEVSEVAVPEVRLPEVQLPKVPEMKVPEMKLPKVPEMKLPEMKLPEVQLPKVPEMAVPDVHLPEVQLPKVPEMKLPEMKLPEVKLPKVPEMAVPDVHLPEVQLPKVPEMKLPKMPEMAVPEVRLPEVQLPKVSEMKLPKVPEMAVPDVHLPEVQLPKVCEMKVPDMKLPEIKLPKVPEMAVPDVHLPEVQLPKVSEIRLPEMQVPKVPDVHLPKAPEVKLPRAPEVQLKATKAEQAEGMEFGFKMPKMTMPKLGRAESPSRGKPGEAGAEVSGKLVTLPCLQPEVDGEAHVGVPSLTLPSVELDLPGALGLQGQVPAAKMGKGERVEGPEVAAGVREVGFRVPSVEIVTPQLPAVEIEEGRLEMIETKVKPSSKFSLPKFGLSGPKVAKAEAEGAGRATKLKVSKFAISLPKARVGAEAEAKGAGEAGLLPALDLSIPQLSLDAHLPSGKVEVAGADLKFKGPRFALPKFGVRGRDTEAAELVPGVAELEGKGWGWDGRLKIPEVELVSTAGQVVTEGHDAGLRMPPLGISLPQVELTGFGEAGTPGQQAQSTVPSAEGTAGYRVQVPQVTLSLPGAQVAGGELLVGEGVFKMPTVTVPQLELDVGLSREAQAGEAATGEGGLRLKLPTLGARARVGGEGAEEQPPGAERTFCLSLPDVELSPSGGNHAEYQVAEGEGEAGHKLKVRLPRFGLVRAKEGAEEGEKAKSPKLRLPRVGFSQSEMVTGEGSPSPEEEEEEEEEGSGEGASGRRGRVRVRLPRVGLAAPSKASRGQEGDAAPKSPVREKSPKFRFPRVSLSPKARSGSGDQEEGGLRVRLPSVGFSETGAPGPARMEGAQAAAV

SEQ ID NO: 1417 - DNA, 3725 bp, Homo sapiens
gtgtgacgctgcggccgccgcggacctggggattaatgggaaaagttttggcaggagcgggagaattctgcggagcctgcgggacggcggcggtggcgccgtaggcagccgggacagtgttgtacagtgttttgggcatgcacgtgatactcacacagtggcttctgctcaccaacagatgaagacagatgcaccaacgaggctgatgggaaccaccctgtagaggtccatctgcgttcagacccagacgatgccagagctatgactgggcctgcaggtgtggcgccgaggggagatcagccatggagcagccacaggaggaagcccctgaggtccgggaagaggaggagaaagaggaagtggcagaggcagaaggagccccagagctcaatgggggaccacagcatgcacttccttccagcagctacacagacctctcccggagctcctcgccaccctcactgctggaccaactgcagatgggctgtgacggggcctcatgcggcagcctcaacatggagtgccgggtgtgcggggacaaggcatcgggcttccactacggtgttcatgcatgtgaggggtgcaagggcttcttccgtcgtacgatccgcatgaagctggagtacgagaagtgtgagcgcagctgcaagattcagaagaagaaccgcaacaagtgccagtactgccgcttccagaagtgcctggcactgggcatgtcacacaacgctatccgttttggtcggatgccggaggctgagaagaggaagctggtggcagggctgactgcaaacgaggggagccagtacaacccacaggtggccgacctgaaggccttctccaagcacatctacaatgcctacctgaaaaacttcaacatgaccaaaaagaaggcccgcagcatcctcaccggcaaagccagccacacggcgccctttgtgatccacgacatcgagacattgtggcaggcagagaaggggctggtgtggaagcagttggtgaatggcctgcctccctacaaggagatcagcgtgcacgtcttctaccgctgccagtgcaccacagtggagaccgtgcgggagctcactgagttcgccaagagcatccccagcttcagcagcctcttcctcaacgaccaggttacccttctcaagtatggcgtgcacgaggccatcttcgccatgctggcctctatcgtcaacaaggacgggctgctggtagccaacggcagtggctttgtcacccgtgagttcctgcgcagcctccgcaaacccttcagtgatatcattgagcctaagtttgaatttgctgtcaagttcaacgccctggaacttgatgacagtgacctggccctattcattgcggccatcattctgtgtggagaccggccaggcctcatgaacgttccacgggtggaggctatccaggacaccatcctgcgtgccctcgaattccacctgcaggccaaccaccctgatgcccagtacctcttccccaagctgctgcagaagatggctgacctgcggcaactggtcaccgagcacgcccagatgatgcagcggatcaagaagaccgaaaccgagacctcgctgcaccctctgctccaggagatctacaaggacatgtactaacggcggcacccaggcctccctgcagactccaatggggccagcactggaggggcccacccacatgacttttccattgaccagcccttgagcacccggcctggagcagcagagtcccacgatcgccctcagacacatgacacccacggcctctggctccctgtgccctctctcccgcttcctccagccagctctcttcctgtctttgttgtctccctctttctcagttcctctttcttttctaattcctgttgctctgtttcttcctttctgtaggtttctctcttcccttctcccttgccctccctttctctctccaccccccacgtctgtcctcctttcttattctgtgagatgttttgtattatttcaccagcagcatagaacaggacctctgcttttgcacaccttttccccaggagcagaagagagtggggcctgccctctgccccatcattgcacctgcaggcttaggtcctcacttctgtctcctgtcttcagagcaaaagacttgagccatccaaagaaacactaagctctctgggcctgggttccagggaaggctaagcatggcctggactgactgcagccccctatagtcatggggtccctgctgcaaaggacagtgggcaggaggccccaggctgagagccagatgcctccccaagactgtcattgcccctccgatgctgaggccacccactgacccaactgatcctgctccagcagcacacctcagccccactgacacccagtgtccttccatcttcacactggtttgccaggccaatgttgctgatggccccctgcactggccgctggacggcactctcccagcttggaagtaggcagggttccctccaggtgggcccccacctcactgaagaggagcaagtctcaagagaaggaggggggattggtggttggaggaagcagcacacccaattctgcccctaggactcggggtctgagtcctggggtcaggccagggagagctcggggcaggccttccgccagcactcccactgcccccctgcccagtagcagccgcccacattgtgtcagcatccagggccagggcctggcctcacatccccctgctcctttctctagctggctccacgggagttcaggccccactccccctgaagctgcccctccagcacacacacataagcactgaaatcactttacctgcaggctccatgcacctcccttccctccctgaggcaggtgagaacccagagagaggggcctgcaggtgagcaggcagggctgggccaggtctccggggaggcaggggtcctgcaggtcctggtgggtcagcccagcacctgctcccagtgggagcttcccgggataaactgagcctgttcattctgatgtccatttgtcccaatagctctactgccctccccttcccctttactcagcccagctggccacctagaagtctccctgcacagcctctagtgtccggggaccttgtgggaccagtcccacaccgctggtccctgccctcccctgctcccaggttgaggtgcgctcacctcagagcagggccaaagcacagctgggcatgccatgtctgagcggcgcagagccctccaggcctgcaggggcaaggggctggctggagtctcagagcacagaggtaggagaactggggttcaagcccaggcttcctgggtcctgcctggtcctccctcccaaggagccattctgtgtgtgactctgggtggaagtgcccagcccctgcccctacgggcgctgcagcctcccttccatgccccaggatcactctctgctggcaggattcttcccgctccccacctacccagctgatgggggttggggtgcttcctttcaggccaaggctatgaagggacagctgctgggacccacctccccctccccggccacatgccgcgtccctgccccgacccgggtctggtgctgaggatacagctcttctcagtgtctgaacaatctccaaaattgaaatgtatatttttgctaggagccccagcttcctgtgtttttaatataaatagtgtacacagactgacgaaactttaaataaatgggaattaaatattt

SEQ ID NO: 1418 - protein, 441 aa, Homo sapiens
MEQPQEEAPEVREEEEKEEVAEAEGAPELNGGPQHALPSSSYTDLSRSSSPPSLLDQLQMGCDGASCGSLNMECRVCGDKASGFHYGVHACEGCKGFFRRTIRMKLEYEKCERSCKIQKKNRNKCQYCRFQKCLALGMSHNAIRFGRMPEAEKRKLVAGLTANEGSQYNPQVADLKAFSKHIYNAYLKNFNMTKKKARSILTGKASHTAPFVIHDIETLWQAEKGLVWKQLVNGLPPYKEISVHVFYRCQCTTVETVRELTEFAKSIPSFSSLFLNDQVTLLKYGVHEAIFAMLASIVNKDGLLVANGSGFVTREFLRSLRKPFSDIIEPKFEFAVKFNALELDDSDLALFIAAIILCGDRPGLMNVPRVEAIQDTILRALEFHLQANHPDAQYLFPKLLQKMADLRQLVTEHAQMMQRIKKTETETSLHPLLQEIYKDMY

SEQ ID NO: 1419 - DNA, 3318 bp, Homo sapiens
gttttggcaggagcgggagaattctgcggagcctgcgggacggcggcggtggcgccgtaggcagccgggacagtgttgtacagtgttttgggcatgcacgtgatactcacacagtggcttctgctcaccaacagatgaagacagatgcaccaacgagggtctggaatggtctggagtggtctggaaagcagggtcagatacccctggaaaactgaagcccgtggagcagtgatctctacaggactgcttcaaggctgatgggaaccaccctgtagaggtccatctgcgttcagacccagacgatgccagagctatgactgggcctgcaggtgtggcgccgaggggagatcagccatggagcagccacaggaggaagcccctgaggtccgggaagaggaggagaaagaggaagtggcagaggcagaaggagccccagagctcaatgggggaccacagcatgcacttccttccagcagctacacagacctctcccggagctcctcgccaccctcactgctggaccaactgcagatgggctgtgacggggcctcatgcggcagcctcaacatggagtgccgggtgtgcggggacaaggcatcgggcttccactacggtgttcatgcatgtgaggggtgcaagggcttcttccgtcgtacgatccgcatgaagctggagtacgagaagtgtgagcgcagctgcaagattcagaagaagaaccgcaacaagtgccagtactgccgcttccagaagtgcctggcactgggcatgtcacacaacgctatccgttttggtcggatgccggaggctgagaagaggaagctggtggcagggctgactgcaaacgaggggagccagtacaacccacaggtggccgacctgaaggccttctccaagcacatctacaatgcctacctgaaaaacttcaacatgaccaaaaagaaggcccgcagcatcctcaccggcaaagccagccacacggcgccctttgtgatccacgacatcgagacattgtggcaggcagagaaggggctggtgtggaagcagttggtgaatggcctgcctccctacaaggagatcagcgtgcacgtcttctaccgctgccagtgcaccacagtggagaccgtgcgggagctcactgagttcgccaagagcatccccagcttcagcagcctcttcctcaacgaccaggttacccttctcaagtatggcgtgcacgaggccatcttcgccatgctggcctctatcgtcaacaaggacgggctgctggtagccaacggcagtggctttgtcacccgtgagttcctgcgcagcctccgcaaacccttcagtgatatcattgagcctaagtttgaatttgctgtcaagttcaacgccctggaacttgatgacagtgacctggccctattcattgcggccatcattctgtgtggagaccggccaggcctcatgaacgttccacgggtggaggctatccaggacaccatcctgcgtgccctcgaattccacctgcaggccaaccaccctgatgcccagtacctcttccccaagctgctgcagaagatggctgacctgcggcaactggtcaccgagcacgcccagatgatgcagcggatcaagaagaccgaaaccgagacctcgctgcaccctctgctccaggagatctacaaggacatgtactaacggcggcacccaggcctccctgcagactccaatggggccagcactggaggggcccacccacatgacttttccattgaccagctctcttcctgtctttgttgtctccctctttctcagttcctctttcttttctaattcctgttgctctgtttcttcctttctgtaggtttctctcttcccttctcccttgccctccctttctctctccaccccccacgtctgtcctcctttcttattctgtgagatgttttgtattatttcaccagcagcatagaacaggacctctgcttttgcacaccttttccccaggagcagaagagagtggggcctgccctctgccccatcattgcacctgcaggcttaggtcctcacttctgtctcctgtcttcagagcaaaagacttgagccatccaaagaaacactaagctctctgggcctgggttccagggaaggctaagcatggcctggactgactgcagccccctatagtcatggggtccctgctgcaaaggacagtgggcaggaggccccaggctgagagccagatgcctccccaagactgtcattgcccctccgatgctgaggccacccactgacccaactgatcctgctccagcagcacacctcagccccactgacacccagtgtccttccatcttcacactggtttgccaggccaatgttgctgatggcccctccagcacacacacataagcactgaaatcactttacctgcaggctccatgcacctcccttccctccctgaggcaggtgagaacccagagagaggggcctgcaggtgagcaggcagggctgggccaggtctccggggaggcaggggtcctgcaggtcctggtgggtcagcccagcacctgctcccagtgggagcttcccgggataaactgagcctgttcattctgatgtccatttgtcccaatagctctactgccctccccttcccctttactcagcccagctggccacctagaagtctccctgcacagcctctagtgtccggggaccttgtgggaccagtcccacaccgctggtccctgccctcccctgctcccaggttgaggtgcgctcacctcagagcagggccaaagcacagctgggcatgccatgtctgagcggcgcagagccctccaggcctgcaggggcaaggggctggctggagtctcagagcacagaggtaggagaactggggttcaagcccaggcttcctgggtcctgcctggtcctccctcccaaggagccattctgtgtgtgactctgggtggaagtgcccagcccctgcccctacgggcgctgcagcctcccttccatgccccaggatcactctctgctggcaggattcttcccgctccccacctacccagctgatgggggttggggtgcttcctttcaggccaaggctatgaagggacagctgctgggacccacctccccctccccggccacatgccgcgtccctgccccgacccgggtctggtgctgaggatacagctcttctcagtgtctgaacaatctccaaaattgaaatgtatatttttgctaggagccccagcttcctgtgtttttaatataaatagtgtacacagactgacgaaactttaaataaatgggaattaaatattt

SEQ ID NO: 1420 - protein, 441 aa, Homo sapiens; identical to SEQ ID NO: 1418

SEQ ID NO: 1421 - DNA, 1951 bp, Homo sapiens
gttttggcaggagcgggagaattctgcggagcctgcgggacggcggcggtggcgccgtaggcagccgggacagtgttgtacagtgttttgggcatgcacgtgatactcacacagtggcttctgctcaccaacagatgaagacagatgcaccaacgaggctgatgggaaccaccctgtagaggtccatctgcgttcagacccagacgatgccagagctatgactgggcctgcaggtgtggcgccgaggggagatcagccatggagcagccacaggaggaagcccctgaggtccgggaagaggaggagaaagaggaagtggcagaggcagaaggagccccagagctcaatgggggaccacagcatgcacttccttccagcagctacacagacctctcccggagctcctcgccaccctcactgctggaccaactgcagatgggctgtgacggggcctcatgcggcagcctcaacatggagtgccgggtgtgcggggacaaggcatcgggcttccactacggtgttcatgcatgtgaggggtgcaagggcttcttccgtcgtacgatccgcatgaagctggagtacgagaagtgtgagcgcagctgcaagattcagaagaagaaccgcaacaagtgccagtactgccgcttccagaagtgcctggcactgggcatgtcacacaacgctatccgttttggtcggatgccggaggctgagaagaggaagctggtggcagggctgactgcaaacgaggggagccagtacaacccacaggtggccgacctgaaggccttctccaagcacatctacaatgcctacctgaaaaacttcaacatgaccaaaaagaaggcccgcagcatcctcaccggcaaagccagccacacggcgccctttgtgatccacgacatcgagacattgtggcaggcagagaaggggctggtgtggaagcagttggtgaatggcctgcctccctacaaggagatcagcgtgcacgtcttctaccgctgccagtgcaccacagtggagaccgtgcgggagctcactgagttcgccaagagcatccccagcttcagcagcctcttcctcaacgaccaggttacccttctcaagtatggcgtgcacgaggccatcttcgccatgctggcctctatcgtcaacaaggacgggctgctggtagccaacggcagtggctttgtcacccgtgagttcctgcgcagcctccgcaaacccttcagtgatatcattgagcctaagtttgaatttgctgtcaagttcaacgccctggaacttgatgacagtgacctggccctattcattgcggccatcattctgtgtggaggtgagtgagagtggggcaggtgggctggcctggcacacccagtcgtcctgggggttggccctcactgcagggcactgtgcctgagctctgacagtgtggggaagtgtccctgtgatcttggcagtggaacatgcaaggcactgactgagcatgcaggatcagctccatctcattatgtacgtagatagaggtggagacaggaaaaagactaagccagacgtggtggctcacacctgtaatcccagcactttggcaggccgaggcgggtggatcacttgaggtcaggagttcgaaaccagcctggccaacatggtgaaaccccgtctctactaaaaatacaaaaaattagccagatgtggtggcacgcgcctgtaatcccagctacttgggaggctgagccaggagaatcgcttgaacccgagaggtggaggttgcagtgagccaaaatcccaccactgcactccagcctgggtgacagagtgagaccctgtctcaaaaaaaaggaaaaggactaacaggcagtatgctgtcatgttaatgtggggtggaaaaattgtctgcattttttctgcatttttaaaattccaacacaataaatacaataataactatgct

SEQ ID NO: 1422 - protein, 361 aa, Homo sapiens
MEQPQEEAPEVREEEEKEEVAEAEGAPELNGGPQHALPSSSYTDLSRSSSPPSLLDQLQMGCDGASCGSLNMECRVCGDKASGFHYGVHACEGCKGFFRRTIRMKLEYEKCERSCKIQKKNRNKCQYCRFQKCLALGMSHNAIRFGRMPEAEKRKLVAGLTANEGSQYNPQVADLKAFSKHIYNAYLKNFNMTKKKARSILTGKASHTAPFVIHDIETLWQAEKGLVWKQLVNGLPPYKEISVHVFYRCQCTTVETVRELTEFAKSIPSFSSLFLNDQVTLLKYGVHEAIFAMLASIVNKDGLLVANGSGFVTREFLRSLRKPFSDIIEPKFEFAVKFNALELDDSDLALFIAAIILCGGE

SEQ ID NO: 1423 - DNA, 4185 bp, Homo sapiens
ggccaaggcggcgaccggagcgcgatggcgggggcggcgggactcacggcagaagtgagctggaaggtcttggagcgaagagctcggaccaagcgctcaggctcagtttatgaacctcttaaaagcattaatcttccaagacctgataatgaaactctctgggataagttggaccattattacagaattgtcaagtcaacattgctgctgtatcaaagtccaactaccggtctctttcccactaaaacatgcggtggtgaccagaaggccaagatccaggacagcctatactgcgctgctggggcctgggctttggctcttgcatacaggcgaattgatgatgacaagggaaggacccatgagctggagcactcagctataaaatgcatgagaggaattctctactgctatatgcgtcaggccgataaggtccagcagtttaagcaggatccacgcccaacaacatgtcttcactctgttttcaatgtgcatacaggagatgagttgctttcctatgaggaatatggtcatcttcagataaatgcagtgtcactttatctcctttaccttgtggaaatgatttcctcaggactccagattatctacaacactgatgaggtctcttttattcaaaaccttgtattttgtgtggaaagagtttaccgtgtgcctgactttggtgtctgggaaagaggaagcaaatataataatggcagcacagagctacattcgagctcggttggtttagcaaaagcagctctagaagcaattaatggattcaacctttttggcaaccagggctgttcgtggtcagttatatttgtggatctcgatgctcacaatcgcaacaggcaaactttgtgctcgctgttacccagagaatcaagatcacataatacagatgctgccctgctcccctgcatcagttatcctgcatttgccctggatgatgaagttctttttagccagacacttgataaagtggttagaaaattaaaaggaaaatatggatttaaacgtttcttgagagatgggtatagaacatcattggaagatcccaacagatgctactacaagccagctgaaattaagctatttgatggcattgaatgtgaatttcccatatttttcctttatatgatgattgatggagtttttagaggcaatcctaagcaagtacaggaatatcaggatcttttgactccagtacttcatcataccacagaaggatatcctgttgtaccaaagtactattatgtgccagctgactttgtagaatatgaaaaaaataaccctggtagtcaaaaacgatttcctagcaactgtggccgtgatggaaaactgtttctttggggacaagcactttatatcatcgcaaaactcctggctgatgaacttattagtcctaaagacattgatcctgtccagcgctatgtcccactaaaggatcaacgtaacgtgagcatgaggttttccaatcagggcccactggaaaatgacttggtagttcatgtggcacttatagcagaaagccaaagacttcaagtttttctgaacacatatggtattcaaactcaaactcctcaacaagtagaacccattcagatatggcctcagcaggagcttgtgaaagcttatttgcagctgggtatcaatgaaaagttaggactctctggaaggccagacaggcccattggctgcctcgggacatcaaagatttatcgcattctaggaaagactgtggtttgttacccgattattttcgacctaagtgatttctacatgtctcaggatgttttcctgctgatagatgacataaagaatgcgctgcagttcattaaacaatattggaaaatgcatggacgtccacttttccttgttctcatccgggaagacaatataagaggtagccggttcaaccccatattagatatgctggcagcccttaaaaaaggaataattggaggagtcaaagttcatgtggatcgtctacagacactaatatctggagctgtggtagaacaacttgatttcctacgaatcagtgacacagaagagcttccagaatttaagagttttgaggaactagaacctcccaaacattcaaaagtcaaacggcaaagcagcacccctagtgctcctgaactgggacagcagccggatgtcaacattagtgaatggaaggacaaacccacccacgaaattcttcaaaaactgaatgattgcagttgtctggctagccaagccatcctgctgggtatactgctcaaaagagaaggccccaacttcatcacaaaggaaggtaccgtttctgatcacattgagagagtctatagaagagctggcagccaaaaactttggttggcggtgcgctacggggctgcatttacccagaaattttcttcctctatagccccacacattactacttttctggtacatgggaaacaggtaactctgggtgcctttgggcatgaagaagaagttatctctaatcctttgtctccaagagtgattcaaaacatcatctattataagtgtaacacccatgatgagagggaagcggtcattcagcaagaactggtcatccatattggctggatcatctccaataaccctgagttattcagtggcatgctgaaaatacgaatcgggtggatcatccatgccatggagtatgaacttcagatccgtggcggagacaagccagccttggacttgtatcagctgtcacctagtgaagttaaacagcttctgctggatattctgcagcctcaacagaatggaagatgttggctgaacaggcgtcagatcgatgggtctttgaatagaactcccaccgggttctatgaccgagtgtggcagattctggagcgcacgcccaatgggatcattgttgctgggaagcatttgcctcagcaaccaaccctgtcagatatgaccatgtatgagatgaatttctctctccttgttgaagacacgttgggaaatattgaccagccacagtacagacagatcgttgtagagttacttatggttgtatccattgtactggaaagaaaccccgagctagaatttcaagacaaagtagatctagacagactggtcaaagaagcatttaatgaatttcaaaaagatcagagtcggctaaaggaaattgaaaaacaagatgacatgacttccttttacaacactcctcccctgggaaaaagaggaacatgcagctatttgacaaaggcggtgatgaatctgctgctggaaggagaagtcaagccaaacaatgatgacccgtgtctgattagctagtggggaaggtgtaggaagctctgttgagacacatgttctgaagtgtgttgtgtttcatgttcaagcttaatcaaggcagccattaatatacgaactgagcatgctggggaggtgaatgccacatccttggcggggttatggacctcttgcatgtcatagccaatctaacggtaatggtaaatgcttttaatcaagcaggaaaaagttctcatgattatgccaactataatagtaatcctcactgagtgataaaaatagtttatgaattgaaaatttgccgctgcatgttgtatgatcaaatagttcatcaaaatgaatctttgctctttggactgaattcttaccatactgccattaaaataaatttgccaactagtaatgcatactggaaatcaaaagatactgaaagaatggtgaacttctcttagtggtattgtcatgctaaaagatgttaatatacatcataaaagcaaagtcagccagctgatattttggttctcaaaaactgcattattaataatattttagtatacagagctattctacagtttttacattgtaaacatgactgtggttttgtatttgctaaatataggggttggactaaaatataataaatctgtaccttatcaaacattttctttgagctcctgctaaaaataggacatgtctatgattgttcaaaaatatgttaaatttaggctcagcacagtagctcacacctgaaatcttagcacttcgggaggctgaggcaggtggatcacttgaggttaggagttcaagaccagcccagccaacatggtgaaaaccctgtctctactaaaaatacaaaaattagccaggcatgatggtgcatgcctttaaacccagctactgagg

SEQ ID NO: 1424 - protein, 1093 aa, Homo sapiens
MAGAAGLTAEVSWKVLERRARTKRSGSVYEPLKSINLPRPDNETLWDKLDHYYRIVKSTLLLYQSPTTGLFPTKTCGGDQKAKIQDSLYCAAGAWALALAYRRIDDDKGRTHELEHSAIKCMRGILYCYMRQADKVQQFKQDPRPTTCLHSVFNVHTGDELLSYEEYGHLQINAVSLYLLYLVEMISSGLQIIYNTDEVSFIQNLVFCVERVYRVPDFGVWERGSKYNNGSTELHSSSVGLAKAALEAINGFNLFGNQGCSWSVIFVDLDAHNRNRQTLCSLLPRESRSHNTDAALLPCISYPAFALDDEVLFSQTLDKVVRKLKGKYGFKRFLRDGYRTSLEDPNRCYYKPAEIKLFDGIECEFPIFFLYMMIDGVFRGNPKQVQEYQDLLTPVLHHTTEGYPVVPKYYYVPADFVEYEKNNPGSQKRFPSNCGRDGKLFLWGQALYIIAKLLADELISPKDIDPVQRYVPLKDQRNVSMRFSNQGPLENDLVVHVALIAESQRLQVFLNTYGIQTQTPQQVEPIQIWPQQELVKAYLQLGINEKLGLSGRPDRPIGCLGTSKIYRILGKTVVCYPIIFDLSDFYMSQDVFLLIDDIKNALQFIKQYWKMHGRPLFLVLIREDNIRGSRFNPILDMLAALKKGIIGGVKVHVDRLQTLISGAVVEQLDFLRISDTEELPEFKSFEELEPPKHSKVKRQSSTPSAPELGQQPDVNISEWKDKPTHEILQKLNDCSCLASQAILLGILLKREGPNFITKEGTVSDHIERVYRRAGSQKLWLAVRYGAAFTQKFSSSIAPHITTFLVHGKQVTLGAFGHEEEVISNPLSPRVIQNIIYYKCNTHDEREAVIQQELVIHIGWIISNNPELFSGMLKIRIGWIIHAMEYELQIRGGDKPALDLYQLSPSEVKQLLLDILQPQQNGRCWLNRRQIDGSLNRTPTGFYDRVWQILERTPNGIIVAGKHLPQQPTLSDMTMYEMNFSLLVEDTLGNIDQPQYRQIVVELLMVVSIVLERNPELEFQDKVDLDRLVKEAFNEFQKDQSRLKEIEKQDDMTSFYNTPPLGKRGTCSYLTKAVMNLLLEGEVKPNNDDPCLIS

SEQ ID NO: 1425 - DNA, 4189 bp, Homo sapiens
ggctcagtttatgaacctcttaaaagcattaatcttccaagacctgataatgaaactctctgggataagttggaccattattacagaattgtcaagtcaacattgctgctgtatcaaagtccaactaccggtctctttcccactaaaacatgcggtggtgaccagaaggccaagatccaggacagcctatactgcgctgctggggcctgggctttggctcttgcatacaggcgaattgatgatgacaagggaaggacccatgagctggagcactcagctataaaatgcatgagaggaattctctactgctatatgcgtcaggccgataaggtccagcagtttaagcaggatccacgcccaacaacatgtcttcactctgttttcaatgtgcatacaggagatgagttgctttcctatgaggaatatggtcatcttcagataaatgcagtgtcactttatctcctttaccttgtggaaatgatttcctcaggactccagattatctacaacactgatgaggtctcttttattcaaaaccttgtattttgtgtggaaagagtttaccgtgtgcctgactttggtgtctgggaaagaggaagcaaatataataatggcagcacagagctacattcgagctcggttggtttagcaaaagcagctctagaagcaattaatggattcaacctttttggcaaccagggctgttcgtggtcagttatatttgtggatctcgatgctcacaatcgcaacaggcaaactttgtgctcgctgttacccagagaatcaagatcacataatacagatgctgccctgctcccctgcatcagttatcctgcatttgccctggatgatgaagttctttttagccagacacttgataaagtggttagaaaattaaaaggaaaatatggatttaaacgtttcttgagagatgggtatagaacatcattggaagatcccaacagatgctactacaagccagctgaaattaagctatttgatggcattgaatgtgaatttcccatatttttcctttatatgatgattgatggagtttttagaggcaatcctaagcaagtacaggaatatcaggatcttttgactccagtacttcatcataccacagaaggatatcctgttgtaccaaagtactattatgtgccagctgactttgtagaatatgaaaaaaataaccctggtagtcaaaaacgatttcctagcaactgtggccgtgatggaaaactgtttctttggggacaagcactttatatcatcgcaaaactcctggctgatgaacttattagtcctaaagacattgatcctgtccagcgctatgtcccactaaaggatcaacgtaacgtgagcatgaggttttccaatcagggcccactggaaaatgacttggtagttcatgtggcacttatagcagaaagccaaagacttcaagtttttctgaacacatatggtattcaaactcaaactcctcaacaagtagaacccattcagatatggcctcagcaggagcttgtgaaagcttatttgcagctgggtatcaatgaaaagttaggactctctggaaggccagacaggcccattggctgcctcgggacatcaaagatttatcgcattctaggaaagactgtggtttgttacccgattattttcgacctaagtgatttctacatgtctcaggatgttttcctgctgatagatgacataaagaatgcgctgcagttcattaaacaatattggaaaatgcatggacgtccacttttccttgttctcatccgggaagacaatataagaggtagccggttcaaccccatattagatatgctggcagcccttaaaaaaggaataattggaggagtcaaagttcatgtggatcgtctacagacactaatatctggagctgtggtagaacaacttgatttcctacgaatcagtgacacagaagagcttccagaatttaagagttttgaggaactagaacctcccaaacattcaaaagtcaaacggcaaagcagcacccctagtgctcctgaactgggacagcagccggatgtcaacattagtgaatggaaggacaaacccacccacgaaattcttcaaaaactgaatgattgcagttgtctggctagccaagccatcctgctgggtatactgctcaaaagagaaggccccaacttcatcacaaaggaaggtaccgtttctgatcacattgagagagtctatagaagagctggcagccaaaaactttggtcggttgtacgccgtgcagcaagtcttttaagtaaagtagtggacagcctggccccatccattactaatgttttagtgcagggcaaacaggtaactctgggtgcctttgggcatgaagaagaagttatctctaatcctttgtctccaagagtgattcaaaacatcatctattataagtgtaacacccatgatgagagggaagcggtcattcagcaagaactggtcatccatattggctggatcatctccaataaccctgagttattcagtggcatgctgaaaatacgaatcgggtggatcatccatgccatggagtatgaacttcagatccgtggcggagacaagccagccttggacttgtatcagctgtcacctagtgaagttaaacagcttctgctggatattctgcagcctcaacagaatggaagatgttggctgaacaggcgtcagatcgatgggtctttgaatagaactcccaccgggttctatgaccgagtgtggcagattctggagcgcacgcccaatgggatcattgttgctgggaagcatttgcctcagcaaccaaccctgtcagatatgaccatgtatgagatgaatttctctctccttgttgaagacacgttgggaaatattgaccagccacagtacagacagatcgttgtagagttacttatggttgtatccattgtactggaaagaaaccccgagctagaatttcaagacaaagtagatctagacagactggtcaaagaagcatttaatgaatttcaaaaagatcagagtcggctaaaggaaattgaaaaacaagatgacatgacttccttttacaacactcctcccctgggaaaaagaggaacatgcagctatttgacaaaggcggtgatgaatctgctgctggaaggagaagtcaagccaaacaatgatgacccgtgtctgattagctagtggggaaggtgtaggaagctctgttgagacacatgttctgaagtgtgttgtgtttcatgttcaagcttaatcaaggcagccattaatatacgaactgagcatgctggggaggtgaatgccacatccttggcggggttatggacctcttgcatgtcatagccaatctaacggtaatggtaaatgcttttaatcaagcaggaaaaagttctcatgattatgccaactataatagtaatcctcactgagtgataaaaatagtttatgaattgaaaatttgccgctgcatgttgtatgatcaaatagttcatcaaaatgaatctttgctctttggactgaattcttaccatactgccattaaaataaatttgccaactagtaatgcatactggaaatcaaaagatactgaaagaatggtgaacttctcttagtggtattgtcatgctaaaagatgttaatatacatcataaaagcaaagtcagccagctgatattttggttctcaaaaactgcattattaataatattttagtatacagagctattctacagtttttacattgtaaacatgactgtggttttgtatttgctaaatataggggttggactaaaatataataaatctgtaccttatcaaacattttctttgagctcctgctaaaaataggacatgtctatgattgttcaaaaatatgttaaatttaggctcagcacagtagctcacacctgaaatcttagcacttcgggaggctgaggcaggtggatcacttgaggttaggagttcaagaccagcccagccaacatggtgaaaaccctgtctctactaaaaatacaaaaattagccaggcatgatggtgcatgcctttaaacccagctactgaggaggctgaggcatgagaattgcttgaaccaggagacggaggttgcagtgagctgaaatcctgccactgcacaccagcctgggtgacagagcgagactccatctc

SEQ ID NO: 1426 - protein, 1068 aa, Homo sapiens
GSVYEPLKSINLPRPDNETLWDKLDHYYRIVKSTLLLYQSPTTGLFPTKTCGGDQKAKIQDSLYCAAGAWALALAYRRIDDDKGRTHELEHSAIKCMRGILYCYMRQADKVQQFKQDPRPTTCLHSVFNVHTGDELLSYEEYGHLQINAVSLYLLYLVEMISSGLQIIYNTDEVSFIQNLVFCVERVYRVPDFGVWERGSKYNNGSTELHSSSVGLAKAALEAINGFNLFGNQGCSWSVIFVDLDAHNRNRQTLCSLLPRESRSHNTDAALLPCISYPAFALDDEVLFSQTLDKVVRKLKGKYGFKRFLRDGYRTSLEDPNRCYYKPAEIKLFDGIECEFPIFFLYMMIDGVFRGNPKQVQEYQDLLTPVLHHTTEGYPVVPKYYYVPADFVEYEKNNPGSQKRFPSNCGRDGKLFLWGQALYIIAKLLADELISPKDIDPVQRYVPLKDQRNVSMRFSNQGPLENDLVVHVALIAESQRLQVFLNTYGIQTQTPQQVEPIQIWPQQELVKAYLQLGINEKLGLSGRPDRPIGCLGTSKIYRILGKTVVCYPIIFDLSDFYMSQDVFLLIDDIKNALQFIKQYWKMHGRPLFLVLIREDNIRGSRFNPILDMLAALKKGIIGGVKVHVDRLQTLISGAVVEQLDFLRISDTEELPEFKSFEELEPPKHSKVKRQSSTPSAPELGQQPDVNISEWKDKPTHEILQKLNDCSCLASQAILLGILLKREGPNFITKEGTVSDHIERVYRRAGSQKLWSVVRRAASLLSKVVDSLAPSITNVLVQGKQVTLGAFGHEEEVISNPLSPRVIQNIIYYKCNTHDEREAVIQQELVIHIGWIISNNPELFSGMLKIRIGWIIHAMEYELQIRGGDKPALDLYQLSPSEVKQLLLDILQPQQNGRCWLNRRQIDGSLNRTPTGFYDRVWQILERTPNGIIVAGKHLPQQPTLSDMTMYEMNFSLLVEDTLGNIDQPQYRQIVVELLMVVSIVLERNPELEFQDKVDLDRLVKEAFNEFQKDQSRLKEIEKQDDMTSFYNTPPLGKRGTCSYLTKAVMNLLLEGEVKPNNDDPCLIS

SEQ ID NO: 1427 - DNA, 6110 bp, Homo sapiens
ctatgatgtggtgcttgatgctatagacacaatgcagcgagtcgcctggcatatcaatgacatgaagcggaaacacgagcacgcggtccggttacaggagatacagagtttgctcactaactggaaggggccagacctgaccagctacggggaactggtgcttgagggaaccttccgcatccagcgagccaagaatgagcggacgctcttcctcttcgacaagctgctgctcatcacgaagaagagagatgacacgtttacatacaaagctcacatcctgtgtggcaacctcatgcttgtggaggtgattccaaaagagccgctcagcttcagcgtcttccactacaagaatcccaagctgcagcacacagtccaggccaaatcccagcaagacaaacgcctctgggttctgcacctaaagagactgattctggagaaccatgcagccaagattccagctaaggccaagcaagcaatccttgaaatggatgccattcatcatccaggcttctgttacagtcctgagggagggacgaaagcactgttcggctctaaagaaggttctgctccatatcggctgagaagaaaatctgaaccttcctcacggtcacataaagttttgaagaccagtgaaacagcacaagacatccaaaaggtttctagagaggaaggatctccccagctgtcttcagcaaggccgtctcctgcccagagaaatagtcagcctagcagttctaccatgatcagcgtgcttcgagcgggtggagctctcagaaacatctggaccgatcaccagatcaggcaagccttgtttcccagccgacggtccccgcaggagaatgaggatgatgaagatgattatcagatgttcgtgccgtcattttcctcctcagatctgaactctaccagactatgtgaagatagcacttctagtcgcccttgcagctggcatatgggacagatggagtccacagagacctccagctctggtcacaggattgtcaggcgggccagcagtgctggggagagcaacacatgccctcctgaaataggaactagtgacagaactagggaactgcagaacagccccaaaacagaagggcaggaggagatgactccctttgggtcatccatagagttgactattgatgacatagaccatgtctatgataacatcagttatgaggacttaaaactaatggttgctaagcgggaagaagctgaatccactccctctaaatcagccagggactccgttcgccccaagagcaccccagagttagccttcacaaagaggcaagctggccacagtaagggctctctttacgcacaaacagatggcaccctctcaggtggagaggcatccagccaaagcacgcatgaactccaagcggttgaggagaacatctatgacaccatagggctcccagatcctccgtcgctgggttttaagtgcagcagcctaaagcgtgcaaagcggagcacctttttgggtctggaggccgacttcgtgtgctgtgacagcctgaggccatttgtttcccaagacagcctccagctcagtgaggacgaagccccttaccatcaggccactcccgatcatggttatctgagtttgctgtatgactctcccagtggtaacttgtctatgcctcataagcctgtatctgataaactgtccgaagaagtagatgaaatctggaatgacctggaaaattacatcaagaaaaatgaagacaaggccagagaccgtctcctggcagcgtttcctgtgagcaaggatgatgtgccagacaggctgcacgcagagagcacccctgagctgagccgggacgtggggcgctctgtgtccacgctgtccctgcctgagagccaggctctcctcacgcccgtgaagagcagggctggcagagccagccgcgccaactgcccctttgaggaagacctgatttctaaagaaggctcctttatgagccttaaccggctttctctggctagtgaaatgcccctcatggacaatccctacgacctggccaacagtggcctgtctcaaacagacccagaaaaccctgacctggggatggaggccacagataagacaaaaagcagggtgtttatgatggctcggcagtacagtcagaagattaagaaggcgaatcaacttttaaaagtgaaaagtctggagctggagcagccgccggccagtcagcatcagaaatccatgcacaaagacctggctgccatcttggaagagaagaagcaaggagggcccgccattggtgccaggattgctgagtattcccagttgtatgaccagattgtattcagagagtctcccttgaaaattcagaaggatggctgggccagccctcaagaatcctccctcctgaggtctgtgtcaccttcccaggtccaccatggtagtggagactggcttctgcattcaacctatagtaatggagagttagcagatttctgtctcccaccagagcaagacttgaggtcaagatatcccacgtttgagatcaatacaaaaagtactcccaggcaattgtccgcagcttgctctgtgccttctcttcaaacctctgaccctctgccaggctctgtgcagagatgcagcgtggtagtaagtcagcccaacaaagagaactggtgtcaggaccatctttacaactccttgggtcggaaagggatcagcgctaaatctcagccttatcacaggtcccagtcatcttcctccgtcttgatcaacaaatcaatggattccatcaactaccctagtgatgtgggaaagcagcagctgctgtctttacacagaagttcaaggtgtgagagtcaccaggacttgctgccagatattgctgactcgcatcaacagggcactgaaaaactctcagatctcacactccaagactcacagaaagttgtggtggtcaatagaaatttacccttaaatgcccaaattgcaacacagaattatttttccaatttcaaagagactgatggagatgaagatgactatgtggaaatcaagtcagaagaagatgagtcggagttggagctatctcacaatcgtagaaggaaatctgactcaaagtttgtggatgctgacttttctgataatgtctgcagcggcaacacattgcattctttgaatagtccgcgcactccaaaaaagccggttaacagcaaacttggcctttcaccatatctgacaccatataatgattctgacaaactgaatgactatctttggagggggccatctcccaatcaacaaaatattgtccagtctctaagggaaaaatttcagtgtctcagttcaagcagctttgcttaaggttcttcataataactgcttgaatcaacttcttattttgctcataaaacgttacagatactgatgaggtgttttatgtataccagattaaaacaattttgtaagaaccagaggtgtaaaatatactttcttttacagcacaacttttggaaatggctgacgatgcagcccggattgtactgtagcacatgttggcatcaacagtatattttctcatgctgagtgtcttcatgtttcatgtaagtcaatcttacttgaaagtttttagacttttaacacgatggccataacctgacaatagtgcccacaccttaagaaatgcaataatcctttcctgttatccagaaggcccaggtagttttatcctgtgactcaaaggcagcaaggagactttttcacattttaaaaggcaacgaaagctgttgaaagaattatgcttatatctcacattttggttatatttgtggtaacaccttaggataacgtaagccagagatctgtaaattggactgcagtctgaggtgcccattttagggtttttgtgctagtattcttttatgtcattttgatgcagaaattgtgtgactgttgaaaattaaaatgtagcgggacccattttctgtacgcagaaccctttacctgtattcctggacaaggcctagagaacgagctgctcatcatgtttctaatataatttctggggtgaaatgaatgatttccttactggcttagagaaaaccaaggtcaataaaatgcagattgacttaactattagaaaagatgggatgacttctgggaaccacttaactcttcaaatgactgttgaaagagaaaaagcaaaactgaaatcccaccagaccattttgtgtgcctgtttctaatcgatacaaagttaagcatgagctaaaatcagacaaagcactttaaatttatcctttccagagcgctttgcacatgcaccctcctgagtttgggattctgccaaatgaccaacttgatcctggccctgaggagtcattggctgcaggaatagggcaagaatctatttcctaaactacacataacatgggagcctttttttcgttgttttcaggtatattaaagaatgaaatctttggttactaggtgctgactaataaataacaccttttatattctgaccatttgtcacatttcattgtgatactgtatactgatctaactccttatgaaaggcaacaaacaaaaataagacattgaataaaaagcaaaatcaaagaagctaaagagaaaaatgaaggcagatatattgcaactttataacatattctattttattgaagactgcaattaatgcagcaagaatgctttctcaagcggtggcctttgtattctcattttaatcaggtgtacattctatggcctctcccccatgctgttagtttctattttaaaagatacaataatatatgtagggaaaggggcctgggctcttcatttaaaggtaagcagtaatattgagtaagtgacataattctttttctctttgttaagtcctatgcctctttttcttaactgtaaaacatagaatatgagcgtttttatcttacaaataggtacctaaggcatgtgattttatttttaaataacaaaaaataacccaagtttcttgcttctccaaagtattcttctcatagcttataaaagaaagtccacattgaatagcatggtctgggaacattccttctttattgtgtttatttgaacatgatatgagtttccaagatgaaatgatcaaaaaagataagtaccacaagaaagtttttttgtttggttggtttttttgtttgtttgtttttttcttgagactgagtctctccctgttgcccaagttggagtgcaatcttggctcactgcagcctccacctccccggttccagcgattctcctgcctcagcctcttgaatagctgggattacaggcgcccgccaccacacctggctaatttttgtgttgttagtagaggcggggtttcatcatgttggccaggctggtctcgaactcctgatctcatgatccgtctgcctcggcctcccagagtgctgggattacaggcatgagccactgcgcccggccaagaaagtatgtttttagaggtgtgtgtaagtgcatttgtattacctatgaacaaaattacctgactcttgtcccaggaaagctgtttcgcattttcgctttttgattggtattatccagttctatgtagttcatattattgttctgtctgactctcagaaattacttcttcacgccagtgtcttgttgcatgactttgatgtcacctataggaatacacctcactgcacgtaagtgggtatcttactgtataaaaggtctacatggctttaggttttaggacaaatgtgtagatttatagaccatttctgttggccaggacacagattttgagagctgtgtgtatatatatataatcatgtttgtatttttttcctgaaagttatcaattgcttttgtttaaaacagtttgttttagaggtggggtggggatgtatataacgaggaaaagttatatgtactttaaagtatgtcaagttcttactagtttcctgtactgaaggttcaattttttttatataagtttacttttcacctgctctattctttgtggggaaaaaatgcatctagaaaaacatagtttaaatactgtatataagataatgaaagttagtaacgtccattatttaataaagtttgtaaagtacaaggt

SEQ ID NO: 1428 - protein, 1113 aa, Homo sapiens
YDVVLDAIDTMQRVAWHINDMKRKHEHAVRLQEIQSLLTNWKGPDLTSYGELVLEGTFRIQRAKNERTLFLFDKLLLITKKRDDTFTYKAHILCGNLMLVEVIPKEPLSFSVFHYKNPKLQHTVQAKSQQDKRLWVLHLKRLILENHAAKIPAKAKQAILEMDAIHHPGFCYSPEGGTKALFGSKEGSAPYRLRRKSEPSSRSHKVLKTSETAQDIQKVSREEGSPQLSSARPSPAQRNSQPSSSTMISVLRAGGALRNIWTDHQIRQALFPSRRSPQENEDDEDDYQMFVPSFSSSDLNSTRLCEDSTSSRPCSWHMGQMESTETSSSGHRIVRRASSAGESNTCPPEIGTSDRTRELQNSPKTEGQEEMTPFGSSIELTIDDIDHVYDNISYEDLKLMVAKREEAESTPSKSARDSVRPKSTPELAFTKRQAGHSKGSLYAQTDGTLSGGEASSQSTHELQAVEENIYDTIGLPDPPSLGFKCSSLKRAKRSTFLGLEADFVCCDSLRPFVSQDSLQLSEDEAPYHQATPDHGYLSLLYDSPSGNLSMPHKPVSDKLSEEVDEIWNDLENYIKKNEDKARDRLLAAFPVSKDDVPDRLHAESTPELSRDVGRSVSTLSLPESQALLTPVKSRAGRASRANCPFEEDLISKEGSFMSLNRLSLASEMPLMDNPYDLANSGLSQTDPENPDLGMEATDKTKSRVFMMARQYSQKIKKANQLLKVKSLELEQPPASQHQKSMHKDLAAILEEKKQGGPAIGARIAEYSQLYDQIVFRESPLKIQKDGWASPQESSLLRSVSPSQVHHGSGDWLLHSTYSNGELADFCLPPEQDLRSRYPTFEINTKSTPRQLSAACSVPSLQTSDPLPGSVQRCSVVVSQPNKENWCQDHLYNSLGRKGISAKSQPYHRSQSSSSVLINKSMDSINYPSDVGKQQLLSLHRSSRCESHQDLLPDIADSHQQGTEKLSDLTLQDSQKVVVVNRNLPLNAQIATQNYFSNFKETDGDEDDYVEIKSEEDESELELSHNRRRKSDSKFVDADFSDNVCSGNTLHSLNSPRTPKKPVNSKLGLSPYLTPYNDSDKLNDYLWRGPSPNQQNIVQSLREKFQCLSSSSFA

SEQ ID NO: 1429 - DNA, 1540 bp, Homo sapiens
gagtgcaaagcgctctccctccctcgcccagccttcgtcctcctggcccgctcctctcatccctcccattctccatttcccttccgttccctccctgtcagggcgtaattgagtcaaaggcaggatcaggttccccgccttccagtccaaaaatcccgccaagagagccccagagcagaggaaaatccaaagtggagagaggggaagaaagagaccagtgagtcatccgtccagaaggcggggagagcagcagcggcccaagcaggagctgcagcgagccgggtacctggactcagcggtagcaacctcgccccttgcaacaaaggcagactgagcgccagagaggacgtttccaactcaaaaatgcaggctcaacagtaccagcagcagcgtcgaaaatttgcagctgccttcttggcattcattttcatactggcagctgtggatactgctgaagcagggaagaaagagaaaccagaaaaaaaagtgaagaagtctgactgtggagaatggcagtggagtgtgtgtgtgcccaccagtggagactgtgggctgggcacacgggagggcactcggactggagctgagtgcaagcaaaccatgaagacccagagatgtaagatcccctgcaactggaagaagcaatttggcgcggagtgcaaataccagttccaggcctggggagaatgtgacctgaacacagccctgaagaccagaactggaagtctgaagcgagccctgcacaatgccgaatgccagaagactgtcaccatctccaagccctgtggcaaactgaccaagcccaaacctcaagcagaatctaagaagaagaaaaaggaaggcaagaaacaggagaagatgctggattaaaagatgtcacctgtggaacataaaaaggacatcagcaaacaggatcagttaactattgcatttatatgtaccgtaggctttgtattcaaaaattatctatagctaagtacacaataagcaaaaacaaaaagaaaagaaaatttttgtagtagcgttttttaaatgtatactatagtaccagtaggggcttataataaaggactgtaatcttatttaggaagttgacttatagtacatgataaatgatagacaattgaggtaagttttttgaaattatgtgacattttacattaaattttttttacattttttgggcagcaatttaaatgttatgactatgtaaactacttctcttgttaggtaatttttttcacctagatttttttcccaattgagaaaaatatatactaaacaaaatagcaataaaacataatcactctatttgaagaaaatatcttgttttctgccaatagattttttaaaatgtagtcagcaaaatgggggtggggaagcagagcatgtcctagttcaatgttgactttttttttttttaaagaaaagcattaagacataaaattctttcactttggcagaagcatttgttttcttgatgaaattatttttccatctgaggaaaaaaatactaggaaaataaatcaaggtgatgctg

SEQ ID NO: 1430 - protein, 168 aa, Homo sapiens
MQAQQYQQQRRKFAAAFLAFIFILAAVDTAEAGKKEKPEKKVKKSDCGEWQWSVCVPTSGDCGLGTREGTRTGAECKQTMKTQRCKIPCNWKKQFGAECKYQFQAWGECDLNTALKTRTGSLKRALHNAECQKTVTISKPCGKLTKPKPQAESKKKKKEGKKQEKMLD

SEQ ID NO: 1431 - DNA, 4118 bp, Homo sapiens
ctccttccccgccggccgcgctccggagcctccgggccgcggtggagcgagggcccaggcgaggcgagggccgggcggcgggcgccgggccccgcggccggcacgacggagcccccgtacggccggcggcagcggttggcggcggcccccggcccccggcgcgggaagcggcggcggggcggcggcggcggtggcggtggcggtggcggcgacggtggcagcgccatggagccgggggaggtgaaggaccggatcctggagaacatctcgctgtcggtgaagaagttgcagagctattttgctgcatgtgaggatgagatccctgccatccggaaccatgacaaggtcctacagcgtctgtgtgagcacctggaccacgccctgctgtacggactgcaagacctctcctctggctactgggtgctcgtggtgcattttactcggagagaggccatcaagcagatcgaggtgctgcagcacgtggccaccaacctggggcgcagccgtgcctggctgtacctggccctcaacgagaactccttggagagctacctgcggttgttccaggagaacctgggcctgctgcataagtactacgtcaagaatgccctggtctgcagccacgatcacctgacgctcttcctgaccttggtgtccgggctagagttcattcgtttcgagctggatctggatgccccttacctagacctggccccctacatgcccgactactacaaacctcagtacctgctggactttgaagaccgccttcccagctcggtccacggctcagacagtctgtccctcaactctttcaactccgtcacctccaccaacctggagtgggatgacagtgcgattgccccatctagtgaggattatgattttggagatgtgtttccagcagtgccgtctgtacccagcacagactgggaagatggagacctcacagacacggtcagtggtccccgctccacagcctccgacctgaccagcagcaaggcctccaccaggagccccacccagcgccagaaccccttcaacgaggagccggcagagactgtgtcctcctctgacaccacccccgtgcacaccacctctcaggagaaggaggaggcccaggccctggacccgccggatgcctgcacggagctcgaggtcatcagggtcaccaagaagaagaaaattggcaagaagaaaaagagcagatcagatgaggaggcaagtccactccaccccgcctgcagccagaagaaatgtgccaagcagggggacggtgacagccgcaacggcagcccaagccttgggcgggactcgccagacactatgcttgcctccccccaggaggagggagaggggccgagcagcaccacggagagcagcgagcgctccgagccgggcctgctgatccctgagatgaaggacacctccatggagcgcttggggcagcccctgagcaaggttatcgaccagctcaacgggcagctggaccccagcacctggtgctcccgtgctgagcccccagaccagtcctttcggaccggctctcccggggatgccccggagaggccgccgctttgcgactttagtgaggggctttcagccccaatggacttctaccgctttaccgtcgagagtccaagcactgttacatcaggtggcggccaccatgaccctgcagggcttggccaaccgctgcatgttcctagtagccctgaggctgctggccaagaagaagagggaggaggaggagagggacagacgcctcggcccctagaggataccacgagggaggctcaggagctggaggcccagctgtccctggtcagggaggggcctgtgtctgagccagagcctgggacccaggaggttctctgccagctcaagcgagaccagcccagcccgtgtctgagtagcgctgaggattctggggtggatgagggacaggggagcccttcggagatggtccattcctcggagttcagagtagacaacaatcacctgctcctgctcatgatccacgtgttccgagaaaacgaagagcagctgttcaaaatgatccggatgagcaccgggcacatggagggcaacctgcagctgctgtacgtgctgctcacagactgctatgtctacctgctccggaaaggggccacagagaagccatacctggtggaagaggccgtttcttacaatgaacttgactatgtgtcggttggccttgaccagcagacggtgaagctggtgtgcaccaaccgcaggaagcagtttctgctggacacggctgatgtggcgctggctgagttctttttggcttctttgaagtcagccatgatcaaaggctgtcgagaacctccctaccccagcatcctgacggatgccaccatggagaagctggcactggccaaatttgtggcccaagaatcgaagtgtgaggcatctgctgtcaccgtgcgcttctacggccttgtgcactgggaggaccccacagacgagtccctgggccccacgccctgccactgctcaccccccgagggcaccatcaccaaagaaggcatgctgcactacaaggcgggcacctcctacctgggcaaggaacactggaagacgtgcttcgtggtgctcagcaacgggatcctctaccagtacccggaccgcaccgacgtcatccctctgctctcggtgaacatggggggggagcagtgcggtggctgccggagagccaacaccacggatcggccccacgccttccaggtcattctctccgaccggccctgcctggagctaagtgccgagagcgaggccgagatggccgagtggatgcagcatctctgccaggctgtgtccaaaggggtcatcccccagggcgtagctcccagcccctgcataccctgctgcctggtcctcacggatgaccgcctctttacgtgccatgaggattgccagaccagcttcttccgctctttgggcacagccaagctgggcgacatcagcgccgtctccaccgagccgggcaaggagtactgcgtcttggagttctcccaggacagccagcagctcctcccgccctgggtcatctacctgagctgcacttctgaactggaccgattgctgtctgcactgaactctgggtggaaaaccatctatcaggtggacctcccccacacggcgatccaggaagcctccaacaagaagaaattcgaggatgccttgagcctcatccacagcgcctggcagcggagcgacagtctctgccgcggccgagcctcccgagacccctggtgctgaggcagagctggttggcgtccctggtgggcaggaaaggaaggcacgccagccggcaggcacactgtcacggctgttgtcatgctgtcgggagcctacagtccacccctgccctgggcggcagaaccaccgagtgtggcttaagacagggtccctccactccagggatccagatcaggtgcccggcacccctgggcatcctgcccgacaggtagcgaatggaggtcgctgggggcagagggtccgagccctgtgggctctgcggatgcacgccctcctcccgggcctccgcctcagtctgcagaatttctgccgagtggcaccgagaacaccatccatctaaggacgaacaaaagaaccaggagggcgggacccccctcttcctctcctgggttgggggctggggccctgagtgcccagccatccttgttcgtgtttgaacactctcctggccacgtggggaagcgggaacacggggtgtctgcgcatgtttcctcctcctagctccatcactgcgcacacagctgcctgcctcgccagatgcaggggggcgggcagccctccctggctgccaggaggctctgcatgcccacagtcctgccctgcctgtcccctcaacccggcagtgcctgtagcaccgaggagcaaagggggtggatggggggcttggagaagggcggagcccaccagcctggcatccatgttgacatcttctgactgtcccctgcttggctggagccaggcccttccctagagtttcgtcaagagcctcctggggaaggggtcaggtggtttgggttttgttttttaaaataaaatagacatgttatattgcc

SEQ ID NO: 1432 - protein, 1094 aa, Homo sapiens
LLPRRPRSGASGPRWSEGPGEARAGRRAPGPAAGTTEPPYGRRQRLAAAPGPRRGKRRRGGGGGGGGGGGDGGSAMEPGEVKDRILENISLSVKKLQSYFAACEDEIPAIRNHDKVLQRLCEHLDHALLYGLQDLSSGYWVLVVHFTRREAIKQIEVLQHVATNLGRSRAWLYLALNENSLESYLRLFQENLGLLHKYYVKNALVCSHDHLTLFLTLVSGLEFIRFELDLDAPYLDLAPYMPDYYKPQYLLDFEDRLPSSVHGSDSLSLNSFNSVTSTNLEWDDSAIAPSSEDYDFGDVFPAVPSVPSTDWEDGDLTDTVSGPRSTASDLTSSKASTRSPTQRQNPFNEEPAETVSSSDTTPVHTTSQEKEEAQALDPPDACTELEVIRVTKKKKIGKKKKSRSDEEASPLHPACSQKKCAKQGDGDSRNGSPSLGRDSPDTMLASPQEEGEGPSSTTESSERSEPGLLIPEMKDTSMERLGQPLSKVIDQLNGQLDPSTWCSRAEPPDQSFRTGSPGDAPERPPLCDFSEGLSAPMDFYRFTVESPSTVTSGGGHHDPAGLGQPLHVPSSPEAAGQEEEGGGGEGQTPRPLEDTTREAQELEAQLSLVREGPVSEPEPGTQEVLCQLKRDQPSPCLSSAEDSGVDEGQGSPSEMVHSSEFRVDNNHLLLLMIHVFRENEEQLFKMIRMSTGHMEGNLQLLYVLLTDCYVYLLRKGATEKPYLVEEAVSYNELDYVSVGLDQQTVKLVCTNRRKQFLLDTADVALAEFFLASLKSAMIKGCREPPYPSILTDATMEKLALAKFVAQESKCEASAVTVRFYGLVHWEDPTDESLGPTPCHCSPPEGTITKEGMLHYKAGTSYLGKEHWKTCFVVLSNGILYQYPDRTDVIPLLSVNMGGEQCGGCRRANTTDRPHAFQVILSDRPCLELSAESEAEMAEWMQHLCQAVSKGVIPQGVAPSPCIPCCLVLTDDRLFTCHEDCQTSFFRSLGTAKLGDISAVSTEPGKEYCVLEFSQDSQQLLPPWVIYLSCTSELDRLLSALNSGWKTIYQVDLPHTAIQEASNKKKFEDALSLIHSAWQRSDSLCRGRASRDPWC

SEQ ID NO: 1433 - DNA, 7025 bp, Homo sapiens
taccaagcaccattcaattaaacaacttcagctttctccaagacttctggaagtgacaaacacaatcagggttgaaaacctgccacctggtgctgatgactacagtttaaaacttttctttgaaaatccctataatggagggggaagagttgccaatgttgaatattttcctgaagagagttcagctctgattgaattttttgacagaaaagtgttagacaccatcatggccacaaaactcgacttcaataaaatgccactttctgtgttcccatactatgcctcattgggcacagccttgtatggaaaggagaagcctctgatcaagcttccagcaccatttgaagagtcactagatcttcccttatggaagttcttacagaaaaagaatcacctcattgaggagataaacgatgaaatgaggcgttgtcactgtgagctcacgtggtcccaactcagtggtaaagttaccatcagaccagcagccaccttagtcaatgaaggaagaccgagaatcaagacctggcaggcagatacttccacaacactctctagcatcaggtctaaatataaagtcaacccaattaaagtggatccaacaatgtgggacaccataaaaaatgatgtgaaagatgacaggattttgattgagtttgatacacttaaggagatggtaatcttagcagggaaatcagaggatgtccaaagcattgaggtacaagtcagggagttaatagaaagcactactcaaaaaattaaaagggaagagcaaagtttgaaggaaaaaatgatcatttctccaggcaggtattttcttttgtgtcacagcagtctactggaccatttactcacggagtgcccagagatagagatttgttacgatagagtcactcaacacttgtgcttgaaaggacctagtgcagatgtgtataaagcaaagtgtgaaatccaggaaaaggtgtacaccatggctcagaaaaacattcaggtttctcctgagatttttcagtttttgcaacaggtaaactggaaagaattctctaagtgtcttttcatagcacagaagattcttgcactttatgagctagagggtacaactgttctcttaaccagctgttcttctgaagccctgttagaagcagaaaagcaaatgctcagtgccttaaattataagcgcattgaagttgagaacaaagaagttcttcatggcaagaaatggaaagggctcactcacaatttgcttaagaaacaaaattcctccccaaacactgtaatcatcaatgagttaacttcagaaaccacagctgaagtcatcattacaggctgtgtaaaagaagtaaatgaaacctataaattgctttttaacttcgttgaacaaaacatgaaaatagagagactggttgaagtaaagccttccttagttattgactatttaaagacagaaaagaagctattctggccaaagataaagaaggtaaatgtgcaggtaagtttcaatcctgagaacaaacaaaaaggcattttactaactggctcaaagaccgaagtactgaaggcagtggacattgtcaagcaagtctgggattcagtctgtgttaaaagtgtccatactgataagccaggagccaagcagttcttccaggataaagcacggttttatcaaagtgagatcaaacggttgtttggttgttacattgaactacaggagaatgaagtaatgaaggagggaggcagccccgctgggcagaagtgcttctctcggacagtcttggcccctggcgttgtgctgattgtgcagcagggtgacttggcacggcttcctgtcgatgtggtggtgaatgcatctaatgaggaccttaagcattatggtggcctggccgctgcgctctcaaaagcagctggccctgagctccaggccgactgtgaccagatagtgaagagagagggcagactcctaccgggcaatgccaccatctccaaggcaggaaagctgccctaccaccacgtgatccatgcagtggggccccgctggagcggatatgaggccccgaggtgtgtgtacctattaaggagagctgtgcaactcagtctctgtctagccgaaaaatacaagtaccgatccatagccatcccagctattagttctggagtctttggctttcccttaggccgatgcgtggagaccattgtttctgccatcaaggaaaacttccaattcaagaaggatggacactgcttgaaagaaatctaccttgtggatgtatctgagaagactgttgaggcctttgcagaagctgtgaaaactgtatttaaagccaccctgccagatacagctgccccgccaggtttaccaccagcagcagcggggcctgggaaaacatcatgggaaaaaggaagcctggtgtccccgggaggcctgcagatgctgttggtgaaagagggtgtgcagaatgctaagaccgatgttgttgtcaactccgttcccttggatctcgtgcttagtagagggcctctttctaagtccctcttggaaaaagctggaccagagctccaggaggaattggacacagttggacaaggggtggctgtcagcatgggcacagtgctcaaaaccagcagctggaatctggactgtcgctatgtgcttcacgtggtagctccggagtggagaaatggtagcacatcttcactcaagataatggaagacataatcagagaatgtatggagatcactgagagcttgtccttaaaatcaattgcatttccagcaataggaacaggaaacttgggatttcctaaaaacatattcgctgaattaatcatttcagaggtgttcaaatttagtagcaagaatcagctgaaaactttacaagaggttcactttctgctgcacccgagtgatcatgaaaatattcaggcattttcagatgaatttgccagaagggctaatggaaatctcgtcagtgacaaaattccgaaggctaaagatacacaaggtttttatgggactgtttctagccctgattcaggtgtgtatgaaatgaagattggctccatcatcttccaggtggcttctggagatatcacgaaagaagaggcagatgtgattgtaaattcaacatcaaactcattcaatctcaaagcaggggtctccaaagcaattttagaatgtgctggacaaaatgtagaaagggaatgttctcagcaagctcagcagcgcaaaaatgattatataatcaccggaggtggatttttgaggtgcaagaatatcattcatgtaattggtggaaatgatgtcaagagttcagtttcctctgttttgcaggagtgtgaaaaaaaaaattactcatccatttgcctcccagccattgggacaggaaatgccaaacaacacccagataaggttgctgaagccataattgatgccattgaagactttgtccagaaaggatcagcccagtctgtgaaaaaagttaaagttgttatctttctgcctcaagtactggatgtgttttatgccaacatgaagaaaagagaagggactcagctttcttcccaacagtctgtgatgtctaaacttgcatcatttttgggcttttcaaagcaatctccccaaaaaaagaatcatttggttttggaaaagaaaacagaatcagcaacttttcgggtgtgtggtgaaaatgtcacgtgtgtggaatatgctatctcctggctacaagacctgattgaaaaagaacagtgtccttacaccagtgaagatgagtgcatcaaagactttgatgaaaaggagtatcaggagttgaatgagctgcagaagaagttaaatattaacatttccctggaccataagagacctttgattaaggttttgggaattagcagagatgtgatgcaggctagagatgaaattgaggcgatgatcaagagagttcgattggccaaagaacaggaatcccgggcagattgtatcagtgagtttatagaatggcagtataatgacaataacacttctcattgttttaacaaaatgaccaatctgaaattagaggatgcaaggagagaaaagaaaaaaacagttgatgtcaaaattaatcatcggcactacacagtgaacttgaacacatacactgccacagacacaaagggccacagtttatctgttcagcgcctcacgaaatccaaagttgacatccctgcacactggagtgatatgaagcagcagaatttctgtgtggtggagctgctgcctagtgatcctgagtacaacacggtggcaagcaagtttaatcagacctgctcacacttcagaatagagaagattgagaggatccagaatccagatctctggaatagctaccaggcaaagaaaaaaactatggatgccaagaatggccagacaatgaatgagaagcaactcttccatgggacagatgccggctccgtgccacacgtcaatcgaaatggctttaaccgcagctatgccggaaagaatgctgtggcatatggaaagggaacctattttgctgtcaatgccaattattctgccaatgatacgtactccagaccagatgcaaatgggagaaagcatgtgtattatgtgcgagtacttactggaatctatacacatggaaatcattcattaattgtgcctccttcaaagaaccctcaaaatcctactgacctgtatgacactgtcacagataatgtgcaccatccaagtttatttgtggcattttatgactaccaagcatacccagagtaccttattacgtttagaaaataacactttggtatccttcccacaaaattattctccatttgtacatatctagttgtaaaacaagttttagcttttttttttaattcctcttaacagatttttctaatatccaaggatcattctttgtcgctgaagtcagtctttcttcagcttccctttcataatggaaatgaacttattatcttgagagcaaataacttggaaaatttaaatgagataatgcagttgcaactgtgtgtccacaagtatggacatcaaatctgtgggaaaagaacaggtttgtattttcaggaaggagagaataacagtcttatagacagagggcacagctaagcacagctgccactgcaggagacaggccccatgtcaggatgccatagtgctgtggggagcacagtattacccagtgggtagggcttctgtcttccctgggagcagggatggtatcttagtcaatttttttcccttgagatgaggtctgtgcctgatgtacaacggatactccataaatgtttgacaaaccaacgaagaatgaaaaaaagcctagtcagactcccatccaaagtaggaactatctctttaacattcttgactcactatcactttacctcaaattgaacagattccatgacggaacttcattcttcacaaactagccagtgacatgtgggacagctctggccagggctctgggactgcagtgtacttgcgctctgcacggtccaggagctgtgatgtggctgtggtctaggggaatcctgcctgccccatggagttgcgcagcacaaccctggctccaattgccagaaggctctttttaatgctgaaccaaaatgtgcctttttttttttttttttgagatggagtttcactcttgttgcccaggctggagtgcaatggcgcgatctcagctcactgcagccactgcctcccaggttcaagtgattctcctgcctcagcctcccgagtagctgggattacaggcatgcgctaacacacccagctaattttgtatttttagtagagacgaggtttctccatgttcgacaggctggtctcgaactcccacctcagcctcccaaactgctgggattacaggtgtgagccaccgtgaccagccaatgtgccttcttatagtgtctactcattggtctttgttctgcccagtgataacaatgggataacgcctgctacacatcttcattgtgaaacccttcccctgtgctgagattaaatgaactctaagattattaaatagtatattttccttgacagcctagcgtttgatgattttaaagccttatgtataaataaaccaaaggaagtaagcagtcatattgctaatttgctaactcctatctattgaatggtgaagttttaaaaatttccccaggtaagtttaagattcaaacaccatctattgagcacctacattgtgtgccaggtagtaaaataggtgctttcatacacattgtctcaattcctgtgaggtcagaattatctctgcatttgaaacttgaggaaacatgctcagagtgcaagaagcttccttgcctgagatcacctagaaaggaaccctcagagccggcaactgaatcttggtccctgtgatgtcaagcccattgctctcccactgcagaacatggcctctagattaatgccaccgattcaggaacacctccgacagtcttgaaatacccccatgttgccttgtttgttttttccttctggcttcttctattacagtctcttcattggaagctctgtaggccaaggccagagctgatactgacacggagccaatgcagatagcacatcagatgctaggggtcgctgggaggattaagggacttaatctgctaggaacacctgtacttgaagtggaggaggctagggggccacagttgctgcttcattaacatagaggttttggatttttttctcttgtggtttgttttttaagtggattggcagactccttgttgcttaagagtggctttctaggcaggccactggcatctgaattcatcattgacaataaatgtaagaaattggaataaaaaagagagacctgctgttattcgcttttgttctccagtgatttgattaactcagggcaaggctgaatatcagagtgtatcgcactgaagaataataatccattcagtaatgttatagttatcctcaatctaaatatgtcaactgtcattttgctacttttcaaataaaatacttgaaaactgtc

SEQ ID NO: 1434 - protein, 1518 aa, Homo sapiens
MATKLDFNKMPLSVFPYYASLGTALYGKEKPLIKLPAPFEESLDLPLWKFLQKKNHLIEEINDEMRRCHCELTWSQLSGKVTIRPAATLVNEGRPRIKTWQADTSTTLSSIRSKYKVNPIKVDPTMWDTIKNDVKDDRILIEFDTLKEMVILAGKSEDVQSIEVQVRELIESTTQKIKREEQSLKEKMIISPGRYFLLCHSSLLDHLLTECPEIEICYDRVTQHLCLKGPSADVYKAKCEIQEKVYTMAQKNIQVSPEIFQFLQQVNWKEFSKCLFIAQKILALYELEGTTVLLTSCSSEALLEAEKQMLSALNYKRIEVENKEVLHGKKWKGLTHNLLKKQNSSPNTVIINELTSETTAEVIITGCVKEVNETYKLLFNFVEQNMKIERLVEVKPSLVIDYLKTEKKLFWPKIKKVNVQVSFNPENKQKGILLTGSKTEVLKAVDIVKQVWDSVCVKSVHTDKPGAKQFFQDKARFYQSEIKRLFGCYIELQENEVMKEGGSPAGQKCFSRTVLAPGVVLIVQQGDLARLPVDVVVNASNEDLKHYGGLAAALSKAAGPELQADCDQIVKREGRLLPGNATISKAGKLPYHHVIHAVGPRWSGYEAPRCVYLLRRAVQLSLCLAEKYKYRSIAIPAISSGVFGFPLGRCVETIVSAIKENFQFKKDGHCLKEIYLVDVSEKTVEAFAEAVKTVFKATLPDTAAPPGLPPAAAGPGKTSWEKGSLVSPGGLQMLLVKEGVQNAKTDVVVNSVPLDLVLSRGPLSKSLLEKAGPELQEELDTVGQGVAVSMGTVLKTSSWNLDCRYVLHVVAPEWRNGSTSSLKIMEDIIRECMEITESLSLKSIAFPAIGTGNLGFPKNIFAELIISEVFKFSSKNQLKTLQEVHFLLHPSDHENIQAFSDEFARRANGNLVSDKIPKAKDTQGFYGTVSSPDSGVYEMKIGSIIFQVASGDITKEEADVIVNSTSNSFNLKAGVSKAILECAGQNVERECSQQAQQRKNDYIITGGGFLRCKNIIHVIGGNDVKSSVSSVLQECEKKNYSSICLPAIGTGNAKQHPDKVAEAIIDAIEDFVQKGSAQSVKKVKVVIFLPQVLDVFYANMKKREGTQLSSQQSVMSKLASFLGFSKQSPQKKNHLVLEKKTESATFRVCGENVTCVEYAISWLQDLIEKEQCPYTSEDECIKDFDEKEYQELNELQKKLNINISLDHKRPLIKVLGISRDVMQARDEIEAMIKRVRLAKEQESRADCISEFIEWQYNDNNTSHCFNKMTNLKLEDARREKKKTVDVKINHRHYTVNLNTYTATDTKGHSLSVQRLTKSKVDIPAHWSDMKQQNFCVVELLPSDPEYNTVASKFNQTCSHFRIEKIERIQNPDLWNSYQAKKKTMDAKNGQTMNEKQLFHGTDAGSVPHVNRNGFNRSYAGKNAVAYGKGTYFAVNANYSANDTYSRPDANGRKHVYYVRVLTGIYTHGNHSLIVPPSKNPQNPTDLYDTVTDNVHHPSLFVAFYDYQAYPEYLITFRK

SEQ ID NO: 1435 - DNA, 851 bp, Homo sapiens
tctccccaaaaaaagaatcatttggttttggaaaagaaaacagaatcagcaacttttcgggtgtgtggtgaaaatgtcacgtgtgtggaatatgctatctcctggctacaagacctgattgaaaaagaacagtgtccttacaccagtgaagatgagtgcatcaaagactttgatgaaaaggagtatcaggagttgaatgagctgcagaagaagttaaatattaacatttccctggaccataagagacctttgattaaggttttgggaattagcagagatgtgatgcaggctagagatgaaattgaggcgatgatcaagagagttcgattggccaaagaacaggaatcccgggcagattgtatcagtgagtttatagaatggcagtataatgacaataacacttctcattgttttaacaaaatgaccaatctgaaattagaggatgcaaggagagaaaagaaaaaaacagttgatgtcaaaattaatcatcggcactacacagtgaacttgaacacatacactgccacagacacaaagggccacagtttatctgttcagcgcctcacgaaatccaaagttgacatccctgcacactggagtgatatgaagcagcagaatttctgtgtggtggagctgctgcctagtgatcctgagtacaacacggtggcaagcaagtttaatcagacctgctcacacttcagaatagagaaggtgaatgtgatgattcgtgcctgtagtcccagctattgggaggctgaggtggaaggattgcatgagcccaggagtttgacgccagtctgggtaacatagtgagatcctgctctcaaataaaaacaaccaattattttggc

SEQ ID NO: 1436 - protein, 269 aa, Homo sapiens
SPQKKNHLVLEKKTESATFRVCGENVTCVEYAISWLQDLIEKEQCPYTSEDECIKDFDEKEYQELNELQKKLNINISLDHKRPLIKVLGISRDVMQARDEIEAMIKRVRLAKEQESRADCISEFIEWQYNDNNTSHCFNKMTNLKLEDARREKKKTVDVKINHRHYTVNLNTYTATDTKGHSLSVQRLTKSKVDIPAHWSDMKQQNFCVVELLPSDPEYNTVASKFNQTCSHFRIEKVNVMIRACSPSYWEAEVEGLHEPRSLTPVWVT

SEQ ID NO: 1437 - DNA, 1956 bp, Homo sapiens
attgttatcaactctttgatatctgatgatcaatgctccaaagaattggattaatatttttacacaatattgttgtagtcagtaactgtttctatttccaggcatttttagatgaattcactaactggtcaagaataaatcccaacaaggccaggattcccatggcaggagatacccaaggtgtggtcgggactgtctctaagccttgtttcacagcatatgaaatgaaaatcggtgcaattacttttcaggttgctactggagatatagccactgaacaggtagatgttattgtaaactcaacagcaaggacatttaatcggaaatcaggtgtgtcaagagctattttagaaggtgctggacaagctgtggaaagtgaatgtgctgtactagctgcacagcctcacagagattttataattacaccaggtggatgcttaaagtgcaaaataataattcatgttcctgggggaaaagatgtcaggaaaacggtcaccagtgttctagaagagtgtgaacagaggaagtacacatcggtttcccttccagccattggaacaggaaatgccggaaaaaaccctatcacagttgctgataacataatcgatgctattgtagacttctcatcacaacattccaccccatcattaaaaacagttaaagttgtcatttttcaacctgagctgctaaatatattctacgacagcatgaaaaaaagagacctctctgcatcactgaactttcagtccacattctccatgactacatgtaatcttcctgaacactggactgacatgaatcatcagctgttttgcatggtccagctagagccaggacaatcagaatataataccataaaggacaagttcacccgaacttgttcttcctacgcaatagagaagattgagaggatacagaatgcatttctctggcagagctaccaggtaaagaaaaggcaaatggatatcaagaatgaccataagaataatgagagactcctcttccatgggacagatgcagactcagtgccatatgtcaatcagcacggctttaatagaagttgtgctgggaaaaatgctgtatcctatggaaaaggaacctattttgctgtggatgccagttattctgccaaggacacctactccaagccagacagcaatgggagaaagcacatgtacgttgtgcgagtacttactggagtcttcacaaagggacgtgcaggattagtcacccctccacccaagaatcctcacaatcccacagatctctttgactcagtgacaaacaatacacgatctccaaagctatttgtggtattctttgataatcaggcttacccagaatatctcataactttcacggcttaaaaatatttttatcatcaaagagatgatttaagtcatctgtaagaacaacatgcaatctttgtctttgcttctggcctgtgtaagcagatgaaagtttcccttttaggtgccaaaatgctgaaaattacctttttaaagtgctctattgctgcgatttgtagcatacctttttttctcagcaaattgatgggtggaagctgagaaatgtatggtaaatgtcacagagctacaaccattcacagacaccaaatctctaggagaataaaaagcacattattctttttctatcagaaaaaaacaagatgcatcaccttaaaaccaagatgacattgttcttcttggaacatgttaagacatcgaatggtggcgggttaaactgtactgcttaagtggagcggctaccgttatgcatctatcacagttggggattttgccttattaaggaaaacttgtcaatagttcagctgaaatgactgaatcacagaatattaactctgttatggaacaaatcataacagattttacctgtttacatttcaggtaaaaatgtatcgcattgttatctaatattaaaaaattacccccaatt

SEQ ID NO: 1438 - protein, 444 aa, Homo sapiens
MLQRIGLIFLHNIVVVSNCFYFQAFLDEFTNWSRINPNKARIPMAGDTQGVVGTVSKPCFTAYEMKIGAITFQVATGDIATEQVDVIVNSTARTFNRKSGVSRAILEGAGQAVESECAVLAAQPHRDFIITPGGCLKCKIIIHVPGGKDVRKTVTSVLEECEQRKYTSVSLPAIGTGNAGKNPITVADNIIDAIVDFSSQHSTPSLKTVKVVIFQPELLNIFYDSMKKRDLSASLNFQSTFSMTTCNLPEHWTDMNHQLFCMVQLEPGQSEYNTIKDKFTRTCSSYAIEKIERIQNAFLWQSYQVKKRQMDIKNDHKNNERLLFHGTDADSVPYVNQHGFNRSCAGKNAVSYGKGTYFAVDASYSAKDTYSKPDSNGRKHMYVVRVLTGVFTKGRAGLVTPPPKNPHNPTDLFDSVTNNTRSPKLFVVFFDNQAYPEYLITFTA

SEQ ID NO: 1439 - DNA, 2970 bp, Homo sapiens
gaatataaataggaaccggcccctcatctgcaggcgctcacaacctagttaggaaacagtaaaacaattaagcgcgccgtggagataggcccacttgtcctgggaaatgaggggaagctggggtttgcagtggtttgattgaagggggactacatgttagaggcacagactgggtgcaggtacacccaaaggaacgagaagagtggaaggaaacaacatccacaaagtaaccacatgctggcgtatcgaaggccgtgatttacggttttgagactttacctcgccagcaaaggggggccagtctgttagcggtgcagattggaggggtgacattggaagctgtccaggaaaaagaaaatggaactggggagcagaaggcctacgcaagagggcgggacagacaggacttgtgactagtagctctggactgaggaatcctccctgctttctggtgcgggagagctagtggatgatggtgccaataacctggatggggaaagtaagctccctcctggaatgcttcattcacaacctccattttcagcaacatcccatctactggtgcttcctggtcgagatacaagtttcctgaaactgctgctctgttttgggcctcacccggccaacagctcactagctggcaagcagtagtatcaagatggcggccccctaggactggctagtcatgtgacctcgggtttcccaagtttgaagcccggcagtcctttcgggggcaaggttcacctgtcacgaaacgagtgtcaccccttcgactctcgcaagccaatcggcatctgagactgggccactgcggtgaggcgatcggaagattggtcctttccagtcgcctagctagggccaatcacggagcgtcccatacttcgcgggcccgcccgtaggccggggagaagcaggaatatcgtcacagcgtggcggtattattacctaaggactcgataggaggtgggacgcgtgttgattgacaggcagatttcccctaccgggatttgagaatttggcgcagtgccccgccttagaggtggggccttatttgattgccaagtaatattccccaatggagtactagctcatggtgacgggcaggcagcttgactaatgagtcctcggcgtggccggcgcagctctccaatcgccgggcggcgggccccagtctgagcggcgatggcggcggcggcggcggcggcagcagcagcgggggctgcgggcggtcggggctccgggccggggcggcggcgccatcttgtgcccggggccggtggggaggccggggagggggccccggggggcgcaggggactacgggaacggcctggagtctgaggaactggagcctgaggagctgctgctggagcccgagccggagcccgagcccgaagaggagccgccccggccccgcgcccccccgggagctccgggccctgggcctggttcgggagcccccggcagccaagaggaggaggaggagccgggactggtcgagggtgacccgggggacggcgccattgaggacccggagctggaagctatcaaagctcgagtcagggagatggaggaagaagctgagaagctaaaggagctacagaacgaggtagagaagcagatgaatatgagtccacctccaggcaatgctggcccggtgatcatgtccattgaggagaagatggaggctgatgcccgttccatctatgttggcaatgtggactatggtgcaacagcagaagagctggaagctcactttcatggctgtggttcagtcaaccgtgttaccatactgtgtgacaaatttagtggccatcccaaagggtttgcgtatatagagttctcagacaaagagtcagtgaggacttccttggccttagatgagtccctatttagaggaaggcaaatcaaggtgatcccaaaacgaaccaacagaccaggcatcagcacaacagaccggggttttccacgagcccgctaccgcgcccggaccaccaactacaacagctcccgctctcgattctacagtggttttaacagcaggccccggggtcgcgtctacaggggccgggctagagcgacatcatggtattccccttactaaaaaaagtgtgtattaggaggagagagaggaaaaaaagaggaaagaaggaaaaaaaaaagaattaaaaaaaaaaaaaagaaaaacagaagatgaccttgatggaaaaaaaatattttttaaaaaaaagatatactgtggaaggggggagaatcccataactaactgctgaggagggacctgctttggggagtaggggaaggcccagggagtggggcagggggctgcttattcactctggggattcgccatggacacgtctcaactgcgcaagctgctgcccatgtttccctgccccacttcacccccttgggggctgctcaagggtaggtgggcgtgggtggtaggaggtttttttttttacccagggctctggaaggacaccaaactgttctgcttgttaccttccctccgtcttctcctcgcctttcacagtcccctcctgcctgctcctgtccagccaggtctaccacccaccccacccctcttctccggctccctgcccctccagattgcctggtgatctattttgtttccttttgtgtttctttttctgttttgagtgtctttctttgcaggtttctgtagccggaagatctccgttccgctcccagcggctccagtgtaaattccccttccccctggggaaatgcactaccttgttttggggggtttaggggtgtttttgtttttcagttgttttgtttttttgttttttttttttttcctttgccttttttcccttttatttggagggaatgggaggaagtgggaacagggaggtgggaggtggattttgtttatttttttagctcatttccaggggtgggaatttttttttaatatgtgtcatgaataaagttgtttttg

SEQ ID NO: 1440 - protein, 306 aa, Homo sapiens
MAAAAAAAAAAGAAGGRGSGPGRRRHLVPGAGGEAGEGAPGGAGDYGNGLESEELEPEELLLEPEPEPEPEEEPPRPRAPPGAPGPGPGSGAPGSQEEEEEPGLVEGDPGDGAIEDPELEAIKARVREMEEEAEKLKELQNEVEKQMNMSPPPGNAGPVIMSIEEKMEADARSIYVGNVDYGATAEELEAHFHGCGSVNRVTILCDKFSGHPKGFAYIEFSDKESVRTSLALDESLFRGRQIKVIPKRTNRPGISTTDRGFPRARYRARTTNYNSSRSRFYSGFNSRPRGRVYRGRARATSWYSPY

SEQ ID NO: 1441 - DNA, 4885 bp, Homo sapiens
tccatgggttccaagagaagaagagctacctccccttccagcagtgtcagcggggactttgatgatgggcaccattctgtgtcaacaccaggcccaagcaggaaaaggaggagactttccaatcttccaactgtagatcctattgccgtgtgccatgaactctataataccatccgagactataaggatgaacagggcagacttctctgtgagctcttcattagggcaccaaagcgaagaaatcaaccagactattatgaagtggtttctcagcccattgacttgatgaaaatccaacagaaactaaaaatggaagagtatgatgatgttaatttgctgactgctgacttccagcttctttttaacaatgcaaagtcctattataagccagattctcctgaatataaagccgcttgcaaactctgggatttgtaccttcgaacaagaaatgagtttgttcagaaaggagaagcagatgacgaagatgatgatgaagatgggcaagacaatcagggcacagtgactgaaggatcttctccagcttacttgaaggagatcctggagcagcttcttgaagccatagttgtagctacaaatccatcaggacgtctcattagcgaactttttcagaaactgccttctaaagtgcaatatccagattattatgcaataattaaggagcctatagatctcaagaccattgcccagaggatacagaatggaagctacaaaagtattcatgcaatggccaaagatatagatctcctcgcaaaaaatgccaaaacttataatgagcctggctctcaagtattcaaggatgcaaattcaattaaaaaaatattttatatgaaaaaggctgaaattgaacatcatgaaatggctaagtcaagtcttcgaatgagtaataaaagagcagtacaaggaggtcgtttatcagcaattacaatggcacttcaatatggctcagaaagtgaagaagatgctgctttagctgctgcacgctatgaagagggagagtcagaagcagaaagcatcacttcctttatggatgtttcaaatcctttttatcagctttatgacacagttaggagttgtcggaataaccaagggcagctaatagctgaacctttttaccatttgccttcaaagaaaaaataccctgattattaccagcaaattaaaatgcccatatcactacaacagatccgaacaaaactgaagaatcaagaatatgaaactttagatcatttggagtgtgatctgaatttaatgtttgaaaatgccaaacgctataatgtgcccaattcagccatctacaagcgagttctaaaattgcagcaagttatgcaggcaaagaagaaagagcttgccaggagagacgatatcgaggacggagacagcatgatctcttcagccacctctgatactggtagtgccaaaagaaaaagtaaaaagaacataagaaagcagcgaatgaaaatcttattcaatgttgttcttgaagctcgagagccaggttcaggcagaagactttgtgacctatttatggttaaaccatccaaaaaggactatcctgattattataaaatcatcttggagccaatggacttgaaaataattgagcataacatccgcaatgacaaatatgctggtgaagagggaatgatagaagacatgaagctgatgttccggaatgccaggcactataatgaggagggctcccaggtttataatgatgcacatatcctggagaagttactcaaggagaaaaggaaagagctgggcccactgcctgatgatgatgacatggcttctcccaaactcaagctgagtaggaagagtggcatttctcctaaaaaatcaaaatacatgactccaatgcagcagaaactaaatgaggtctatgaagctgtaaagaactatactgataagaggggtcgccgcctcagtgccatatttctgaggcttccctctagatctgagttgcctgactactatctgactattaaaaagcccatggacatggaaaaaattcgaagtcacatgatggccaacaagtaccaagatattgactctatggttgaggactttgtcatgatgtttaataatgcctgtacatacaatgagccggagtctttgatctacaaagatgctcttgttctacacaaagtcctgcttgaaacacgcagagacctggagggagatgaggactctcatgtcccaaatgtgactttgctgattcaagagcttatccacaatctttttgtgtcagtcatgagtcatcaggatgatgagggaagatgctacagcgattctttagcagaaattcctgctgtggatcccaactttcctaacaaaccaccccttacatttgacataattaggaagaatgttgaaaataatcgctaccgtcggcttgatttatttcaagagcatatgtttgaagtattggaacgagcaagaaggatgaatcggacagattcagaaatatatgaagatgcagtagaacttcagcagttttttattaaaattcgtgatgaactctgcaaaaatggagagattcttctttcaccggcactcagctataccacaaaacatttgcataatgatgtggagaaagagagaaaggaaaaattgccaaaagaaatagaggaagataaactaaaacgagaagaagaaaaaagagaagctgaaaagagtgaagattcctctggtgctgcaggcctctcaggcttacatcgcacatacagccaggactgtagctttaaaaacagcatgtaccatgttggagattacgtctatgtggaacctgcagaggccaacctacaaccacatatcgtctgtattgaaagactgtgggaggattcagctggtgaaaaatggttgtatggctgttggttttaccgaccaaatgaaacattccacctggctacacgaaaatttctagaaaaagaagtttttaagagtgactattacaacaaagttccagttagtaaaattctaggcaagtgtgtggtcatgtttgtcaaggaatactttaagttatgcccagaaaacttccgagatgaggatgtttttgtctgtgaatcacggtattctgccaaaaccaaatcttttaagaaaattaaactgtggaccatgcccatcagctcagtcaggtttgtccctcgggatgtgcctctgcctgtggttcgcgtggcctctgtatttgcaaatgcagataaaggtgatgatgagaagaatacagacaactcagaggacagtcgagctgaagacaattttaacttggaaaaggaaaaagaagatgtccctgtggaaatgtccaatggtgaaccaggttgccactactttgagcagctccattacaatgacatgtggctgaaggttggcgactgtgtcttcatcaagtcccatggcctggtgcgtcctcgtgtgggcagaattgaaaaagtatgggttcgagatggagctgcatatttttatggccccatcttcattcacccagaagaaacagagcatgagcccacaaaaatgttctacaaaaaagaagtatttctgagtaatctggaagaaacctgccccatgacatgtattctcggaaagtgtgctgtgttgtcattcaaggacttcctctcctgcaggccaactgaaataccagaaaatgacattctgctttgtgagagccgctacaatgagagcgacaagcagatgaagaaattcaaaggattgaagaggttttcactctctgctaaagtggtagatgatgaaatttactacttcagaaaaccaattgttcctcagaaggagccatcacctttgctggaaaagaagatccagttgctagaagctaaatttgccgagttagaaggtggagatgatgatattgaagagatgggagaagaagatagtgaggtcattgaacctccttctctacctcagcttcagacccccctggccagtgagctggacctcatgccctacacacccccacagtctaccccaaagtctgccaaaggcagtgcaaagaaggaaggctccaaacggaaaatcaacatgagtggctacatcctgttcagcagtgagatgagggctgtgattaaggcccaacacccagactactctttcggggagctcagccgcctggtggggacagaatggagaaatcttgagacagccaagaaagcagaatatgaaggcatgatgggtggctatccgccaggccttccacctttgcagggcccagttgatggccttgttagcatgggcagcatgcagccacttcaccctggggggcctccaccccaccatcttccgccaggtgtgcctggcctcccgggcatcccaccaccgggtgtgatgaaccaaggagtggcccctatggtagggactccagcaccaggtggaagtccatatggacaacaggtgggagttttggggcctccagggcagcaggcaccacctccatatcccggcccacatccagctggaccccctgtcatacagcagccaacaacacccatgtttgtagctcccccaccaaagacccagcggcttcttcactcagaggcctacctgaaatacattgaaggactcagtgcggagtccaacagcattagcaagtgggatcagacactggcagctcgaagacgcgacgtccatttgtcgaaagaacaggagagccgcctaccctctcactggctgaaaagcaaaggggcccacaccaccatggcagatgccctctggcgccttcgagatttgatgctccgggacaccctcaacattcgccaagcatacaacctagaaaatgtttaatcacatcattacgtttcttttatatagaagcataaagagttgtggatcagtagccattttagttactgggggt

SEQ ID NO: 1442 - protein, 1602 aa, Homo sapiens
MGSKRRRATSPSSSVSGDFDDGHHSVSTPGPSRKRRRLSNLPTVDPIAVCHELYNTIRDYKDEQGRLLCELFIRAPKRRNQPDYYEVVSQPIDLMKIQQKLKMEEYDDVNLLTADFQLLFNNAKSYYKPDSPEYKAACKLWDLYLRTRNEFVQKGEADDEDDDEDGQDNQGTVTEGSSPAYLKEILEQLLEAIVVATNPSGRLISELFQKLPSKVQYPDYYAIIKEPIDLKTIAQRIQNGSYKSIHAMAKDIDLLAKNAKTYNEPGSQVFKDANSIKKIFYMKKAEIEHHEMAKSSLRMSNKRAVQGGRLSAITMALQYGSESEEDAALAAARYEEGESEAESITSFMDVSNPFYQLYDTVRSCRNNQGQLIAEPFYHLPSKKKYPDYYQQIKMPISLQQIRTKLKNQEYETLDHLECDLNLMFENAKRYNVPNSAIYKRVLKLQQVMQAKKKELARRDDIEDGDSMISSATSDTGSAKRKSKKNIRKQRMKILFNVVLEAREPGSGRRLCDLFMVKPSKKDYPDYYKIILEPMDLKIIEHNIRNDKYAGEEGMIEDMKLMFRNARHYNEEGSQVYNDAHILEKLLKEKRKELGPLPDDDDMASPKLKLSRKSGISPKKSKYMTPMQQKLNEVYEAVKNYTDKRGRRLSAIFLRLPSRSELPDYYLTIKKPMDMEKIRSHMMANKYQDIDSMVEDFVMMFNNACTYNEPESLIYKDALVLHKVLLETRRDLEGDEDSHVPNVTLLIQELIHNLFVSVMSHQDDEGRCYSDSLAEIPAVDPNFPNKPPLTFDIIRKNVENNRYRRLDLFQEHMFEVLERARRMNRTDSEIYEDAVELQQFFIKIRDELCKNGEILLSPALSYTTKHLHNDVEKERKEKLPKEIEEDKLKREEEKREAEKSEDSSGAAGLSGLHRTYSQDCSFKNSMYHVGDYVYVEPAEANLQPHIVCIERLWEDSAGEKWLYGCWFYRPNETFHLATRKFLEKEVFKSDYYNKVPVSKILGKCVVMFVKEYFKLCPENFRDEDVFVCESRYSAKTKSFKKIKLWTMPISSVRFVPRDVPLPVVRVASVFANADKGDDEKNTDNSEDSRAEDNFNLEKEKEDVPVEMSNGEPGCHYFEQLHYNDMWLKVGDCVFIKSHGLVRPRVGRIEKVWVRDGAAYFYGPIFIHPEETEHEPTKMFYKKEVFLSNLEETCPMTCILGKCAVLSFKDFLSCRPTEIPENDILLCESRYNESDKQMKKFKGLKRFSLSAKVVDDEIYYFRKPIVPQKEPSPLLEKKIQLLEAKFAELEGGDDDIEEMGEEDSEVIEPPSLPQLQTPLASELDLMPYTPPQSTPKSAKGSAKKEGSKRKINMSGYILFSSEMRAVIKAQHPDYSFGELSRLVGTEWRNLETAKKAEYEGMMGGYPPGLPPLQGPVDGLVSMGSMQPLHPGGPPPHHLPPGVPGLPGIPPPGVMNQGVAPMVGTPAPGGSPYGQQVGVLGPPGQQAPPPYPGPHPAGPPVIQQPTTPMFVAPPPKTQRLLHSEAYLKYIEGLSAESNSISKWDQTLAARRRDVHLSKEQESRLPSHWLKSKGAHTTMADALWRLRDLMLRDTLNIRQAYNLENV

SEQ ID NO: 1443 - DNA, 4981 bp, Homo sapiens
tccatgggttccaagagaagaagagctacctccccttccagcagtgtcagcggggactttgatgatgggcaccattctgtgtcaacaccaggcccaagcaggaaaaggaggagactttccaatcttccaactgtagatcctattgccgtgtgccatgaactctataataccatccgagactataaggatgaacagggcagacttctctgtgagctcttcattagggcaccaaagcgaagaaatcaaccagactattatgaagtggtttctcagcccattgacttgatgaaaatccaacagaaactaaaaatggaagagtatgatgatgttaatttgctgactgctgacttccagcttctttttaacaatgcaaagtcctattataagccagattctcctgaatataaagccgcttgcaaactctgggatttgtaccttcgaacaagaaatgagtttgttcagaaaggagaagcagatgacgaagatgatgatgaagatgggcaagacaatcagggcacagtgactgaaggatcttctccagcttacttgaaggagatcctggagcagcttcttgaagccatagttgtagctacaaatccatcaggacgtctcattagcgaactttttcagaaactgccttctaaagtgcaatatccagattattatgcaataattaaggagcctatagatctcaagaccattgcccagaggatacagaatggaagctacaaaagtattcatgcaatggccaaagatatagatctcctcgcaaaaaatgccaaaacttataatgagcctggctctcaagtattcaaggatgcaaattcaattaaaaaaatattttatatgaaaaaggctgaaattgaacatcatgaaatggctaagtcaagtcttcgaatgaggactccatccaacttggctgcagccagactgacaggtccttcacacagtaaaggcagccttggtgaagagagaaatcccactagcaagtattaccgtaataaaagagcagtacaaggaggtcgtttatcagcaattacaatggcacttcaatatggctcagaaagtgaagaagatgctgctttagctgctgcacgctatgaagagggagagtcagaagcagaaagcatcacttcctttatggatgtttcaaatcctttttatcagctttatgacacagttaggagttgtcggaataaccaagggcagctaatagctgaacctttttaccatttgccttcaaagaaaaaataccctgattattaccagcaaattaaaatgcccatatcactacaacagatccgaacaaaactgaagaatcaagaatatgaaactttagatcatttggagtgtgatctgaatttaatgtttgaaaatgccaaacgctataatgtgcccaattcagccatctacaagcgagttctaaaattgcagcaagttatgcaggcaaagaagaaagagcttgccaggagagacgatatcgaggacggagacagcatgatctcttcagccacctctgatactggtagtgccaaaagaaaaagtaaaaagaacataagaaagcagcgaatgaaaatcttattcaatgttgttcttgaagctcgagagccaggttcaggcagaagactttgtgacctatttatggttaaaccatccaaaaaggactatcctgattattataaaatcatcttggagccaatggacttgaaaataattgagcataacatccgcaatgacaaatatgctggtgaagagggaatgatagaagacatgaagctgatgttccggaatgccaggcactataatgaggagggctcccaggtttataatgatgcacatatcctggagaagttactcaaggagaaaaggaaagagctgggcccactgcctgatgatgatgacatggcttctcccaaactcaagctgagtaggaagagtggcatttctcctaaaaaatcaaaatacatgactccaatgcagcagaaactaaatgaggtctatgaagctgtaaagaactatactgataagaggggtcgccgcctcagtgccatatttctgaggcttccctctagatctgagttgcctgactactatctgactattaaaaagcccatggacatggaaaaaattcgaagtcacatgatggccaacaagtaccaagatattgactctatggttgaggactttgtcatgatgtttaataatgcctgtacatacaatgagccggagtctttgatctacaaagatgctcttgttctacacaaagtcctgcttgaaacacgcagagacctggagggagatgaggactctcatgtcccaaatgtgactttgctgattcaagagcttatccacaatctttttgtgtcagtcatgagtcatcaggatgatgagggaagatgctacagcgattctttagcagaaattcctgctgtggatcccaactttcctaacaaaccaccccttacatttgacataattaggaagaatgttgaaaataatcgctaccgtcggcttgatttatttcaagagcatatgtttgaagtattggaacgagcaagaaggatgaatcggacagattcagaaatatatgaagatgcagtagaacttcagcagttttttattaaaattcgtgatgaactctgcaaaaatggagagattcttctttcaccggcactcagctataccacaaaacatttgcataatgatgtggagaaagagagaaaggaaaaattgccaaaagaaatagaggaagataaactaaaacgagaagaagaaaaaagagaagctgaaaagagtgaagattcctctggtgctgcaggcctctcaggcttacatcgcacatacagccaggactgtagctttaaaaacagcatgtaccatgttggagattacgtctatgtggaacctgcagaggccaacctacaaccacatatcgtctgtattgaaagactgtgggaggattcagctggtgaaaaatggttgtatggctgttggttttaccgaccaaatgaaacattccacctggctacacgaaaatttctagaaaaagaagtttttaagagtgactattacaacaaagttccagttagtaaaattctaggcaagtgtgtggtcatgtttgtcaaggaatactttaagttatgcccagaaaacttccgagatgaggatgtttttgtctgtgaatcacggtattctgccaaaaccaaatcttttaagaaaattaaactgtggaccatgcccatcagctcagtcaggtttgtccctcgggatgtgcctctgcctgtggttcgcgtggcctctgtatttgcaaatgcagataaaggtgatgatgagaagaatacagacaactcagaggacagtcgagctgaagacaattttaacttggaaaaggaaaaagaagatgtccctgtggaaatgtccaatggtgaaccaggttgccactactttgagcagctccattacaatgacatgtggctgaaggttggcgactgtgtcttcatcaagtcccatggcctggtgcgtcctcgtgtgggcagaattgaaaaagtatgggttcgagatggagctgcatatttttatggccccatcttcattcacccagaagaaacagagcatgagcccacaaaaatgttctacaaaaaagaagtatttctgagtaatctggaagaaacctgccccatgacatgtattctcggaaagtgtgctgtgttgtcattcaaggacttcctctcctgcaggccaactgaaataccagaaaatgacattctgctttgtgagagccgctacaatgagagcgacaagcagatgaagaaattcaaaggattgaagaggttttcactctctgctaaagtggtagatgatgaaatttactacttcagaaaaccaattgttcctcagaaggagccatcacctttgctggaaaagaagatccagttgctagaagctaaatttgccgagttagaaggtggagatgatgatattgaagagatgggagaagaagatagtgaggtcattgaacctccttctctacctcagcttcagacccccctggccagtgagctggacctcatgccctacacacccccacagtctaccccaaagtctgccaaaggcagtgcaaagaaggaaggctccaaacggaaaatcaacatgagtggctacatcctgttcagcagtgagatgagggctgtgattaaggcccaacacccagactactctttcggggagctcagccgcctggtggggacagaatggagaaatcttgagacagccaagaaagcagaatatgaaggcatgatgggtggctatccgccaggccttccacctttgcagggcccagttgatggccttgttagcatgggcagcatgcagccacttcaccctggggggcctccaccccaccatcttccgccaggtgtgcctggcctcccgggcatcccaccaccgggtgtgatgaaccaaggagtggcccctatggtagggactccagcaccaggtggaagtccatatggacaacaggtgggagttttggggcctccagggcagcaggcaccacctccatatcccggcccacatccagctggaccccctgtcatacagcagccaacaacacccatgtttgtagctcccccaccaaagacccagcggcttcttcactcagaggcctacctgaaatacattgaaggactcagtgcggagtccaacagcattagcaagtgggatcagacactggcagctcgaagacgcgacgtccatttgtcgaaagaacaggagagccgcctaccctctcactggctgaaaagcaaaggggcccacaccaccatggcagatgccctctggcgccttcgagatttgatgctccgggacaccctcaacattcgccaagcatacaacctagaaaatgtttaatcacatcattacgtttcttttatatagaagcataaagagttgtggatcagtagccattttagttactgggggt

SEQ ID NO: 1444 - protein, 1634 aa, Homo sapiens
MGSKRRRATSPSSSVSGDFDDGHHSVSTPGPSRKRRRLSNLPTVDPIAVCHELYNTIRDYKDEQGRLLCELFIRAPKRRNQPDYYEVVSQPIDLMKIQQKLKMEEYDDVNLLTADFQLLFNNAKSYYKPDSPEYKAACKLWDLYLRTRNEFVQKGEADDEDDDEDGQDNQGTVTEGSSPAYLKEILEQLLEAIVVATNPSGRLISELFQKLPSKVQYPDYYAIIKEPIDLKTIAQRIQNGSYKSIHAMAKDIDLLAKNAKTYNEPGSQVFKDANSIKKIFYMKKAEIEHHEMAKSSLRMRTPSNLAAARLTGPSHSKGSLGEERNPTSKYYRNKRAVQGGRLSAITMALQYGSESEEDAALAAARYEEGESEAESITSFMDVSNPFYQLYDTVRSCRNNQGQLIAEPFYHLPSKKKYPDYYQQIKMPISLQQIRTKLKNQEYETLDHLECDLNLMFENAKRYNVPNSAIYKRVLKLQQVMQAKKKELARRDDIEDGDSMISSATSDTGSAKRKSKKNIRKQRMKILFNVVLEAREPGSGRRLCDLFMVKPSKKDYPDYYKIILEPMDLKIIEHNIRNDKYAGEEGMIEDMKLMFRNARHYNEEGSQVYNDAHILEKLLKEKRKELGPLPDDDDMASPKLKLSRKSGISPKKSKYMTPMQQKLNEVYEAVKNYTDKRGRRLSAIFLRLPSRSELPDYYLTIKKPMDMEKIRSHMMANKYQDIDSMVEDFVMMFNNACTYNEPESLIYKDALVLHKVLLETRRDLEGDEDSHVPNVTLLIQELIHNLFVSVMSHQDDEGRCYSDSLAEIPAVDPNFPNKPPLTFDIIRKNVENNRYRRLDLFQEHMFEVLERARRMNRTDSEIYEDAVELQQFFIKIRDELCKNGEILLSPALSYTTKHLHNDVEKERKEKLPKEIEEDKLKREEEKREAEKSEDSSGAAGLSGLHRTYSQDCSFKNSMYHVGDYVYVEPAEANLQPHIVCIERLWEDSAGEKWLYGCWFYRPNETFHLATRKFLEKEVFKSDYYNKVPVSKILGKCVVMFVKEYFKLCPENFRDEDVFVCESRYSAKTKSFKKIKLWTMPISSVRFVPRDVPLPVVRVASVFANADKGDDEKNTDNSEDSRAEDNFNLEKEKEDVPVEMSNGEPGCHYFEQLHYNDMWLKVGDCVFIKSHGLVRPRVGRIEKVWVRDGAAYFYGPIFIHPEETEHEPTKMFYKKEVFLSNLEETCPMTCILGKCAVLSFKDFLSCRPTEIPENDILLCESRYNESDKQMKKFKGLKRFSLSAKVVDDEIYYFRKPIVPQKEPSPLLEKKIQLLEAKFAELEGGDDDIEEMGEEDSEVIEPPSLPQLQTPLASELDLMPYTPPQSTPKSAKGSAKKEGSKRKINMSGYILFSSEMRAVIKAQHPDYSFGELSRLVGTEWRNLETAKKAEYEGMMGGYPPGLPPLQGPVDGLVSMGSMQPLHPGGPPPHHLPPGVPGLPGIPPPGVMNQGVAPMVGTPAPGGSPYGQQVGVLGPPGQQAPPPYPGPHPAGPPVIQQPTTPMFVAPPPKTQRLLHSEAYLKYIEGLSAESNSISKWDQTLAARRRDVHLSKEQESRLPSHWLKSKGAHTTMADALWRLRDLMLRDTLNIRQAYNLENV

SEQ ID NO: 1445 - DNA, 4825 bp, Homo sapiens
tccatgggttccaagagaagaagagctacctccccttccagcagtgtcagcggggactttgatgatgggcaccattctgtgtcaacaccaggcccaagcaggaaaaggaggagactttccaatcttccaactgtagatcctattgccgtgtgccatgaactctataataccatccgagactataaggatgaacagggcagacttctctgtgagctcttcattagggcaccaaagcgaagaaatcaaccagactattatgaagtggtttctcagcccattgacttgatgaaaatccaacagaaactaaaaatggaagagtatgatgatgttaatttgctgactgctgacttccagcttctttttaacaatgcaaagtcctattataagccagattctcctgaatataaagccgcttgcaaactctgggatttgtaccttcgaacaagaaatgagtttgttcagaaaggagaagcagatgacgaagatgatgatgaagatgggcaagacaatcagggcacagtgactgaaggatcttctccagcttacttgaaggagatcctggagcagcttcttgaagccatagttgtagctacaaatccatcaggacgtctcattagcgaactttttcagaaactgccttctaaagtgcaatatccagattattatgcaataattaaggagcctatagatctcaagaccattgcccagaggatacagaatggaagctacaaaagtattcatgcaatggccaaagatatagatctcctcgcaaaaaatgccaaaacttataatgagcctggctctcaagtattcaaggatgcaaattcaattaaaaaaatattttatatgaaaaaggctgaaattgaacatcatgaaatggctaagtcaagtcttcgaatgaggactccatccaacttggctgcagccagactgacaggtccttcacacagtaaaggcagccttggtgaagagagaaatcccactagcaagtattaccgtaataaaagagcagtacaaggaggtcgtttatcagcaattacaatggcacttcaatatggctcagaaagtgaagaagatgctgctttagctgctgcacgctatgaagagggagagtcagaagcagaaagcatcacttcctttatggatgtttcaaatcctttttatcagctttatgacacagttaggagttgtcggaataaccaagggcagctaatagctgaacctttttaccatttgccttcaaagaaaaaataccctgattattaccagcaaattaaaatgcccatatcactacaacagatccgaacaaaactgaagaatcaagaatatgaaactttagatcatttggagtgtgatctgaatttaatgtttgaaaatgccaaacgctataatgtgcccaattcagccatctacaagcgagttctaaaattgcagcaagttatgcaggcaaagaagaaagagcttgccaggagagacgatatcgaggacggagacagcatgatctcttcagccacctctgatactggtagtgccaaaagaaaaagtaaaaagaacataagaaagcagcgaatgaaaatcttattcaatgttgttcttgaagctcgagagccaggttcaggcagaagactttgtgacctatttatggttaaaccatccaaaaaggactatcctgattattataaaatcatcttggagccaatggacttgaaaataattgagcataacatccgcaatgacaaatatgctggtgaagagggaatgatagaagacatgaagctgatgttccggaatgccaggcactataatgaggagggctcccaggtttataatgatgcacatatcctggagaagttactcaaggagaaaaggaaagagctgggcccactgcctgatgatgatgacatggcttctcccaaactcaagctgagtaggaagagtggcatttctcctaaaaaatcaaaatacatgactccaatgcagcagaaactaaatgaggtctatgaagctgtaaagaactatactgataagaggggtcgccgcctcagtgccatatttctgaggcttccctctagatctgagttgcctgactactatctgactattaaaaagcccatggacatggaaaaaattcgaagtcacatgatggccaacaagtaccaagatattgactctatggttgaggactttgtcatgatgtttaataatgcctgtacatacaatgagccggagtctttgatctacaaagatgctcttgttctacacaaagtcctgcttgaaacacgcagagacctggagggagatgaggactctcatgtcccaaatgtgactttgctgattcaagagcttatccacaatctttttgtgtcagtcatgagtcatcaggatgatgagggaagatgctacagcgattctttagcagaaattcctgctgtggatcccaactttcctaacaaaccaccccttacatttgacataattaggaagaatgttgaaaataatcgctaccgtcggcttgatttatttcaagagcatatgtttgaagtattggaacgagcaagaaggatgaatcggacagattcagaaatatatgaagatgcagtagaacttcagcagttttttattaaaattcgtgatgaactctgcaaaaatggagagattcttctttcaccggcactcagctataccacaaaacatttgcataatgatgtggagaaagagagaaaggaaaaattgccaaaagaaatagaggaagataaactaaaacgagaagaagaaaaaagagaagctgaaaagagtgaagattcctctggtgctgcaggcctctcaggcttacatcgcacatacagccaggactgtagctttaaaaacagcatgtaccatgttggagattacgtctatgtggaacctgcagaggccaacctacaaccacatatcgtctgtattgaaagactgtgggaggattcagctggtgaaaaatggttgtatggctgttggttttaccgaccaaatgaaacattccacctggctacacgaaaatttctagaaaaagaagtttttaagagtgactattacaacaaagttccagttagtaaaattctaggcaagtgtgtggtcatgtttgtcaaggaatactttaagttatgcccagaaaacttccgagatgaggatgtttttgtctgtgaatcacggtattctgccaaaaccaaatcttttaagaaaattaaactgtggaccatgcccatcagctcagtcaggtttgtccctcgggatgtgcctctgcctgtggttcgcgtggcctctgtatttgcaaatgcagataaaggtgatgatgagaagaatacagacaactcagaggacagtcgagctgaagacaattttaacttggaaaaggaaaaagaagatgtccctgtggaaatgtccaatggtgaaccaggttgccactactttgagcagctccattacaatgacatgtggctgaaggttggcgactgtgtcttcatcaagtcccatggcctggtgcgtcctcgtgtgggcagaattgaaaaagtatgggttcgagatggagctgcatatttttatggccccatcttcattcacccagaagaaacagagcatgagcccacaaaaatgttctacaaaaaagaagtatttctgagtaatctggaagaaacctgccccatgacatgtattctcggaaagtgtgctgtgttgtcattcaaggacttcctctcctgcaggccaactgaaataccagaaaatgacattctgctttgtgagagccgctacaatgagagcgacaagcagatgaagaaattcaaaggattgaagaggttttcactctctgctaaagtggtagatgatgaaatttactacttcagaaaaccaattgttcctcagaaggagccatcacctttgctggaaaagaagatccagttgctagaagctaaatttgccgagttagaaggtggagatgatgatattgaagagatgggagaagaagatagtgaggtcattgaacctccttctctacctcagcttcagacccccctggccagtgagctggacctcatgccctacacacccccacagtctaccccaaagtctgccaaaggcagtgcaaagaaggaaggctccaaacggaaaatcaacatgagtggctacatcctgttcagcagtgagatgagggctgtgattaaggcccaacacccagactactctttcggggagctcagccgcctggtggggacagaatggagaaatcttgagacagccaagaaagcagaatatgaaggtgtgatgaaccaaggagtggcccctatggtagggactccagcaccaggtggaagtccatatggacaacaggtgggagttttggggcctccagggcagcaggcaccacctccatatcccggcccacatccagctggaccccctgtcatacagcagccaacaacacccatgtttgtagctcccccaccaaagacccagcggcttcttcactcagaggcctacctgaaatacattgaaggactcagtgcggagtccaacagcattagcaagtgggatcagacactggcagctcgaagacgcgacgtccatttgtcgaaagaacaggagagccgcctaccctctcactggctgaaaagcaaaggggcccacaccaccatggcagatgccctctggcgccttcgagatttgatgctccgggacaccctcaacattcgccaagcatacaacctagaaaatgtttaatcacatcattacgtttcttttatatagaagcataaagagttgtggatcagtagccattttagttactgggggt

SEQ ID NO: 1446 - protein, 1582 aa, Homo sapiens
MGSKRRRATSPSSSVSGDFDDGHHSVSTPGPSRKRRRLSNLPTVDPIAVCHELYNTIRDYKDEQGRLLCELFIRAPKRRNQPDYYEVVSQPIDLMKIQQKLKMEEYDDVNLLTADFQLLFNNAKSYYKPDSPEYKAACKLWDLYLRTRNEFVQKGEADDEDDDEDGQDNQGTVTEGSSPAYLKEILEQLLEAIVVATNPSGRLISELFQKLPSKVQYPDYYAIIKEPIDLKTIAQRIQNGSYKSIHAMAKDIDLLAKNAKTYNEPGSQVFKDANSIKKIFYMKKAEIEHHEMAKSSLRMRTPSNLAAARLTGPSHSKGSLGEERNPTSKYYRNKRAVQGGRLSAITMALQYGSESEEDAALAAARYEEGESEAESITSFMDVSNPFYQLYDTVRSCRNNQGQLIAEPFYHLPSKKKYPDYYQQIKMPISLQQIRTKLKNQEYETLDHLECDLNLMFENAKRYNVPNSAIYKRVLKLQQVMQAKKKELARRDDIEDGDSMISSATSDTGSAKRKSKKNIRKQRMKILFNVVLEAREPGSGRRLCDLFMVKPSKKDYPDYYKIILEPMDLKIIEHNIRNDKYAGEEGMIEDMKLMFRNARHYNEEGSQVYNDAHILEKLLKEKRKELGPLPDDDDMASPKLKLSRKSGISPKKSKYMTPMQQKLNEVYEAVKNYTDKRGRRLSAIFLRLPSRSELPDYYLTIKKPMDMEKIRSHMMANKYQDIDSMVEDFVMMFNNACTYNEPESLIYKDALVLHKVLLETRRDLEGDEDSHVPNVTLLIQELIHNLFVSVMSHQDDEGRCYSDSLAEIPAVDPNFPNKPPLTFDIIRKNVENNRYRRLDLFQEHMFEVLERARRMNRTDSEIYEDAVELQQFFIKIRDELCKNGEILLSPALSYTTKHLHNDVEKERKEKLPKEIEEDKLKREEEKREAEKSEDSSGAAGLSGLHRTYSQDCSFKNSMYHVGDYVYVEPAEANLQPHIVCIERLWEDSAGEKWLYGCWFYRPNETFHLATRKFLEKEVFKSDYYNKVPVSKILGKCVVMFVKEYFKLCPENFRDEDVFVCESRYSAKTKSFKKIKLWTMPISSVRFVPRDVPLPVVRVASVFANADKGDDEKNTDNSEDSRAEDNFNLEKEKEDVPVEMSNGEPGCHYFEQLHYNDMWLKVGDCVFIKSHGLVRPRVGRIEKVWVRDGAAYFYGPIFIHPEETEHEPTKMFYKKEVFLSNLEETCPMTCILGKCAVLSFKDFLSCRPTEIPENDILLCESRYNESDKQMKKFKGLKRFSLSAKVVDDEIYYFRKPIVPQKEPSPLLEKKIQLLEAKFAELEGGDDDIEEMGEEDSEVIEPPSLPQLQTPLASELDLMPYTPPQSTPKSAKGSAKKEGSKRKINMSGYILFSSEMRAVIKAQHPDYSFGELSRLVGTEWRNLETAKKAEYEGVMNQGVAPMVGTPAPGGSPYGQQVGVLGPPGQQAPPPYPGPHPAGPPVIQQPTTPMFVAPPPKTQRLLHSEAYLKYIEGLSAESNSISKWDQTLAARRRDVHLSKEQESRLPSHWLKSKGAHTTMADALWRLRDLMLRDTLNIRQAYNLENV

SEQ ID NO: 1447 - DNA, 4766 bp, Homo sapiens
tccatgggttccaagagaagaagagctacctccccttccagcagtgtcagcggggactttgatgatgggcaccattctgtgtcaacaccaggcccaagcaggaaaaggaggagactttccaatcttccaactgtagatcctattgccgtgtgccatgaactctataataccatccgagactataaggatgaacagggcagacttctctgtgagctcttcattagggcaccaaagcgaagaaatcaaccagactattatgaagtggtttctcagcccattgacttgatgaaaatccaacagaaactaaaaatggaagagtatgatgatgttaatttgctgactgctgacttccagcttctttttaacaatgcaaagtcctattataagccagattctcctgaatataaagccgcttgcaaactctgggatttgtaccttcgaacaagaaatgagtttgttcagaaaggagaagcagatgacgaagatgatgatgaagatgggcaagacaatcagggcacagtgactgaaggatcttctccagcttacttgaaggagatcctggagcagcttcttgaagccatagttgtagctacaaatccatcaggacgtctcattagcgaactttttcagaaactgccttctaaagtgcaatatccagattattatgcaataattaaggagcctatagatctcaagaccattgcccagaggatacagaatggaagctacaaaagtattcatgcaatggccaaagatatagatctcctcgcaaaaaatgccaaaacttataatgagcctggctctcaagtattcaaggatgcaaattcaattaaaaaaatattttatatgaaaaaggctgaaattgaacatcatgaaatggctaagtcaagtcttcgaatgaggactccatccaacttggctgcagccagactgacaggtccttcacacagtaaaggcagccttggtgaagagagaaatcccactagcaagtattaccgtaataaaagagcagtacaaggaggtcgtttatcagcaattacaatggcacttcaatatggctcagaaagtgaagaagatgctgctttagctgctgcacgctatgaagagggagagtcagaagcagaaagcatcacttcctttatggatgtttcaaatcctttttatcagctttatgacacagttaggagttgtcggaataaccaagggcagctaatagctgaacctttttaccatttgccttcaaagaaaaaataccctgattattaccagcaaattaaaatgcccatatcactacaacagatccgaacaaaactgaagaatcaagaatatgaaactttagatcatttggagtgtgatctgaatttaatgtttgaaaatgccaaacgctataatgtgcccaattcagccatctacaagcgagttctaaaattgcagcaagttatgcaggcaaagaagaaagagcttgccaggagagacgatatcgaggacggagacagcatgatctcttcagccacctctgatactggtagtgccaaaagaaaaagtaaaaagaacataagaaagcagcgaatgaaaatcttattcaatgttgttcttgaagctcgagagccaggttcaggcagaagactttgtgacctatttatggttaaaccatccaaaaaggactatcctgattattataaaatcatcttggagccaatggacttgaaaataattgagcataacatccgcaatgacaaatatgctggtgaagagggaatgatagaagacatgaagctgatgttccggaatgccaggcactataatgaggagggctcccaggtttataatgatgcacatatcctggagaagttactcaaggagaaaaggaaagagctgggcccactgcctgatgatgatgacatggcttctcccaaactcaagctgagtaggaagagtggcatttctcctaaaaaatcaaaatacatgactccaatgcagcagaaactaaatgaggtctatgaagctgtaaagaactatactgataagaggggtcgccgcctcagtgccatatttctgaggcttccctctagatctgagttgcctgactactatctgactattaaaaagcccatggacatggaaaaaattcgaagtcacatgatggccaacaagtaccaagatattgactctatggttgaggactttgtcatgatgtttaataatgcctgtacatacaatgagccggagtctttgatctacaaagatgctcttgttctacacaaagtcctgcttgaaacacgcagagacctggagggagatgaggactctcatgtcccaaatgtgactttgctgattcaagagcttatccacaatctttttgtgtcagtcatgagtcatcaggatgatgagggaagatgctacagcgattctttagcagaaattcctgctgtggatcccaactttcctaacaaaccaccccttacatttgacataattaggaagaatgttgaaaataatcgctaccgtcggcttgatttatttcaagagcatatgtttgaagtattggaacgagcaagaaggatgaatcgctgaaaagagtgaagattcctctggtgctgcaggcctctcaggcttacatcgcacatacagccaggactgtagctttaaaaacagcatgtaccatgttggagattacgtctatgtggaacctgcagaggccaacctacaaccacatatcgtctgtattgaaagactgtgggaggattcagctggtgaaaaatggttgtatggctgttggttttaccgaccaaatgaaacattccacctggctacacgaaaatttctagaaaaagaagtttttaagagtgactattacaacaaagttccagttagtaaaattctaggcaagtgtgtggtcatgtttgtcaaggaatactttaagttatgcccagaaaacttccgagatgaggatgtttttgtctgtgaatcacggtattctgccaaaaccaaatcttttaagaaaattaaactgtggaccatgcccatcagctcagtcaggtttgtccctcgggatgtgcctctgcctgtggttcgcgtggcctctgtatttgcaaatgcagataaaggtgatgatgagaagaatacagacaactcagaggacagtcgagctgaagacaattttaacttggaaaaggaaaaagaagatgtccctgtggaaatgtccaatggtgaaccaggttgccactactttgagcagctccattacaatgacatgtggctgaaggttggcgactgtgtcttcatcaagtcccatggcctggtgcgtcctcgtgtgggcagaattgaaaaagtatgggttcgagatggagctgcatatttttatggccccatcttcattcacccagaagaaacagagcatgagcccacaaaaatgttctacaaaaaagaagtatttctgagtaatctggaagaaacctgccccatgacatgtattctcggaaagtgtgctgtgttgtcattcaaggacttcctctcctgcaggccaactgaaataccagaaaatgacattctgctttgtgagagccgctacaatgagagcgacaagcagatgaagaaattcaaaggattgaagaggttttcactctctgctaaagtggtagatgatgaaatttactacttcagaaaaccaattgttcctcagaaggagccatcacctttgctggaaaagaagatccagttgctagaagctaaatttgccgagttagaaggtggagatgatgatattgaagagatgggagaagaagatagtgaggtcattgaacctccttctctacctcagcttcagacccccctggccagtgagctggacctcatgccctacacacccccacagtctaccccaaagtctgccaaaggcagtgcaaagaaggaaggctccaaacggaaaatcaacatgagtggctacatcctgttcagcagtgagatgagggctgtgattaaggcccaacacccagactactctttcggggagctcagccgcctggtggggacagaatggagaaatcttgagacagccaagaaagcagaatatgaaggcatgatgggtggctatccgccaggccttccacctttgcagggcccagttgatggccttgttagcatgggcagcatgcagccacttcaccctggggggcctccaccccaccatcttccgccaggtgtgcctggcctcccgggcatcccaccaccgggtgtgatgaaccaaggagtggcccctatggtagggactccagcaccaggtggaagtccatatggacaacaggtgggagttttggggcctccagggcagcaggcaccacctccatatcccggcccacatccagctggaccccctgtcatacagcagccaacaacacccatgtttgtagctcccccaccaaagacccagcggcttcttcactcagaggcctacctgaaatacattgaaggactcagtgcggagtccaacagcattagcaagtgggatcagacactggcagctcgaagacgcgacgtccatttgtcgaaagaacaggagagccgcctaccctctcactggctgaaaagcaaaggggcccacaccaccatggcagatgccctctggcgccttcgagatttgatgctccgggacaccctcaacattcgccaagcatacaacctagaaaatgtttaatcacatcattacgtttcttttatatagaagcataaagagttgtggatcagtagccattttagttactgggggt

SEQ ID NO: 1448 - protein, 856 aa, Homo sapiens
MGSKRRRATSPSSSVSGDFDDGHHSVSTPGPSRKRRRLSNLPTVDPIAVCHELYNTIRDYKDEQGRLLCELFIRAPKRRNQPDYYEVVSQPIDLMKIQQKLKMEEYDDVNLLTADFQLLFNNAKSYYKPDSPEYKAACKLWDLYLRTRNEFVQKGEADDEDDDEDGQDNQGTVTEGSSPAYLKEILEQLLEAIVVATNPSGRLISELFQKLPSKVQYPDYYAIIKEPIDLKTIAQRIQNGSYKSIHAMAKDIDLLAKNAKTYNEPGSQVFKDANSIKKIFYMKKAEIEHHEMAKSSLRMRTPSNLAAARLTGPSHSKGSLGEERNPTSKYYRNKRAVQGGRLSAITMALQYGSESEEDAALAAARYEEGESEAESITSFMDVSNPFYQLYDTVRSCRNNQGQLIAEPFYHLPSKKKYPDYYQQIKMPISLQQIRTKLKNQEYETLDHLECDLNLMFENAKRYNVPNSAIYKRVLKLQQVMQAKKKELARRDDIEDGDSMISSATSDTGSAKRKSKKNIRKQRMKILFNVVLEAREPGSGRRLCDLFMVKPSKKDYPDYYKIILEPMDLKIIEHNIRNDKYAGEEGMIEDMKLMFRNARHYNEEGSQVYNDAHILEKLLKEKRKELGPLPDDDDMASPKLKLSRKSGISPKKSKYMTPMQQKLNEVYEAVKNYTDKRGRRLSAIFLRLPSRSELPDYYLTIKKPMDMEKIRSHMMANKYQDIDSMVEDFVMMFNNACTYNEPESLIYKDALVLHKVLLETRRDLEGDEDSHVPNVTLLIQELIHNLFVSVMSHQDDEGRCYSDSLAEIPAVDPNFPNKPPLTFDIIRKNVENNRYRRLDLFQEHMFEVLERARRMNR

SEQ ID NO: 1449 - DNA, 5145 bp, Homo sapiens
ccatgggttccaagagaagaagagctacctccccttccagcagtgtcagcggggactttgatgatgggcaccattctgtgtcaacaccaggcccaagcaggaaaaggaggagactttccaatcttccaactgtagatcctattgccgtgtgccatgaactctataataccatccgagactataaggatgaacagggcagacttctctgtgagctcttcattagggcaccaaagcgaagaaatcaaccagactattatgaagtggtttctcagcccattgacttgatgaaaatccaacagaaactaaaaatggaagagtatgatgatgttaatttgctgactgctgacttccagcttctttttaacaatgcaaagtcctattataagccagattctcctgaatataaagccgcttgcaaactctgggatttgtaccttcgaacaagaaatgagtttgttcagaaaggagaagcagatgacgaagatgatgatgaagatgggcaagacaatcagggcacagtgactgaaggatcttctccagcttacttgaaggagatcctggagcagcttcttgaagccatagttgtagctacaaatccatcaggacgtctcattagcgaactttttcagaaactgccttctaaagtgcaatatccagattattatgcaataattaaggagcctatagatctcaagaccattgcccagaggatacagaatggaagctacaaaagtattcatgcaatggccaaagatatagatctcctcgcaaaaaatgccaaaacttataatgagcctggctctcaagtattcaaggatgcaaattcaattaaaaaaatattttatatgaaaaaggctgaaattgaacatcatgaaatggctaagtcaagtcttcgaatgaggactccatccaacttggctgcagccagactgacaggtccttcacacagtaaaggcagccttggtgaagagagaaatcccactagcaagtattaccgtaataaaagagcagtacaaggaggtcgtttatcagcaattacaatggcacttcaatatggctcagaaagtgaagaagatgctgctttagctgctgcacgctatgaagagggagagtcagaagcagaaagcatcacttcctttatggatgtttcaaatcctttttatcagctttatgacacagttaggagttgtcggaataaccaagggcagctaatagctgaacctttttaccatttgccttcaaagaaaaaataccctgattattaccagcaaattaaaatgcccatatcactacaacagatccgaacaaaactgaagaatcaagaatatgaaactttagatcatttggagtgtgatctgaatttaatgtttgaaaatgccaaacgctataatgtgcccaattcagccatctacaagcgagttctaaaattgcagcaagttatgcaggcaaagaagaaagagcttgccaggagagacgatatcgaggacggagacagcatgatctcttcagccacctctgatactggtagtgccaaaagaaaaagtaaaaagaacataagaaagcagcgaatgaaaatcttattcaatgttgttcttgaagctcgagagccaggttcaggcagaagactttgtgacctatttatggttaaaccatccaaaaaggactatcctgattattataaaatcatcttggagccaatggacttgaaaataattgagcataacatccgcaatgacaaatatgctggtgaagagggaatgatagaagacatgaagctgatgttccggaatgccaggcactataatgaggagggctcccaggtttataatgatgcacatatcctggagaagttactcaaggagaaaaggaaagagctgggcccactgcctgatgatgatgacatggcttctcccaaactcaagctgagtaggaagagtggcatttctcctaaaaaatcaaaatacatgactccaatgcagcagaaactaaatgaggtctatgaagctgtaaagaactatactgataagaggggtcgccgcctcagtgccatatttctgaggcttccctctagatctgagttgcctgactactatctgactattaaaaagcccatggacatggaaaaaattcgaagtcacatgatggccaacaagtaccaagatattgactctatggttgaggactttgtcatgatgtttaataatgcctgtacatacaatgagccggagtctttgatctacaaagatgctcttgttctacacaaagtcctgcttgaaacacgcagagacctggagggagatgaggactctcatgtcccaaatgtgactttgctgattcaagagcttatccacaatctttttgtgtcagtcatgagtcatcaggatgatgagggaagatgctacagcgattctttagcagaaattcctgctgtggatcccaactttcctaacaaaccaccccttacatttgacataattaggaagaatgttgaaaataatcgctaccgtcggcttgatttatttcaagagcatatgtttgaagtattggaacgagcaagaaggatgaatcggacagattcagaaatatatgaagatgcagtagaacttcagcagttttttattaaaattcgtgatgaactctgcaaaaatggagagattcttctttcaccggcactcagctataccacaaaacatttgcataatgatgtggagaaagagagaaaggaaaaattgccaaaagaaatagaggaagataaactaaaacgagaagaagaaaaaagagaagctgaaaagagtgaagattcctctggtgctgcaggcctctcaggcttacatcgcacatacagccaggactgtagctttaaaaacagcatgtaccatgttggagattacgtctatgtggaacctgcagaggccaacctacaaccacatatcgtctgtattgaaagactgtgggaggattcagctggtgaaaaatggttgtatggctgttggttttaccgaccaaatgaaacattccacctggctacacgaaaatttctagaaaaagaagtttttaagagtgactattacaacaaagttccagttagtaaaattctaggcaagtgtgtggtcatgtttgtcaaggaatactttaagttatgcccagaaaacttccgagatgaggatgtttttgtctgtgaatcacggtattctgccaaaaccaaatcttttaagaaaattaaactgtggaccatgcccatcagctcagtcaggtttgtccctcgggatgtgcctctgcctgtggttcgcgtggcctctgtatttgcaaatgcagataaaggtgatgatgagaagaatacagacaactcagaggacagtcgagctgaagacaattttaacttggaaaaggaaaaagaagatgtccctgtggaaatgtccaatggtgaaccaggttgccactactttgagcagctccattacaatgacatgtggctgaaggttggcgactgtgtcttcatcaagtcccatggcctggtgcgtcctcgtgtgggcagaattgaaaaagtatgggttcgagatggagctgcatatttttatggccccatcttcattcacccagaagaaacagagcatgagcccacaaaaatgttctacaaaaaagaagtatttctgagtaatctggaagaaacctgccccatgacatgtattctcggaaagtgtgctgtgttgtcattcaaggacttcctctcctgcaggccaactgaaataccagaaaatgacattctgctttgtgagagccgctacaatgagagcgacaagcagatgaagaaattcaaaggattgaagaggttttcactctctgctaaagtggtagatgatgaaatttactacttcagaaaaccaattgttcctcagaaggagccatcacctttgctggaaaagaagatccagttgctagaagctaaatttgccgagttagaaggtggagatgatgatattgaagagatgggagaagaagatagtgaggtcattgaacctccttctctacctcagcttcagacccccctggccagtgagctggacctcatgccctacacacccccacagtctaccccaaagtctgccaaaggcagtgcaaagaaggaaggctccaaacggaaaatcaacatgagtggctacatcctgttcagcagtgagatgagggctgtgattaaggcccaacacccagactactctttcggggagctcagccgcctggtggggacagaatggagaaatcttgagacagccaagaaagcagaatatgaagagcgggcagctaaagttgctgagcagcaggagagagagcgagcagcacagcaacagcagccgagtgcttctccccgagcaggcacccctgtgggggctctcatgggggtggtgccaccaccaacaccaatggggatgctcaatcagcagttgacacctgttgcaggcatgatgggtggctatccgccaggccttccacctttgcagggcccagttgatggccttgttagcatgggcagcatgcagccacttcaccctggggggcctccaccccaccatcttccgccaggtgtgcctggcctcccgggcatcccaccaccgggtgtgatgaaccaaggagtggcccctatggtagggactccagcaccaggtggaagtccatatggacaacaggtgggagttttggggcctccagggcagcaggcaccacctccatatcccggcccacatccagctggaccccctgtcatacagcagccaacaacacccatgtttgtagctcccccaccaaagacccagcggcttcttcactcagaggcctacctgaaatacattgaaggactcagtgcggagtccaacagcattagcaagtgggatcagacactggcagctcgaagacgcgacgtccatttgtcgaaagaacaggagagccgcctaccctctcactggctgaaaagcaaaggggcccacaccaccatggcagatgccctctggcgccttcgagatttgatgctccgggacaccctcaacattcgccaagcatacaacctagaaaatgtttaatcacatcattacgtttcttttatatagaagcataaagagttgtggatcagtagccattttagttactgggggt

SEQ ID NO: 1450 - protein, 1689 aa, Homo sapiens
MGSKRRRATSPSSSVSGDFDDGHHSVSTPGPSRKRRRLSNLPTVDPIAVCHELYNTIRDYKDEQGRLLCELFIRAPKRRNQPDYYEVVSQPIDLMKIQQKLKMEEYDDVNLLTADFQLLFNNAKSYYKPDSPEYKAACKLWDLYLRTRNEFVQKGEADDEDDDEDGQDNQGTVTEGSSPAYLKEILEQLLEAIVVATNPSGRLISELFQKLPSKVQYPDYYAIIKEPIDLKTIAQRIQNGSYKSIHAMAKDIDLLAKNAKTYNEPGSQVFKDANSIKKIFYMKKAEIEHHEMAKSSLRMRTPSNLAAARLTGPSHSKGSLGEERNPTSKYYRNKRAVQGGRLSAITMALQYGSESEEDAALAAARYEEGESEAESITSFMDVSNPFYQLYDTVRSCRNNQGQLIAEPFYHLPSKKKYPDYYQQIKMPISLQQIRTKLKNQEYETLDHLECDLNLMFENAKRYNVPNSAIYKRVLKLQQVMQAKKKELARRDDIEDGDSMISSATSDTGSAKRKSKKNIRKQRMKILFNVVLEAREPGSGRRLCDLFMVKPSKKDYPDYYKIILEPMDLKIIEHNIRNDKYAGEEGMIEDMKLMFRNARHYNEEGSQVYNDAHILEKLLKEKRKELGPLPDDDDMASPKLKLSRKSGISPKKSKYMTPMQQKLNEVYEAVKNYTDKRGRRLSAIFLRLPSRSELPDYYLTIKKPMDMEKIRSHMMANKYQDIDSMVEDFVMMFNNACTYNEPESLIYKDALVLHKVLLETRRDLEGDEDSHVPNVTLLIQELIHNLFVSVMSHQDDEGRCYSDSLAEIPAVDPNFPNKPPLTFDIIRKNVENNRYRRLDLFQEHMFEVLERARRMNRTDSEIYEDAVELQQFFIKIRDELCKNGEILLSPALSYTTKHLHNDVEKERKEKLPKEIEEDKLKREEEKREAEKSEDSSGAAGLSGLHRTYSQDCSFKNSMYHVGDYVYVEPAEANLQPHIVCIERLWEDSAGEKWLYGCWFYRPNETFHLATRKFLEKEVFKSDYYNKVPVSKILGKCVVMFVKEYFKLCPENFRDEDVFVCESRYSAKTKSFKKIKLWTMPISSVRFVPRDVPLPVVRVASVFANADKGDDEKNTDNSEDSRAEDNFNLEKEKEDVPVEMSNGEPGCHYFEQLHYNDMWLKVGDCVFIKSHGLVRPRVGRIEKVWVRDGAAYFYGPIFIHPEETEHEPTKMFYKKEVFLSNLEETCPMTCILGKCAVLSFKDFLSCRPTEIPENDILLCESRYNESDKQMKKFKGLKRFSLSAKVVDDEIYYFRKPIVPQKEPSPLLEKKIQLLEAKFAELEGGDDDIEEMGEEDSEVIEPPSLPQLQTPLASELDLMPYTPPQSTPKSAKGSAKKEGSKRKINMSGYILFSSEMRAVIKAQHPDYSFGELSRLVGTEWRNLETAKKAEYEERAAKVAEQQERERAAQQQQPSASPRAGTPVGALMGVVPPPTPMGMLNQQLTPVAGMMGGYPPGLPPLQGPVDGLVSMGSMQPLHPGGPPPHHLPPGVPGLPGIPPPGVMNQGVAPMVGTPAPGGSPYGQQVGVLGPPGQQAPPPYPGPHPAGPPVIQQPTTPMFVAPPPKTQRLLHSEAYLKYIEGLSAESNSISKWDQTLAARRRDVHLSKEQESRLPSHWLKSKGAHTTMADALWRLRDLMLRDTLNIRQAYNLENV

SEQ ID NO: 1451 - DNA, 3562 bp, Homo sapiens
agttctggccgctgtcccggtgcgcacggacgtggctcgagtttcctctgctctccgctctcgcccgctagctctcctcccttccgctcctgcttctctccgggtctcccgctccagctccagccccacccggccggtcccgcacggctccgggtagccatggaggaccccacgctctatattgtcgagcggccgcttcccgggtaccccgacgccgaggccccggagccttcctccgctggggctcaggcagcggaggagccgtcgggggccggctcagaagagctgatcaagtcggaccaggtgaacggcgtgctggtgctgagcctcctggacaaaatcatcggggccgtagaccagatccagctgactcaagcacagctggaggagcggcaggcggagatggagggcgcagtgcagagcatccagggcgagctgagcaagctgggcaaggcgcacgccaccacgagcaatacggtgagcaagctgctggagaaggtgcgcaaggtcagcgtcaacgtgaagaccgtgcgcggcagcctggagcgccaggcggggcagatcaagaagctggaggtcaacgaggccgagctgctgcggcgccgcaactttaaagtcatgatctaccaggatgaagtgaagctgccggccaaactgagcatcagcaaatcgctgaaagagtcggaggcgctgccagagaaggagggcgaggagctgggcgagggcgagcggcccgaggaggacgcagcggcgctggagctttcgtcggacgaggcggtggaggttgaggaggttattgaggagtcccgcgcagagcgtatcaagcgcagcggcctgcggcgcgtggacgacttcaagaaggccttctccaaggagaagatggagaagaccaaggtgcgtacccgcgagaacctggagaagacgcgcctcaagaccaaggaaaacctggagaagacgcggcacaccctggagaagcgcatgaacaagctgggcacgcgcctggtgcccgccgagcggcgcgagaaactgaagacgtcgcgggacaagttgcgcaaatccttcacgcccgaccacgtggtgtacgcgcgctccaagaccgcggtctacaaggtgccacccttcaccttccacgtcaagaagatccgcgagggccaggtggaagtgctcaaggccaccgagatggtggaggtgggcgccgacgacgacgagggcggcgcggagcgcggggaggccggcgacctgcggcgcgggagcagccccgacgtgcacgcgctgctggagatcaccgaggagtcggacgccgtgctggtggacaagagcgacagcgactgagccgcccccgctgccacccaccccattcctcgctccttccgaacttcctctttcgcattctctctcggctcgagctggctgagatttttctaaattgaaaacacgcccccctccccacacctccaggaactccactcccagtcttagagctgttaggacccgatggggaggcagcccccgcagtggacaacccccgcttggacacagtccgagtggaatgggaagggaatggtcaatccctgtcctggttgtccaagtcgggatctcagaggaaattgcagtgattccacggttaggcccccctgggggggctgccttcccctcagcctctccccacaccacccacccagctgctgtcattccgctcactgagctcttcttcattctcaccctgatccctgggggactcaaagccaaaactgcccaaagaggaaagattgaatcctaaaggggatccctgcccccatgggaggccccctactagaaggacgtgaaagcagcttttgggggaaactgaggcagtggggaagacagagcagaatgagccctcaccctggctgggggtccagcacaggctgtatctgcagagggtcccagaggaacgctggagccaagagaagccctgggaaggaggggtggggaacgacatgcatgtgagggatggcacactgatgtgtttatgcacctgtacacaggagcgcatggccatggctttggaaaggagaatggaaaaatagaagaaggtcggccgggcttggtggcttatgcctgtaaccccagcactttgggaggccgaggtgggcggatcacctgaagtcaggagttcgggaccagcctggcaaacaccccatctctactaagcgaaaacccatctctactaaaattacaaaaattagctgggcatggttgcgcatgcctgtaatcccagctactttggaggctgaggtggggagaattgcttgaacctgggaggtggaggttgcagtgagccaaggtcgcgacactgcactccagcctgggtgacagagtgagactccatctcaacagaaggaaaaaaaaggaaaataggagaaggtggaaatgggtgaagagagaagtcccctcactagctgcatgagaaatctatcttactgtggttctccatgggcagcaggaccatttttcagaatcaagagggaggacagtgtgagaaggcgatgatccaaagaagacagagaggtcagccccacccgatccctcaaatgggctcttggaggcacccccaggggcagcccatttctcaaagtccagaaaattagggtcccagaagggggcagcagcaggctgggagttaggagggagagcagggtgccggccctgccaccaagttgagagctggaggggaggtggggagagaacatcacagagcagccagccctggttcactcctggcagtttcttctcaagctccttccctaggagcatggtggcacgtgcctgtggtctcagctacttgggaggctgaggcgggaggatcgccagagcccaggagtttgaggctgcagtgagctatgagggtgcctctgtgctccatcctaggcaacagagtgatacgctgtttaaaaaggaaaaaatccttccctagagctagtatcctaaagctgcagagctagcccagacctcattggtttccttgtccttggggtgcttttcctgaatctttgcgggtgaagggagtgttgctcccagtccagaggcctgattctgtttggactgggttctcaagacacgaccaggttctcaagacacgagtccccttgttcctccccattaaagggggtttgtcagaagcaagaacagcccctctccccagtcacagcctgaagggaggccccgagagcttcctccttccccccacctgctccttaccttctctgccctgctttttagaactgcagttcattgttttaagggattgggggagggagcctggggacacaaaccttttatacaatacaaagctttgctttttttttttttttcttccttttccctttctcggttctcttctctcctctgaatggctgaagacccctctgccgagggaggttggggattgtgggacaaggtcccttggtgctgatggcctgaaggggcctgagctgtgggcagatgcagttttctgtgggcttggggaacctctcacgttgctgtgtcctggtgagcagcccgaccaataaacctgcttttc

SEQ ID NO: 1452 - protein, 390 aa, Homo sapiens
MEDPTLYIVERPLPGYPDAEAPEPSSAGAQAAEEPSGAGSEELIKSDQVNGVLVLSLLDKIIGAVDQIQLTQAQLEERQAEMEGAVQSIQGELSKLGKAHATTSNTVSKLLEKVRKVSVNVKTVRGSLERQAGQIKKLEVNEAELLRRRNFKVMIYQDEVKLPAKLSISKSLKESEALPEKEGEELGEGERPEEDAAALELSSDEAVEVEEVIEESRAERIKRSGLRRVDDFKKAFSKEKMEKTKVRTRENLEKTRLKTKENLEKTRHTLEKRMNKLGTRLVPAERREKLKTSRDKLRKSFTPDHVVYARSKTAVYKVPPFTFHVKKIREGQVEVLKATEMVEVGADDDEGGAERGEAGDLRRGSSPDVHALLEITEESDAVLVDKSDSD

SEQ ID NO: 1453 - DNA, 2062 bp, Homo sapiens
atggaggaccccacgctctatattgtcgagcggccgcttcccgggtaccccgacgccgaggccccggagccttcctccgctggggctcaggcagcggaggagccgtcgggggccggctcagaagagctgatcaagtcggaccaggtgaacggcgtgctggtgctgagcctcctggacaaaatcatcggggccgtagaccagatccagctgactcaagcacagctggaggagcggcaggcggagatggagggcgcagtgcagagcatccagggcgagctgagcaagctgggcaaggcgcacgccaccacgagcaatacggtgagcaagctgctggagaaggtgcgcaaggtcagcgtcaacgtgaagaccgtgcgcggcagcctggagcgccaggcggggcagatcaagaagctggaggtcaacgaggccgagctgctgcggcgccgcaactttaaagtcatgatctaccaggatgaagtgaagctgccggccaaactgagcatcagcaaatcgctgaaagagtcggaggcgctgccagagaaggagggcgaggagctgggcgagggcgagcggcccgaggaggacgcagcggcgctggagctttcgtcggacgaggcggtggaggttgaggaggttattgaggagtcccgcgcagagcgtatcaagcgcagcggcctgcggcgcgtggacgacttcaagaaggccttctccaaggagaagatggagaagaccaaggtgcgtacccgcgagaacctggagaagacgcgcctcaagaccaaggaaaacctggagaagacgcggcacaccctggagaagcgcatgaacaagctgggcacgcgcctggtgcccgccgagcggcgcgagaaactgaagacgtcgcgggacaagttgcgcaaatccttcacgcccgaccacgtggtgtacgcgcgctccaagaccgcggtctacaaggtgccacccttcaccttccacgtcaagaagatccgcgagggccaggtggaagtgctcaaggccaccgagatggtggaggtgggcgccgacgacgacgagggcggcgcggagcgcggggaggccggcgacctgcggcgcgggagcagccccgacgtgcacgcgctgctggagatcaccgaggagtcggacgccgtgctggtggacaagagcgacagcgactgagccgcccccgctgccacccaccccattcctcgctccttccgaacttcctctttcgcattctctctcggctcgagctggctgagatttttctaaattgaaaacacgcccccctccccacacctccaggaactccactcccagtcttagagctgccttcccctcagcctctccccacaccacccacccagctgctgtcattccgctcactgagctcttcttcattctcaccctgatccctgggggactcaaagccaaaactgcccaaagaggaaagattgaatcctaaaggggatccctgcccccatgggaggccccctactagaaggacgtgaaagcagcttttgggggaaactgaggcagtggggaagacagagcagaatgagccctcaccctggctgggggtccagcacaggctgtatctgcagagggtcccagaggaacgctggagccaagagaagccctgggaaggaggggtggggaacgacatgcatgtgagggatggcacactgatgtgtttatgcacctgtacacaggagcgcatggccatggctttggaaaggagaatggaaaaatagaagaaggtcggccgggcttggtggcttatgcctgtaaccccagcactttgggaggccgaggtgggcggatcacctgaagtcaggagttcgggaccagcctggcaaacaccccatctctactaagcgaaaacccatctctactaaaattacaaaaattagctgggcatggttgcgcatgcctgtaatcccagctactttggaggctgaggtggggagaattgcttgaacctgggaggtggaggttgcagtgagccaaggtcgcgacactgcactccagcctgggtgacagagtgagactccatctcaacagaagg

SEQ ID NO: 1454 - protein, 390 aa, Homo sapiens; identical to SEQ ID NO: 1452

SEQ ID NO: 1455 - DNA, 5222 bp, Homo sapiens
gttggagcggggccggcgccgcagccgcttctgctggctgagctgctgccgccgccgggcggacgggcggacgcgcggagctgggggcggcgcggcggggccggcggggcgcggcggggctgaccggccccgatgaggcggaaggagaagcggctcctgcaggcggtggcgctggtgctggcggccctggtcctcctgcccaacgtggggctttgggcgctgtaccgcgagcggcagcccgacggcacccctgggggatcgggggcggcggtggcgccggcggcgggacagggctcacacagtcgacaaaagaaaacgtttttcttgggagatgggcagaagctgaaggactggcatgacaaggaggccatccggagggacgctcagcgcgtaggaaatggagaacaaggaagaccttaccccatgaccgatgctgagagagtggatcaggcataccgagaaaatggatttaacatctacgtcagtgataaaatctccttgaatcgctctctcccagatatccggcacccaaactgcaacagcaagcgctacctggagacacttcccaacacaagcatcatcatccccttccacaacgagggctggtcctccctcctccgcaccgtccacagtgtgctcaatcgctcgcctccagagctggtcgccgagattgtactggtcgacgacttcagtgatcgagagcacctgaagaagcctcttgaagactacatggcccttttccccagtgtgaggattcttcgaaccaagaaacgggaagggctgataaggacccgaatgctgggggcctcagtggcaactggggatgtcatcacattcttggattcacactgtgaagccaatgtcaactggcttccccccttgcttgaccgcattgctcggaaccgcaagaccattgtgtgcccgatgattgatgtaattgaccatgacgactttcggtacgagacacaggcaggggatgccatgcggggagcctttgactgggagatgtactacaagcggatcccgatccctccagaactgcagaaagctgaccccagcgacccatttgagtctcccgtgatggccggtggactgttcgccgtggatcggaagtggttctgggaactcggcgggtatgacccaggcttggagatctggggaggggagcagtatgaaatctccttcaaggtgtggatgtgtgggggccgcatggaggacatcccctgctccagggtgggccatatctacaggaagtatgtgccctacaaggtcccggccggagtcagcctggcccggaaccttaagcgggtggccgaagtgtggatggatgagtacgcagagtacatttaccagcgccggcctgaataccgccacctctccgctggggatgtcgcagtccagaaaaagctccgcagctcccttaactgcaagagtttcaagtggtttatgacgaagatagcctgggacctgcccaaattctacccacccgtggagcccccggctgcagcttggggggagatccgaaatgtgggcacagggctgtgtgcagacacaaagcacggggccttgggctccccactaaggctagagggctgcgtccgaggccgtggggaggctgcctggaacaacatgcaggtattcaccttcacctggagagaggacatccggcctggagacccccagcacaccaagaagttctgctttgatgccatttcccacaccagccctgtcacgctgtacgactgccacagcatgaagggcaaccagctgtggaaataccgcaaagacaagaccctgtaccaccctgtcagtggcagctgcatggactgcagtgaaagtgaccataggatcttcatgaacacctgcaacccatcctctctcacccagcagtggctgtttgaacacaccaactcaacagtcttggaaaaattcaataggaactgagccctcatgtccccttggcaggccccccagggtctggcactcactgcagacttcctctttcaagggaggcagggcccctgtgggcactaggtgtaaaaggtgctggccaaatggttcagggtgaagagggctcttgattcaggggctggggtctgcctggtccttgagcccctgagttgtgggggtagggtgaagagcatatcccacaagaggccccacagggagcagagactgctttaatccctgctgacatcacggaaaagcaacagagccttttcaactttgtcactatgtccccttgaacattatgtgggagaacaccaaggtagcctaggccacccaaaagtgagtcctgcgaggttgcccagccctcagatggctctcctacatgatggtgctttagaaacaaaggtaaaatttgcctgtttggggcagcttttagtatcgatgccactcatctgcagcagaagagaaagaagtcctcttggggctttttagtttctgccgtcctggggggaacattgcagttactgcacagcttctgttctctgtcacaaccccaggtgatttggtccggtcaaaggccatacttggggccctaagagtgttcagtattgaatgctgatcagctgccaggtgaggagtcagaagagggagcccccctagacatttctttgcagctatggacatgcgggatatctccccctgctctctgggtatttgaaatgtcaattttagcactctccaggcacaaggacagcccagcaccagctttacagggcagtgtttcagatggccctgagcccacggaaaaggccaggtagacctccaaactagaaatgctggctgatttgccctgatccatgcttccatttccctgtctctcttccccaggcaattactggcctcaaaagaggaacagaggtgctgcgaggtgctcacctcacagagtctggaggcctccaggatcaactgtgggcaaagtgcctgcctctgacctcatcatggttctagttctcatacagaactccagaatttttaaagaactctataattggattgcaaactaggatgctacataggattctggtattccacatccaatatggatttctagaatgctgtgattaaaggagccagccaggtgtaatacagtcaaggcagcccccagcctagagacaatctgtgaaatccaaagttggtggtgttgggaaagcagggggacatgtgtccctcagctcagcagaggctgtggtacaacatggtccttggtgaagacctgcacccctggaacctcccaccatcatcacaactgtagtctcatttgcagtggagaaaagaacccgacgtcccacagccagatatacacccagctccatgccagcccttcatgtttaccttttgctttgttaattacatgtcagactcctagagggcctccagactaataggaagcatttctgtaaccaacctgccacccactgattcagaaatggaaatcacattccacaatctatggcttccaccagctagcccaggaaatacttgaaatcagcattccaattagtgttgagtctcttgattgtgtcatttaccaattaaataactgagacctaagtctgggaacagagccacgaatctgcctttgagatgctggcagatctcaaggccatcaattattgggggagggagggacaaacactcccaatcatccaccagtcagactgaatgtgtagctggcgaggaattacttccacttctggcccagcacaagccctgctttggccacctgtctgcaagagaggcggcccctgtgcttgcaacgcttacgtgttgatcccagtgtccttttccaaatgagtgctgtagctttagaagtggccctctatagaaagaagtcaaaagatgaggccccttctagaatctaggataacaagagtgttgacagtttgaggagtcgaattgagattcatcatcaaagagcaatgcagcgtcgttaaaataaaaactgtgccttttaaaaagaaaaatgcaaatatagagcaaatccctaaacttgaaccatttcctagtgccttgctagacaaacataaaggggcagggttgtggggaggggaacgtttttggtggtgtgtgcagttcctactggatgagtgtgtgtttcttaatgtctcatttcaagcaggagatgttgggtctggagcaagatctgagactgagatgtcccccaagggtgacaggtcagatttatttcagtcagtgcaagtcacactccaaactaaaggctgggcagtgcgtttagtctgtggcctagaagacctcatcagcccccgagaggaggccttgcattacctcactgggacctgtttgggggccatccctgcggtccaccctctgaacccccagcatgtttgtcctgtttctcaccattgggttaaggggtgccgagcactagctagacttccacatagtcccaccccaagtgggcggcagtgttcctggcatgaccaggattcctgtgaaagcaggagcagcagcaagccgtcccgggcctgcctttcccatcctttggttctcctttccagtctgggttcacaccctgaaaagggatgggtgtgtcctctgagcactctggcatttgtcattgctgagcccatatcagtaggtcctgggacttgacaaagtatgtgggaggggaaggaaggacagaacttgactggctccatttcatggaccaactgatcaattgccagtactaagccactcattgttatggcttcctttttgaaaaccacctgtctcaaggattcaggtttctgctcacatccccagctgatgctcaataaaactcagccaggagcatatggagatgctgacagccaggtaatgggtgagactgtggggtcccttttcctctaaagcctttactctgaggataaggtcacaaagtagggtgtgacttgaaagtatcgtgaccatgtggcccaccagcagcctttccaaaggggaactccagagacatttcataatgcaaacagcactgttgctttaagaacaaggcctttggaggtggctaaacttgcacgcacgtgtgtgaaaagccatcccatcttctgcctccagttggagctttcagctgttaaaacagtcagaaactattgattcttccctttaggaaaaaatgctcaggcagaacggggtacatccacaggaggaatcggacgagaggatgtgacattcggtccaggagagaaagagcagtttctgttaaagatgta

SEQ ID NO: 1456 - protein, 603 aa, Homo sapiens
MRRKEKRLLQAVALVLAALVLLPNVGLWALYRERQPDGTPGGSGAAVAPAAGQGSHSRQKKTFFLGDGQKLKDWHDKEAIRRDAQRVGNGEQGRPYPMTDAERVDQAYRENGFNIYVSDKISLNRSLPDIRHPNCNSKRYLETLPNTSIIIPFHNEGWSSLLRTVHSVLNRSPPELVAEIVLVDDFSDREHLKKPLEDYMALFPSVRILRTKKREGLIRTRMLGASVATGDVITFLDSHCEANVNWLPPLLDRIARNRKTIVCPMIDVIDHDDFRYETQAGDAMRGAFDWEMYYKRIPIPPELQKADPSDPFESPVMAGGLFAVDRKWFWELGGYDPGLEIWGGEQYEISFKVWMCGGRMEDIPCSRVGHIYRKYVPYKVPAGVSLARNLKRVAEVWMDEYAEYIYQRRPEYRHLSAGDVAVQKKLRSSLNCKSFKWFMTKIAWDLPKFYPPVEPPAAAWGEIRNVGTGLCADTKHGALGSPLRLEGCVRGRGEAAWNNMQVFTFTWREDIRPGDPQHTKKFCFDAISHTSPVTLYDCHSMKGNQLWKYRKDKTLYHPVSGSCMDCSESDHRIFMNTCNPSSLTQQWLFEHTNSTVLEKFNRN

SEQ ID NO: 1457 - DNA, 609 bp, Homo sapiens
atgaggcggaaggagaagcggctcctgcaggcggtggcgctggtgctggcggccctggtcctcctgcccaacgtggggctttgggcgctgtaccgcgagcggcagcccgacggcacccctgggggatcgggggcggcggtggcgccggcggcgggacagggctcacacagtcgacaaaagaaaacgtttttcttgggagatgggcagaagctgaaggactggcatgacaaggaggccatccggagggacgctcagcgcgtaggaaatggagaacaaggaagaccttaccccatgaccgatgctgagagagtggatcaggcataccgagaaaatggatttaacatctacgtcagtgataaaatctccttgaatcgctctctcccagatatccggcacccaaactgcaacagcaagcgctacctggagacacttcccaacacaagcatcatcatccccttccacaacgagggctggtcctccctcctccgcaccgtccacagtgtgctcaatcgctcgcctccagagctggtcgccgagattgtactggtcgacgacttcagtgatcgagttcttccaatggctggctcgcctcatcccatcatcatttag

SEQ ID NO: 1458 - protein, 202 aa, Homo sapiens
MRRKEKRLLQAVALVLAALVLLPNVGLWALYRERQPDGTPGGSGAAVAPAAGQGSHSRQKKTFFLGDGQKLKDWHDKEAIRRDAQRVGNGEQGRPYPMTDAERVDQAYRENGFNIYVSDKISLNRSLPDIRHPNCNSKRYLETLPNTSIIIPFHNEGWSSLLRTVHSVLNRSPPELVAEIVLVDDFSDRVLPMAGSPHPIII

SEQ ID NO: 1459 - DNA, 5774 bp, Homo sapiens
gcgtcttccggcgcccgcggaggaggcgagggtgggacgctgggcggagcccgagtttaggaagaggaggggacggctgtcatcaatgaagtcatattcataatctagtcctctctccctctgtttctgtactctgggtgactcagagagggaagagattcagccagcacactcctcgcgagcaagcattactctactgactggcagagacaggagaggtagatgtccacgcccacagaccctggtgcgatgccccacccagggccttcgccggggcctgggccttcccctgggccaattcttgggcctagtccaggaccaggaccatccccaggttccgtccacagcatgatggggccaagtcctggacctccaagtgtctcccatcctatgccgacgatggggtccacagacttcccacaggaaggcatgcatcaaatgcataagcccatcgatggtatacatgacaaggggattgtagaagacatccattgtggatccatgaagggcactggtatgcgaccacctcacccaggcatgggccctccccagagtccaatggatcaacacagccaaggttatatgtcaccacacccatctccattaggagccccagagcacgtctccagccctatgtctggaggaggcccaactccacctcagatgccaccaagccagccgggggccctcatcccaggtgatccgcaggccatgagccagcccaacagaggtccctcacctttcagtcctgtccagctgcatcagcttcgagctcagattttagcttataaaatgctggcccgaggccagcccctccccgaaacgctgcagcttgcagtccaggggaaaaggacgttgcctggcttgcagcaacaacagcagcagcaacagcagcagcagcagcagcagcagcagcagcagcagcagcaacagcagccgcagcagcagccgccgcaaccacagacgcagcaacaacagcagccggcccttgttaactacaacagaccatctggcccggggccggagctgagcggcccgagcaccccgcagaagctgccggtgcccgcgcccggcggccggccctcgcccgcgccccccgcagccgcgcagccgcccgcggccgcagtgcccgggccctcagtgccgcagccggccccggggcagccctcgcccgtcctccagctgcagcagaagcagagccgcatcagccccatccagaaaccgcaaggcctggaccccgtggaaattctgcaagagcgggaatacagacttcaggcccgcatagctcataggatacaagaactggaaaatctgcctggctctttgccaccagatttaagaaccaaagcaaccgtggaactaaaagcacttcggttactcaatttccagcgtcagctgagacaggaggtggtggcctgcatgcgcagggacacgaccctggagacggctctcaactccaaagcatacaaacggagcaagcgccagactctgagagaagctcgcatgaccgagaagctggagaagcagcagaagattgagcaggagaggaaacgccgtcagaaacaccaggaatacctgaacagtattttgcaacatgcaaaagattttaaggaatatcatcggtctgtggccggaaagatccagaagctctccaaagcagtggcaacttggcatgccaacactgaaagagagcagaagaaggagacagagcggattgaaaaggagagaatgcggcgactgatggctgaagatgaggagggttatagaaaactgattgatcaaaagaaagacaggcgtttagcttaccttttgcagcagaccgatgagtatgtagccaatctgaccaatctggtttgggagcacaagcaagcccaggcagccaaagagaagaagaagaggaggaggaggaagaagaaggctgaggagaatgcagagggtggggagtctgccctgggaccggatggagagcccatagatgagagcagccagatgagtgacctccctgtcaaagtgactcacacagaaaccggcaaggttctgttcggaccagaagcacccaaagcaagtcagctggacgcctggctggaaatgaatcctggttatgaagttgcccctagatctgacagtgaagagagtgattctgattatgaggaagaggatgaggaagaagagtccagtaggcaggaaaccgaagagaaaatactcctggatccaaatagcgaagaagtttctgagaaggatgctaagcagatcattgagacagctaagcaagacgtggatgatgaatacagcatgcagtacagtgccaggggctcccagtcctactacaccgtggctcatgccatctcggagagggtggagaaacagtctgccctcctaattaatgggaccctaaagcattaccagctccagggcctggaatggatggtttccctgtataataacaacttgaacggaatcttagccgatgaaatggggcttggaaagaccatacagaccattgcactcatcacttatctgatggagcacaaaagactcaatggcccctatctcatcattgttcccctttcgactctatctaactggacatatgaatttgacaaatgggctccttctgtggtgaagatttcttacaagggtactcctgccatgcgtcgctcccttgtcccccagctacggagtggcaaattcaatgtcctcttgactacttatgagtatattataaaagacaagcacattcttgcaaagattcggtggaaatacatgatagtggacgaaggccaccgaatgaagaatcaccactgcaagctgactcaggtcttgaacactcactatgtggcccccagaaggatcctcttgactgggaccccgctgcagaataagctccctgaactctgggccctcctcaacttcctcctcccaacaatttttaagagctgcagcacatttgaacaatggttcaatgctccatttgccatgactggtgaaagggtggacttaaatgaagaagaaactatattgatcatcaggcgtctacataaggtgttaagaccatttttactaaggagactgaagaaagaagttgaatcccagcttcccgaaaaagtggaatatgtgatcaagtgtgacatgtcagctctgcagaagattctgtatcgccatatgcaagccaaggggatccttctcacagatggttctgagaaagataagaaggggaaaggaggtgctaagacacttatgaacactattatgcagttgagaaaaatctgcaaccacccatatatgtttcagcacattgaggaatcctttgctgaacacctaggctattcaaatggggtcatcaatggggctgaactgtatcgggcctcagggaagtttgagctgcttgatcgtattctgccaaaattgagagcgactaatcaccgagtgctgcttttctgccagatgacatctctcatgaccatcatggaggattattttgcttttcggaacttcctttacctacgccttgatggcaccaccaagtctgaagatcgtgctgctttgctgaagaaattcaatgaacctggatcccagtatttcattttcttgctgagcacaagagctggtggcctgggcttaaatcttcaggcagctgatacagtggtcatctttgacagcgactggaatcctcatcaggatctgcaggcccaagaccgagctcaccgcatcgggcagcagaacgaggtccgggtactgaggctctgtaccgtgaacagcgtggaggaaaagatcctcgcggccgcaaaatacaagctgaacgtggatcagaaagtgatccaggcgggcatgtttgaccaaaagtcttcaagccacgagcggagggcattcctgcaggccatcttggagcatgaggaggaaaatgaggaagaagatgaagtaccggacgatgagactctgaaccaaatgattgctcgacgagaagaagaatttgacctttttatgcggatggacatggaccggcggagggaagatgcccggaacccgaaacggaagccccgtttaatggaggaggatgagctgccctcctggatcattaaggatgacgctgaagtagaaaggctcacctgtgaagaagaggaggagaaaatatttgggagggggtcccgccagcgccgtgacgtggactacagtgacgccctcacggagaagcagtggctaagggccatcgaagacggcaatttggaggaaatggaagaggaagtacggcttaagaagcgaaaaagacgaagaaatgtggataaagatcctgcaaaagaagatgtggaaaaagctaagaagagaagaggccgccctcccgctgagaaactgtcaccaaatccccccaaactgacaaagcagatgaacgctatcatcgatactgtgataaactacaaagatagttcagggcgacagctcagtgaagtcttcattcagttaccttcaaggaaagaattaccagaatactatgaattaattaggaagccagtggatttcaaaaaaataaaggaaaggattcgtaatcataagtaccggagcctaggcgacctggagaaggatgtcatgcttctctgtcacaacgctcagacgttcaacctggagggatcccagatctatgaagactccatcgtcttacagtcagtgtttaagagtgcccggcagaaaattgccaaagaggaagagagtgaggatgaaagcaatgaagaggaggaagaggaagatgaagaagagtcagagtccgaggcaaaatcagtcaaggtgaaaattaagctcaataaaaaagatgacaaaggccgggacaaagggaaaggcaagaaaaggccaaatcgaggaaaagccaaacctgtagtgagcgattttgacagcgatgaggagcaggatgaacgtgaacagtcagaaggaagtgggacggatgatgagtgatcagtatggacctttttccttggtagaactgaattccttcctcccctgtctcatttctacccagtgagttcatttgtcatataggcactgggttgtttctatatcatcatcgtctataaactagctttaggatagtgccagacaaacatatgatatcatggtgtaaaaaacacacacatacacaaatatttgtaacatattgtgaccaaatgggcctcaaagattcagattgaaacaaacaaaaagcttttgatggaaaatatgtgggtggatagtatatttctatgggtgggtctaatttggtaacggtttgattgtgcctggttttatcacctgttcagatgagaagatttttgtcttttgtagcactgataaccaggagaagccattaaaagccactggttattttatttttcatcaggcaattttcgaggtttttatttgttcggtattgtttttttacactgtggtacatataagcaactttaataggtgataaatgtacagtagttagatttcacctgcatatacatttttccattttatgctctatgatctgaacaaaagctttttgaattgtataagatttatgtctactgtaaacattgcttaatttttttgctcttgatttaaaaaaaagttttgttgaaagcgctattgaatattgcaatctatatagtgtattggatggcttcttttgtcaccctgatctcctatgttaccaatgtgtatcgtctccttctccctaaagtgtacttaatctttgctttctttgcacaatgtctttggttgcaagtcataagcctgaggcaaataaaattccagtaatttcg

SEQ ID NO: 1460 - protein, 1572 aa, Homo sapiens
MSTPTDPGAMPHPGPSPGPGPSPGPILGPSPGPGPSPGSVHSMMGPSPGPPSVSHPMPTMGSTDFPQEGMHQMHKPIDGIHDKGIVEDIHCGSMKGTGMRPPHPGMGPPQSPMDQHSQGYMSPHPSPLGAPEHVSSPMSGGGPTPPQMPPSQPGALIPGDPQAMSQPNRGPSPFSPVQLHQLRAQILAYKMLARGQPLPETLQLAVQGKRTLPGLQQQQQQQQQQQQQQQQQQQQQQQPQQQPPQPQTQQQQQPALVNYNRPSGPGPELSGPSTPQKLPVPAPGGRPSPAPPAAAQPPAAAVPGPSVPQPAPGQPSPVLQLQQKQSRISPIQKPQGLDPVEILQEREYRLQARIAHRIQELENLPGSLPPDLRTKATVELKALRLLNFQRQLRQEVVACMRRDTTLETALNSKAYKRSKRQTLREARMTEKLEKQQKIEQERKRRQKHQEYLNSILQHAKDFKEYHRSVAGKIQKLSKAVATWHANTEREQKKETERIEKERMRRLMAEDEEGYRKLIDQKKDRRLAYLLQQTDEYVANLTNLVWEHKQAQAAKEKKKRRRRKKKAEENAEGGESALGPDGEPIDESSQMSDLPVKVTHTETGKVLFGPEAPKASQLDAWLEMNPGYEVAPRSDSEESDSDYEEEDEEEESSRQETEEKILLDPNSEEVSEKDAKQIIETAKQDVDDEYSMQYSARGSQSYYTVAHAISERVEKQSALLINGTLKHYQLQGLEWMVSLYNNNLNGILADEMGLGKTIQTIALITYLMEHKRLNGPYLIIVPLSTLSNWTYEFDKWAPSVVKISYKGTPAMRRSLVPQLRSGKFNVLLTTYEYIIKDKHILAKIRWKYMIVDEGHRMKNHHCKLTQVLNTHYVAPRRILLTGTPLQNKLPELWALLNFLLPTIFKSCSTFEQWFNAPFAMTGERVDLNEEETILIIRRLHKVLRPFLLRRLKKEVESQLPEKVEYVIKCDMSALQKILYRHMQAKGILLTDGSEKDKKGKGGAKTLMNTIMQLRKICNHPYMFQHIEESFAEHLGYSNGVINGAELYRASGKFELLDRILPKLRATNHRVLLFCQMTSLMTIMEDYFAFRNFLYLRLDGTTKSEDRAALLKKFNEPGSQYFIFLLSTRAGGLGLNLQAADTVVIFDSDWNPHQDLQAQDRAHRIGQQNEVRVLRLCTVNSVEEKILAAAKYKLNVDQKVIQAGMFDQKSSSHERRAFLQAILEHEEENEEEDEVPDDETLNQMIARREEEFDLFMRMDMDRRREDARNPKRKPRLMEEDELPSWIIKDDAEVERLTCEEEEEKIFGRGSRQRRDVDYSDALTEKQWLRAIEDGNLEEMEEEVRLKKRKRRRNVDKDPAKEDVEKAKKRRGRPPAEKLSPNPPKLTKQMNAIIDTVINYKDSSGRQLSEVFIQLPSRKELPEYYELIRKPVDFKKIKERIRNHKYRSLGDLEKDVMLLCHNAQTFNLEGSQIYEDSIVLQSVFKSARQKIAKEEESEDESNEEEEEEDEEESESEAKSVKVKIKLNKKDDKGRDKGKGKKRPNRGKAKPVVSDFDSDEEQDEREQSEGSGTDDE

SEQ ID NO: 1461 - DNA, 5757 bp, Homo sapiens
tttctgtactctgggtgactcagagagggaagagattcagccagcacactcctcgcgagcaagcattactctactgactggcagagacaggagaggtagatgtccacgcccacagaccctggtgcgatgccccacccagggccttcgccggggcctgggccttcccctgggccaattcttgggcctagtccaggaccaggaccatccccaggttccgtccacagcatgatggggccaagtcctggacctccaagtgtctcccatcctatgccgacgatggggtccacagacttcccacaggaaggcatgcatcaaatgcataagcccatcgatggtatacatgacaaggggattgtagaagacatccattgtggatccatgaagggcactggtatgcgaccacctcacccaggcatgggccctccccagagtccaatggatcaacacagccaaggttatatgtcaccacacccatctccattaggagccccagagcacgtctccagccctatgtctggaggaggcccaactccacctcagatgccaccaagccagccgggggccctcatcccaggtgatccgcaggccatgagccagcccaacagaggtccctcacctttcagtcctgtccagctgcatcagcttcgagctcagattttagcttataaaatgctggcccgaggccagcccctccccgaaacgctgcagcttgcagtccaggggaaaaggacgttgcctggcttgcagcaacaacagcagcagcaacagcagcagcagcagcagcagcagcagcagcagcagcagcaacagcagccgcagcagcagccgccgcaaccacagacgcagcaacaacagcagccggcccttgttaactacaacagaccatctggcccggggccggagctgagcggcccgagcaccccgcagaagctgccggtgcccgcgcccggcggccggccctcgcccgcgccccccgcagccgcgcagccgcccgcggccgcagtgcccgggccctcagtgccgcagccggccccggggcagccctcgcccgtcctccagctgcagcagaagcagagccgcatcagccccatccagaaaccgcaaggcctggaccccgtggaaattctgcaagagcgggaatacagacttcaggcccgcatagctcataggatacaagaactggaaaatctgcctggctctttgccaccagatttaagaaccaaagcaaccgtggaactaaaagcacttcggttactcaatttccagcgtcagctgagacaggaggtggtggcctgcatgcgcagggacacgaccctggagacggctctcaactccaaagcatacaaacggagcaagcgccagactctgagagaagctcgcatgaccgagaagctggagaagcagcagaagattgagcaggagaggaaacgccgtcagaaacaccaggaatacctgaacagtattttgcaacatgcaaaagattttaaggaatatcatcggtctgtggccggaaagatccagaagctctccaaagcagtggcaacttggcatgccaacactgaaagagagcagaagaaggagacagagcggattgaaaaggagagaatgcggcgactgatggctgaagatgaggagggttatagaaaactgattgatcaaaagaaagacaggcgtttagcttaccttttgcagcagaccgatgagtatgtagccaatctgaccaatctggtttgggagcacaagcaagcccaggcagccaaagagaagaagaagaggaggaggaggaagaagaaggctgaggagaatgcagagggtggggagtctgccctgggaccggatggagagcccatagatgagagcagccagatgagtgacctccctgtcaaagtgactcacacagaaaccggcaaggttctgttcggaccagaagcacccaaagcaagtcagctggacgcctggctggaaatgaatcctggttatgaagttgcccctagatctgacagtgaagagagtgattctgattatgaggaagaggatgaggaagaagagtccagtaggcaggaaaccgaagagaaaatactcctggatccaaatagcgaagaagtttctgagaaggatgctaagcagatcattgagacagctaagcaagacgtggatgatgaatacagcatgcagtacagtgccaggggctcccagtcctactacaccgtggctcatgccatctcggagagggtggagaaacagtctgccctcctaattaatgggaccctaaagcattaccagctccagggcctggaatggatggtttccctgtataataacaacttgaacggaatcttagccgatgaaatggggcttggaaagaccatacagaccattgcactcatcacttatctgatggagcacaaaagactcaatggcccctatctcatcattgttcccctttcgactctatctaactggacatatgaatttgacaaatgggctccttctgtggtgaagatttcttacaagggtactcctgccatgcgtcgctcccttgtcccccagctacggagtggcaaattcaatgtcctcttgactacttatgagtatattataaaagacaagcacattcttgcaaagattcggtggaaatacatgatagtggacgaaggccaccgaatgaagaatcaccactgcaagctgactcaggtcttgaacactcactatgtggcccccagaaggatcctcttgactgggaccccgctgcagaataagctccctgaactctgggccctcctcaacttcctcctcccaacaatttttaagagctgcagcacatttgaacaatggttcaatgctccatttgccatgactggtgaaagggtggacttaaatgaagaagaaactatattgatcatcaggcgtctacataaggtgttaagaccatttttactaaggagactgaagaaagaagttgaatcccagcttcccgaaaaagtggaatatgtgatcaagtgtgacatgtcagctctgcagaagattctgtatcgccatatgcaagccaaggggatccttctcacagatggttctgagaaagataagaaggggaaaggaggtgctaagacacttatgaacactattatgcagttgagaaaaatctgcaaccacccatatatgtttcagcacattgaggaatcctttgctgaacacctaggctattcaaatggggtcatcaatggggctgaactgtatcgggcctcagggaagtttgagctgcttgatcgtattctgccaaaattgagagcgactaatcaccgagtgctgcttttctgccagatgacatctctcatgaccatcatggaggattattttgcttttcggaacttcctttacctacgccttgatggcaccaccaagtctgaagatcgtgctgctttgctgaagaaattcaatgaacctggatcccagtatttcattttcttgctgagcacaagagctggtggcctgggcttaaatcttcaggcagctgatacagtggtcatctttgacagcgactggaatcctcatcaggatctgcaggcccaagaccgagctcaccgcatcgggcagcagaacgaggtccgggtactgaggctctgtaccgtgaacagcgtggaggaaaagatcctcgcggccgcaaaatacaagctgaacgtggatcagaaagtgatccaggcgggcatgtttgaccaaaagtcttcaagccacgagcggagggcattcctgcaggccatcttggagcatgaggaggaaaatgaggaagaagatgaagtaccggacgatgagactctgaaccaaatgattgctcgacgagaagaagaatttgacctttttatgcggatggacatggaccggcggagggaagatgcccggaacccgaaacggaagccccgtttaatggaggaggatgagctgccctcctggatcattaaggatgacgctgaagtagaaaggctcacctgtgaagaagaggaggagaaaatatttgggagggggtcccgccagcgccgtgacgtggactacagtgacgccctcacggagaagcagtggctaagggccatcgaagacggcaatttggaggaaatggaagaggaagtacggcttaagaagcgaaaaagacgaagaaatgtggataaagatcctgcaaaagaagatgtggaaaaagctaagaagagaagaggccgccctcccgctgagaaactgtcaccaaatccccccaaactgacaaagcagatgaacgctatcatcgatactgtgataaactacaaagataggtgtaacgtggagaaggtgcccagtaattctcagttggaaatagaaggaaacagttcagggcgacagctcagtgaagtcttcattcagttaccttcaaggaaagaattaccagaatactatgaattaattaggaagccagtggatttcaaaaaaataaaggaaaggattcgtaatcataagtaccggagcctaggcgacctggagaaggatgtcatgcttctctgtcacaacgctcagacgttcaacctggagggatcccagatctatgaagactccatcgtcttacagtcagtgtttaagagtgcccggcagaaaattgccaaagaggaagagagtgaggatgaaagcaatgaagaggaggaagaggaagatgaagaagagtcagagtccgaggcaaaatcagtcaaggtgaaaattaagctcaataaaaaagatgacaaaggccgggacaaagggaaaggcaagaaaaggccaaatcgaggaaaagccaaacctgtagtgagcgattttgacagcgatgaggagcaggatgaacgtgaacagtcagaaggaagtgggacggatgatgagtgatcagtatggacctttttccttggtagaactgaattccttcctcccctgtctcatttctacccagtgagttcatttgtcatataggcactgggttgtttctatatcatcatcgtctataaactagctttaggatagtgccagacaaacatatgatatcatggtgtaaaaaacacacacatacacaaatatttgtaacatattgtgaccaaatgggcctcaaagattcagattgaaacaaacaaaaagcttttgatggaaaatatgtgggtggatagtatatttctatgggtgggtctaatttggtaacggtttgattgtgcctggttttatcacctgttcagatgagaagatttttgtcttttgtagcactgataaccaggagaagccattaaaagccactggttattttatttttcatcaggcaattttcgaggtttttatttgttcggtattgtttttttacactgtggtacatataagcaactttaataggtgataaatgtacagtagttagatttcacctgcatatacatttttccattttatgctctatgatctgaacaaaagctttttgaattgtataagatttatgtctactgtaaacattgcttaatttttttgctcttgatttaaaaaaaagttttgttgaaagcgctattgaatattgcaatctatatagtgtattggatggcttcttttgtcaccctgatctcctatgttaccaatgtgtatcgtctccttctccctaaagtgtacttaatctttgctttctttgcacaatgtctttggttgcaagtcataagcctgaggcaaataaaattccagtaatttcgaagaatgtggtgttggtgctttcctaataaagaaataatttagcttgacaaa

SEQ ID NO: 1462 - protein, 1590 aa, Homo sapiens
MSTPTDPGAMPHPGPSPGPGPSPGPILGPSPGPGPSPGSVHSMMGPSPGPPSVSHPMPTMGSTDFPQEGMHQMHKPIDGIHDKGIVEDIHCGSMKGTGMRPPHPGMGPPQSPMDQHSQGYMSPHPSPLGAPEHVSSPMSGGGPTPPQMPPSQPGALIPGDPQAMSQPNRGPSPFSPVQLHQLRAQILAYKMLARGQPLPETLQLAVQGKRTLPGLQQQQQQQQQQQQQQQQQQQQQQQPQQQPPQPQTQQQQQPALVNYNRPSGPGPELSGPSTPQKLPVPAPGGRPSPAPPAAAQPPAAAVPGPSVPQPAPGQPSPVLQLQQKQSRISPIQKPQGLDPVEILQEREYRLQARIAHRIQELENLPGSLPPDLRTKATVELKALRLLNFQRQLRQEVVACMRRDTTLETALNSKAYKRSKRQTLREARMTEKLEKQQKIEQERKRRQKHQEYLNSILQHAKDFKEYHRSVAGKIQKLSKAVATWHANTEREQKKETERIEKERMRRLMAEDEEGYRKLIDQKKDRRLAYLLQQTDEYVANLTNLVWEHKQAQAAKEKKKRRRRKKKAEENAEGGESALGPDGEPIDESSQMSDLPVKVTHTETGKVLFGPEAPKASQLDAWLEMNPGYEVAPRSDSEESDSDYEEEDEEEESSRQETEEKILLDPNSEEVSEKDAKQIIETAKQDVDDEYSMQYSARGSQSYYTVAHAISERVEKQSALLINGTLKHYQLQGLEWMVSLYNNNLNGILADEMGLGKTIQTIALITYLMEHKRLNGPYLIIVPLSTLSNWTYEFDKWAPSVVKISYKGTPAMRRSLVPQLRSGKFNVLLTTYEYIIKDKHILAKIRWKYMIVDEGHRMKNHHCKLTQVLNTHYVAPRRILLTGTPLQNKLPELWALLNFLLPTIFKSCSTFEQWFNAPFAMTGERVDLNEEETILIIRRLHKVLRPFLLRRLKKEVESQLPEKVEYVIKCDMSALQKILYRHMQAKGILLTDGSEKDKKGKGGAKTLMNTIMQLRKICNHPYMFQHIEESFAEHLGYSNGVINGAELYRASGKFELLDRILPKLRATNHRVLLFCQMTSLMTIMEDYFAFRNFLYLRLDGTTKSEDRAALLKKFNEPGSQYFIFLLSTRAGGLGLNLQAADTVVIFDSDWNPHQDLQAQDRAHRIGQQNEVRVLRLCTVNSVEEKILAAAKYKLNVDQKVIQAGMFDQKSSSHERRAFLQAILEHEEENEEEDEVPDDETLNQMIARREEEFDLFMRMDMDRRREDARNPKRKPRLMEEDELPSWIIKDDAEVERLTCEEEEEKIFGRGSRQRRDVDYSDALTEKQWLRAIEDGNLEEMEEEVRLKKRKRRRNVDKDPAKEDVEKAKKRRGRPPAEKLSPNPPKLTKQMNAIIDTVINYKDRCNVEKVPSNSQLEIEGNSSGRQLSEVFIQLPSRKELPEYYELIRKPVDFKKIKERIRNHKYRSLGDLEKDVMLLCHNAQTFNLEGSQIYEDSIVLQSVFKSARQKIAKEEESEDESNEEEEEEDEEESESEAKSVKVKIKLNKKDDKGRDKGKGKKRPNRGKAKPVVSDFDSDEEQDEREQSEGSGTDDE

SEQ ID NO: 1463 - DNA, 2293 bp, Homo sapiens
acttcattaaatctagaggcagttgagcatgggagccgtctgtatgttgaattagggctcgcactcttgcgcaacacgtcaccagtcggaaactgggggtttgcttctgtgatttatttcattattgtgctggtaaaaggtttggaagggaattctttttgggggtagtactttagcattgtgtagcaagttttggggttttttttgtgtgtgaccccccagcccccagcgctgagtttgagtcagttgagccagtttagtaaataattttttaaaataaaagaacagtttaaaatctccatgaataattttacttacatgcaggagtaatcttactctactctttatgtgcgaaaagcattgggaagtgtttagtgaattgatttccattagaaaaagacccttagaaatcacagaacataaagcactgcatatggatgtgtttggggtctttggggaggagggaagatgttttgtagctctctgcattcctgcataaaaccttagtttgaggggaataatgctgatgaagagactagcagctcgctgctttgctggcttgttaattttatccccactaactgtgatttctgatagccggcctgctgatagtggtaaggccatcgaagacggcaatttggaggaaatggaagaggaagtacggcttaagaagcgaaaaagacgaagaaatgtggataaagatcctgcaaaagaagatgtggaaaaagctaagaagagaagaggccgccctcccgctgagaaactgtcaccaaatccccccaaactgacaaagcagatgaacgctatcatcgatactgtgataaactacaaagataggtgtaacgtggagaaggtgcccagtaattctcagttggaaatagaaggaaacagttcagggcgacagctcagtgaagtcttcattcagttaccttcaaggaaagaattaccagaatactatgaattaattaggaagccagtggatttcaaaaaaataaaggaaaggattcgtaatcataagtaccggagcctaggcgacctggagaaggatgtcatgcttctctgtcacaacgctcagacgttcaacctggagggatcccagatctatgaagactccatcgtcttacagtcagtgtttaagagtgcccggcagaaaattgccaaagaggaagagagtgaggatgaaagcaatgaagaggaggaagaggaagatgaagaagagtcagagtccgaggcaaaatcagtcaaggtgaaaattaagctcaataaaaaagatgacaaaggccgggacaaagggaaaggcaagaaaaggccaaatcgaggaaaagccaaacctgtagtgagcgattttgacagcgatgaggagcaggatgaacgtgaacagtcagaaggaagtgggacggatgatgagtgatcagtatggacctttttccttggtagaactgaattccttcctcccctgtctcatttctacccagtgagttcatttgtcatataggcactgggttgtttctatatcatcatcgtctataaactagctttaggatagtgccagacaaacatatgatatcatggtgtaaaaaacacacacatacacaaatatttgtaacatattgtgaccaaatgggcctcaaagattcagattgaaacaaacaaaaagcttttgatggaaaatatgtgggtggatagtatatttctatgggtgggtctaatttggtaacggtttgattgtgcctggttttatcacctgttcagatgagaagatttttgtcttttgtagcactgataaccaggagaagccattaaaagccactggttattttatttttcatcaggcaattttcgaggtttttatttgttcggtattgtttttttacactgtggtacatataagcaactttaataggtgataaatgtacagtagttagatttcacctgcatatacatttttccattttatgctctatgatctgaacaaaagctttttgaattgtataagatttatgtctactgtaaacattgcttaatttttttgctcttgatttaaaaaaaagttttgttgaaagcgctattgaatattgcaatctatatagtgtattggatggcttcttttgtcaccctgatctcctatgttaccaatgtgtatcgtctccttctccctaaagtgtacttaatctttgctttctttgcacaatgtctttggttgcaagtcataagcctgaggcaaataaaattccagtaatttcgaagaatgtggtgttggtgctttcctaataaagaaataatttagcttgac

SEQ ID NO: 1464 - protein, 296 aa, Homo sapiens
MLMKRLAARCFAGLLILSPLTVISDSRPADSGKAIEDGNLEEMEEEVRLKKRKRRRNVDKDPAKEDVEKAKKRRGRPPAEKLSPNPPKLTKQMNAIIDTVINYKDRCNVEKVPSNSQLEIEGNSSGRQLSEVFIQLPSRKELPEYYELIRKPVDFKKIKERIRNHKYRSLGDLEKDVMLLCHNAQTFNLEGSQIYEDSIVLQSVFKSARQKIAKEEESEDESNEEEEEEDEEESESEAKSVKVKIKLNKKDDKGRDKGKGKKRPNRGKAKPVVSDFDSDEEQDEREQSEGSGTDDE

SEQ ID NO: 1465 - DNA, 5681 bp, Homo sapiens
cgccgcggtgctgagggggaggggagccggcgagcgcgcgcgcagcgggggcgcgggtggcgcgcgtgtgtgtgaagggggggcggtggccgaggcgggcgggcgcgcgcgcgaggcttcccctcgtttggcggcggcggcggcttctttgtttcgtgaagagaagcgagacgcccattctgcccccggccccgcgcggaggggcgggggaggcgccgggaagtcgacggcgccggcggctcctgcaggaggccactgtctgcagctcccgtgaagatgtccactccagacccacccctgggcggaactcctcggccaggtccttccccgggccctggcccttcccctggagccatgctgggccctagcccgggtccctcgccgggctccgcccacagcatgatggggcccagcccagggccgccctcagcaggacaccccatccccacccaggggcctggagggtaccctcaggacaacatgcaccagatgcacaagcccatggagtccatgcatgagaagggcatgtcggacgacccgcgctacaaccagatgaaaggaatggggatgcggtcagggggccatgctgggatggggcccccgcccagccccatggaccagcactcccaaggttacccctcgcccctgggtggctctgagcatgcctctagtccagttccagccagtggcccgtcttcggggccccagatgtcttccgggccaggaggtgccccgctggatggtgctgacccccaggccttggggcagcagaaccggggcccaaccccatttaaccagaaccagctgcaccagctcagagctcagatcatggcctacaagatgctggccagggggcagcccctccccgaccacctgcagatggcggtgcagggcaagcggccgatgcccgggatgcagcagcagatgccaacgctacctccaccctcggtgtccgcaacaggacccggccctggccctggccctggccccggcccgggtcccggcccggcacctccaaattacagcaggcctcatggtatgggagggcccaacatgcctcccccaggaccctcgggcgtgccccccgggatgccaggccagcctcctggagggcctcccaagccctggcctgaaggacccatggcgaatgctgctgcccccacgagcacccctcagaagctgattcccccgcagccaacgggccgcccttcccccgcgccccctgccgtcccacccgccgcctcgcccgtgatgccaccgcagacccagtcccccgggcagccggcccagcccgcgcccatggtgccactgcaccagaagcagagccgcatcacccccatccagaagccgcggggcctcgaccctgtggagatcctgcaggagcgcgagtacaggctgcaggctcgcatcgcacaccgaattcaggaacttgaaaaccttcccgggtccctggccggggatttgcgaaccaaagcgaccattgagctcaaggccctcaggctgctgaacttccagaggcagctgcgccaggaggtggtggtgtgcatgcggagggacacagcgctggagacagccctcaatgctaaggcctacaagcgcagcaagcgccagtccctgcgcgaggcccgcatcactgagaagctggagaagcagcagaagatcgagcaggagcgcaagcgccggcagaagcaccaggaatacctcaatagcattctccagcatgccaaggatttcaaggaatatcacagatccgtcacaggcaaaatccagaagctgaccaaggcagtggccacgtaccatgccaacacggagcgggagcagaagaaagagaacgagcggatcgagaaggagcgcatgcggaggctcatggctgaagatgaggaggggtaccgcaagctcatcgaccagaagaaggacaagcgcctggcctacctcttgcagcagacagacgagtacgtggctaacctcacggagctggtgcggcagcacaaggctgcccaggtcgccaaggagaaaaagaagaaaaagaaaaagaagaaggcagaaaatgcagaaggacagacgcctgccattgggccggatggcgagcctctggacgagaccagccagatgagcgacctcccggtgaaggtgatccacgtggagagtgggaagatcctcacaggcacagatgcccccaaagccgggcagctggaggcctggctcgagatgaacccggggtatgaagtagctccgaggtctgatagtgaagaaagtggctcagaagaagaggaagaggaggaggaggaagagcagccgcaggcagcacagcctcccaccctgcccgtggaggagaagaagaagattccagatccagacagcgatgacgtctctgaggtggacgcgcggcacatcattgagaatgccaagcaagatgtcgatgatgaatatggcgtgtcccaggcccttgcacgtggcctgcagtcctactatgccgtggcccatgctgtcactgagagagtggacaagcagtcagcgcttatggtcaatggtgtcctcaaacagtaccagatcaaaggtttggagtggctggtgtccctgtacaacaacaacctgaacggcatcctggccgacgagatgggcctggggaagaccatccagaccatcgcgctcatcacgtacctcatggagcacaaacgcatcaatgggcccttcctcatcatcgtgcctctctcaacgctgtccaactgggcgtacgagtttgacaagtgggccccctccgtggtgaaggtgtcttacaagggatccccagcagcaagacgggcctttgtcccccagctccggagtgggaagttcaacgtcttgctgacgacgtacgagtacatcatcaaagacaagcacatcctcgccaagatccgttggaagtacatgattgtggacgaaggtcaccgcatgaagaaccaccactgcaagctgacgcaggtgctcaacacgcactatgtggcaccccgccgcctgctgctgacgggcacaccgctgcagaacaagcttcccgagctctgggcgctgctcaacttcctgctgcccaccatcttcaagagctgcagcaccttcgagcagtggtttaacgcaccctttgccatgaccggggaaaaggtggacctgaatgaggaggaaaccattctcatcatccggcgtctccacaaagtgctgcggcccttcttgctccgacgactcaagaaggaagtcgaggcccagttgcccgaaaaggtggagtacgtcatcaagtgcgacatgtctgcgctgcagcgagtgctctaccgccacatgcaggccaagggcgtgctgctgactgatggctccgagaaggacaagaagggcaaaggcggcaccaagaccctgatgaacaccatcatgcagctgcggaagatctgcaaccacccctacatgttccagcacatcgaggagtccttttccgagcacttggggttcactggcggcattgtccaagggctggacctgtaccgagcctcgggtaaatttgagcttcttgatagaattcttcccaaactccgagcaaccaaccacaaagtgctgctgttctgccaaatgacctccctcatgaccatcatggaagattactttgcgtatcgcggctttaaatacctcaggcttgatggaaccacgaaggcggaggaccggggcatgctgctgaaaaccttcaacgagcccggctctgagtacttcatcttcctgctcagcacccgggctggggggctcggcctgaacctccagtcggcagacactgtgatcatttttgacagcgactggaatcctcaccaggacctgcaagcgcaggaccgagcccaccgcatcgggcagcagaacgaggtgcgtgtgctccgcctctgcaccgtcaacagcgtggaggagaagatcctagctgcagccaagtacaagctcaacgtggaccagaaggtgatccaggccggcatgttcgaccagaagtcctccagccatgagcggcgcgccttcctgcaggccatcctggagcacgaggagcaggatgagagcagacactgcagcacgggcagcggcagtgccagcttcgcccacactgcccctccgccagcgggcgtcaaccccgacttggaggagccacctctaaaggaggaagacgaggtgcccgacgacgagaccgtcaaccagatgatcgcccggcacgaggaggagtttgatctgttcatgcgcatggacctggaccgcaggcgcgaggaggcccgcaaccccaagcggaagccgcgcctcatggaggaggacgagctcccctcgtggatcatcaaggacgacgcggaggtggagcggctgacctgtgaggaggaggaggagaagatgttcggccgtggctcccgccaccgcaaggaggtggactacagcgactcactgacggagaagcagtggctcaaggccatcgaggagggcacgctggaggagatcgaagaggaggtccggcagaagaaatcatcacggaagcgcaagcgagacagcgacgccggctcctccaccccgaccaccagcacccgcagccgcgacaaggacgacgagagcaagaagcagaagaagcgcgggcggccgcctgccgagaaactctcccctaacccacccaacctcaccaagaagatgaagaagattgtggatgccgtgatcaagtacaaggacagcagcagtggacgtcagctcagcgaggtcttcatccagctgccctcgcgaaaggagctgcccgagtactacgagctcatccgcaagcccgtggacttcaagaagataaaggagcgcattcgcaaccacaagtaccgcagcctcaacgacctagagaaggacgtcatgctcctgtgccagaacgcacagaccttcaacctggagggctccctgatctatgaagactccatcgtcttgcagtcggtcttcaccagcgtgcggcagaaaatcgagaaggaggatgacagtgaaggcgaggagagtgaggaggaggaagagggcgaggaggaaggctccgaatccgaatctcggtccgtcaaagtgaagatcaagcttggccggaaggagaaggcacaggaccggctgaagggcggccggcggcggccgagccgagggtcccgagccaagccggtcgtgagtgacgatgacagtgaggaggaacaagaggaggaccgctcaggaagtggcagcgaagaagactgagccccgacattccagtctcgaccccgagcccctcgttccagagctgagatggcataggccttagcagtaacgggtagcagcagatgtagtttcagacttggagtaaaactgtataaacaaaagaatcttccatatttatacagcagagaagctgtaggactgtttgtgactggccctgtcctggcatcagtagcatctgtaacagcattaactgtcttaaagagagagagagagaattccgaattggggaacacacgatacctgtttttcttttccgttgctggcagtactgttgcgccgcagtttggagtcactgtagttaagtgtggatgcatgtgcgtcaccgtccactcctcctactgtattttattggacaggtcagactcgccgggggcccggcgagggtatgtcagtgtcactggatgtcaaacagtaataaattaaaccaacaacaaaacgca

SEQ ID NO: 1466 - protein, 1647 aa, Homo sapiens
MSTPDPPLGGTPRPGPSPGPGPSPGAMLGPSPGPSPGSAHSMMGPSPGPPSAGHPIPTQGPGGYPQDNMHQMHKPMESMHEKGMSDDPRYNQMKGMGMRSGGHAGMGPPPSPMDQHSQGYPSPLGGSEHASSPVPASGPSSGPQMSSGPGGAPLDGADPQALGQQNRGPTPFNQNQLHQLRAQIMAYKMLARGQPLPDHLQMAVQGKRPMPGMQQQMPTLPPPSVSATGPGPGPGPGPGPGPGPAPPNYSRPHGMGGPNMPPPGPSGVPPGMPGQPPGGPPKPWPEGPMANAAAPTSTPQKLIPPQPTGRPSPAPPAVPPAASPVMPPQTQSPGQPAQPAPMVPLHQKQSRITPIQKPRGLDPVEILQEREYRLQARIAHRIQELENLPGSLAGDLRTKATIELKALRLLNFQRQLRQEVVVCMRRDTALETALNAKAYKRSKRQSLREARITEKLEKQQKIEQERKRRQKHQEYLNSILQHAKDFKEYHRSVTGKIQKLTKAVATYHANTEREQKKENERIEKERMRRLMAEDEEGYRKLIDQKKDKRLAYLLQQTDEYVANLTELVRQHKAAQVAKEKKKKKKKKKAENAEGQTPAIGPDGEPLDETSQMSDLPVKVIHVESGKILTGTDAPKAGQLEAWLEMNPGYEVAPRSDSEESGSEEEEEEEEEEQPQAAQPPTLPVEEKKKIPDPDSDDVSEVDARHIIENAKQDVDDEYGVSQALARGLQSYYAVAHAVTERVDKQSALMVNGVLKQYQIKGLEWLVSLYNNNLNGILADEMGLGKTIQTIALITYLMEHKRINGPFLIIVPLSTLSNWAYEFDKWAPSVVKVSYKGSPAARRAFVPQLRSGKFNVLLTTYEYIIKDKHILAKIRWKYMIVDEGHRMKNHHCKLTQVLNTHYVAPRRLLLTGTPLQNKLPELWALLNFLLPTIFKSCSTFEQWFNAPFAMTGEKVDLNEEETILIIRRLHKVLRPFLLRRLKKEVEAQLPEKVEYVIKCDMSALQRVLYRHMQAKGVLLTDGSEKDKKGKGGTKTLMNTIMQLRKICNHPYMFQHIEESFSEHLGFTGGIVQGLDLYRASGKFELLDRILPKLRATNHKVLLFCQMTSLMTIMEDYFAYRGFKYLRLDGTTKAEDRGMLLKTFNEPGSEYFIFLLSTRAGGLGLNLQSADTVIIFDSDWNPHQDLQAQDRAHRIGQQNEVRVLRLCTVNSVEEKILAAAKYKLNVDQKVIQAGMFDQKSSSHERRAFLQAILEHEEQDESRHCSTGSGSASFAHTAPPPAGVNPDLEEPPLKEEDEVPDDETVNQMIARHEEEFDLFMRMDLDRRREEARNPKRKPRLMEEDELPSWIIKDDAEVERLTCEEEEEKMFGRGSRHRKEVDYSDSLTEKQWLKAIEEGTLEEIEEEVRQKKSSRKRKRDSDAGSSTPTTSTRSRDKDDESKKQKKRGRPPAEKLSPNPPNLTKKMKKIVDAVIKYKDSSSGRQLSEVFIQLPSRKELPEYYELIRKPVDFKKIKERIRNHKYRSLNDLEKDVMLLCQNAQTFNLEGSLIYEDSIVLQSVFTSVRQKIEKEDDSEGEESEEEEEGEEEGSESESRSVKVKIKLGRKEKAQDRLKGGRRRPSRGSRAKPVVSDDDSEEEQEEDRSGSGSEED

SEQ ID NO: 1467 - DNA, 5777 bp, Homo sapiens
cgccgcggtgctgagggggaggggagccggcgagcgcgcgcgcagcgggggcgcgggtggcgcgcgtgtgtgtgaagggggggcggtggccgaggcgggcgggcgcgcgcgcgaggcttcccctcgtttggcggcggcggcggcttctttgtttcgtgaagagaagcgagacgcccattctgcccccggccccgcgcggaggggcgggggaggcgccgggaagtcgacggcgccggcggctcctgcaggaggccactgtctgcagctcccgtgaagatgtccactccagacccacccctgggcggaactcctcggccaggtccttccccgggccctggcccttcccctggagccatgctgggccctagcccgggtccctcgccgggctccgcccacagcatgatggggcccagcccagggccgccctcagcaggacaccccatccccacccaggggcctggagggtaccctcaggacaacatgcaccagatgcacaagcccatggagtccatgcatgagaagggcatgtcggacgacccgcgctacaaccagatgaaaggaatggggatgcggtcagggggccatgctgggatggggcccccgcccagccccatggaccagcactcccaaggttacccctcgcccctgggtggctctgagcatgcctctagtccagttccagccagtggcccgtcttcggggccccagatgtcttccgggccaggaggtgccccgctggatggtgctgacccccaggccttggggcagcagaaccggggcccaaccccatttaaccagaaccagctgcaccagctcagagctcagatcatggcctacaagatgctggccagggggcagcccctccccgaccacctgcagatggcggtgcagggcaagcggccgatgcccgggatgcagcagcagatgccaacgctacctccaccctcggtgtccgcaacaggacccggccctggccctggccctggccccggcccgggtcccggcccggcacctccaaattacagcaggcctcatggtatgggagggcccaacatgcctcccccaggaccctcgggcgtgccccccgggatgccaggccagcctcctggagggcctcccaagccctggcctgaaggacccatggcgaatgctgctgcccccacgagcacccctcagaagctgattcccccgcagccaacgggccgcccttcccccgcgccccctgccgtcccacccgccgcctcgcccgtgatgccaccgcagacccagtcccccgggcagccggcccagcccgcgcccatggtgccactgcaccagaagcagagccgcatcacccccatccagaagccgcggggcctcgaccctgtggagatcctgcaggagcgcgagtacaggctgcaggctcgcatcgcacaccgaattcaggaacttgaaaaccttcccgggtccctggccggggatttgcgaaccaaagcgaccattgagctcaaggccctcaggctgctgaacttccagaggcagctgcgccaggaggtggtggtgtgcatgcggagggacacagcgctggagacagccctcaatgctaaggcctacaagcgcagcaagcgccagtccctgcgcgaggcccgcatcactgagaagctggagaagcagcagaagatcgagcaggagcgcaagcgccggcagaagcaccaggaatacctcaatagcattctccagcatgccaaggatttcaaggaatatcacagatccgtcacaggcaaaatccagaagctgaccaaggcagtggccacgtaccatgccaacacggagcgggagcagaagaaagagaacgagcggatcgagaaggagcgcatgcggaggctcatggctgaagatgaggaggggtaccgcaagctcatcgaccagaagaaggacaagcgcctggcctacctcttgcagcagacagacgagtacgtggctaacctcacggagctggtgcggcagcacaaggctgcccaggtcgccaaggagaaaaagaagaaaaagaaaaagaagaaggcagaaaatgcagaaggacagacgcctgccattgggccggatggcgagcctctggacgagaccagccagatgagcgacctcccggtgaaggtgatccacgtggagagtgggaagatcctcacaggcacagatgcccccaaagccgggcagctggaggcctggctcgagatgaacccggggtatgaagtagctccgaggtctgatagtgaagaaagtggctcagaagaagaggaagaggaggaggaggaagagcagccgcaggcagcacagcctcccaccctgcccgtggaggagaagaagaagattccagatccagacagcgatgacgtctctgaggtggacgcgcggcacatcattgagaatgccaagcaagatgtcgatgatgaatatggcgtgtcccaggcccttgcacgtggcctgcagtcctactatgccgtggcccatgctgtcactgagagagtggacaagcagtcagcgcttatggtcaatggtgtcctcaaacagtaccagatcaaaggtttggagtggctggtgtccctgtacaacaacaacctgaacggcatcctggccgacgagatgggcctggggaagaccatccagaccatcgcgctcatcacgtacctcatggagcacaaacgcatcaatgggcccttcctcatcatcgtgcctctctcaacgctgtccaactgggcgtacgagtttgacaagtgggccccctccgtggtgaaggtgtcttacaagggatccccagcagcaagacgggcctttgtcccccagctccggagtgggaagttcaacgtcttgctgacgacgtacgagtacatcatcaaagacaagcacatcctcgccaagatccgttggaagtacatgattgtggacgaaggtcaccgcatgaagaaccaccactgcaagctgacgcaggtgctcaacacgcactatgtggcaccccgccgcctgctgctgacgggcacaccgctgcagaacaagcttcccgagctctgggcgctgctcaacttcctgctgcccaccatcttcaagagctgcagcaccttcgagcagtggtttaacgcaccctttgccatgaccggggaaaaggtggacctgaatgaggaggaaaccattctcatcatccggcgtctccacaaagtgctgcggcccttcttgctccgacgactcaagaaggaagtcgaggcccagttgcccgaaaaggtggagtacgtcatcaagtgcgacatgtctgcgctgcagcgagtgctctaccgccacatgcaggccaagggcgtgctgctgactgatggctccgagaaggacaagaagggcaaaggcggcaccaagaccctgatgaacaccatcatgcagctgcggaagatctgcaaccacccctacatgttccagcacatcgaggagtccttttccgagcacttggggttcactggcggcattgtccaagggctggacctgtaccgagcctcgggtaaatttgagcttcttgatagaattcttcccaaactccgagcaaccaaccacaaagtgctgctgttctgccaaatgacctccctcatgaccatcatggaagattactttgcgtatcgcggctttaaatacctcaggcttgatggaaccacgaaggcggaggaccggggcatgctgctgaaaaccttcaacgagcccggctctgagtacttcatcttcctgctcagcacccgggctggggggctcggcctgaacctccagtcggcagacactgtgatcatttttgacagcgactggaatcctcaccaggacctgcaagcgcaggaccgagcccaccgcatcgggcagcagaacgaggtgcgtgtgctccgcctctgcaccgtcaacagcgtggaggagaagatcctagctgcagccaagtacaagctcaacgtggaccagaaggtgatccaggccggcatgttcgaccagaagtcctccagccatgagcggcgcgccttcctgcaggccatcctggagcacgaggagcaggatgagagcagacactgcagcacgggcagcggcagtgccagcttcgcccacactgcccctccgccagcgggcgtcaaccccgacttggaggagccacctctaaaggaggaagacgaggtgcccgacgacgagaccgtcaaccagatgatcgcccggcacgaggaggagtttgatctgttcatgcgcatggacctggaccgcaggcgcgaggaggcccgcaaccccaagcggaagccgcgcctcatggaggaggacgagctcccctcgtggatcatcaaggacgacgcggaggtggagcggctgacctgtgaggaggaggaggagaagatgttcggccgtggctcccgccaccgcaaggaggtggactacagcgactcactgacggagaagcagtggctcaagaaaattacaggaaaagatatccatgacacagccagcagtgtggcacgtgggctacaattccagcgtggccttcagttctgcacacgtgcgtcaaaggccatcgaggagggcacgctggaggagatcgaagaggaggtccggcagaagaaatcatcacggaagcgcaagcgagacagcgacgccggctcctccaccccgaccaccagcacccgcagccgcgacaaggacgacgagagcaagaagcagaagaagcgcgggcggccgcctgccgagaaactctcccctaacccacccaacctcaccaagaagatgaagaagattgtggatgccgtgatcaagtacaaggacagcagcagtggacgtcagctcagcgaggtcttcatccagctgccctcgcgaaaggagctgcccgagtactacgagctcatccgcaagcccgtggacttcaagaagataaaggagcgcattcgcaaccacaagtaccgcagcctcaacgacctagagaaggacgtcatgctcctgtgccagaacgcacagaccttcaacctggagggctccctgatctatgaagactccatcgtcttgcagtcggtcttcaccagcgtgcggcagaaaatcgagaaggaggatgacagtgaaggcgaggagagtgaggaggaggaagagggcgaggaggaaggctccgaatccgaatctcggtccgtcaaagtgaagatcaagcttggccggaaggagaaggcacaggaccggctgaagggcggccggcggcggccgagccgagggtcccgagccaagccggtcgtgagtgacgatgacagtgaggaggaacaagaggaggaccgctcaggaagtggcagcgaagaagactgagccccgacattccagtctcgaccccgagcccctcgttccagagctgagatggcataggccttagcagtaacgggtagcagcagatgtagtttcagacttggagtaaaactgtataaacaaaagaatcttccatatttatacagcagagaagctgtaggactgtttgtgactggccctgtcctggcatcagtagcatctgtaacagcattaactgtcttaaagagagagagagagaattccgaattggggaacacacgatacctgtttttcttttccgttgctggcagtactgttgcgccgcagtttggagtcactgtagttaagtgtggatgcatgtgcgtcaccgtccactcctcctactgtattttattggacaggtcagactcgccgggggcccggcgagggtatgtcagtgtcactggatgtcaaacagtaataaattaaaccaacaacaaaacgca

SEQ ID NO: 1468 - protein, 1679 aa, Homo sapiens
MSTPDPPLGGTPRPGPSPGPGPSPGAMLGPSPGPSPGSAHSMMGPSPGPPSAGHPIPTQGPGGYPQDNMHQMHKPMESMHEKGMSDDPRYNQMKGMGMRSGGHAGMGPPPSPMDQHSQGYPSPLGGSEHASSPVPASGPSSGPQMSSGPGGAPLDGADPQALGQQNRGPTPFNQNQLHQLRAQIMAYKMLARGQPLPDHLQMAVQGKRPMPGMQQQMPTLPPPSVSATGPGPGPGPGPGPGPGPAPPNYSRPHGMGGPNMPPPGPSGVPPGMPGQPPGGPPKPWPEGPMANAAAPTSTPQKLIPPQPTGRPSPAPPAVPPAASPVMPPQTQSPGQPAQPAPMVPLHQKQSRITPIQKPRGLDPVEILQEREYRLQARIAHRIQELENLPGSLAGDLRTKATIELKALRLLNFQRQLRQEVVVCMRRDTALETALNAKAYKRSKRQSLREARITEKLEKQQKIEQERKRRQKHQEYLNSILQHAKDFKEYHRSVTGKIQKLTKAVATYHANTEREQKKENERIEKERMRRLMAEDEEGYRKLIDQKKDKRLAYLLQQTDEYVANLTELVRQHKAAQVAKEKKKKKKKKKAENAEGQTPAIGPDGEPLDETSQMSDLPVKVIHVESGKILTGTDAPKAGQLEAWLEMNPGYEVAPRSDSEESGSEEEEEEEEEEQPQAAQPPTLPVEEKKKIPDPDSDDVSEVDARHIIENAKQDVDDEYGVSQALARGLQSYYAVAHAVTERVDKQSALMVNGVLKQYQIKGLEWLVSLYNNNLNGILADEMGLGKTIQTIALITYLMEHKRINGPFLIIVPLSTLSNWAYEFDKWAPSVVKVSYKGSPAARRAFVPQLRSGKFNVLLTTYEYIIKDKHILAKIRWKYMIVDEGHRMKNHHCKLTQVLNTHYVAPRRLLLTGTPLQNKLPELWALLNFLLPTIFKSCSTFEQWFNAPFAMTGEKVDLNEEETILIIRRLHKVLRPFLLRRLKKEVEAQLPEKVEYVIKCDMSALQRVLYRHMQAKGVLLTDGSEKDKKGKGGTKTLMNTIMQLRKICNHPYMFQHIEESFSEHLGFTGGIVQGLDLYRASGKFELLDRILPKLRATNHKVLLFCQMTSLMTIMEDYFAYRGFKYLRLDGTTKAEDRGMLLKTFNEPGSEYFIFLLSTRAGGLGLNLQSADTVIIFDSDWNPHQDLQAQDRAHRIGQQNEVRVLRLCTVNSVEEKILAAAKYKLNVDQKVIQAGMFDQKSSSHERRAFLQAILEHEEQDESRHCSTGSGSASFAHTAPPPAGVNPDLEEPPLKEEDEVPDDETVNQMIARHEEEFDLFMRMDLDRRREEARNPKRKPRLMEEDELPSWIIKDDAEVERLTCEEEEEKMFGRGSRHRKEVDYSDSLTEKQWLKKITGKDIHDTASSVARGLQFQRGLQFCTRASKAIEEGTLEEIEEEVRQKKSSRKRKRDSDAGSSTPTTSTRSRDKDDESKKQKKRGRPPAEKLSPNPPNLTKKMKKIVDAVIKYKDSSSGRQLSEVFIQLPSRKELPEYYELIRKPVDFKKIKERIRNHKYRSLNDLEKDVMLLCQNAQTFNLEGSLIYEDSIVLQSVFTSVRQKIEKEDDSEGEESEEEEEGEEEGSESESRSVKVKIKLGRKEKAQDRLKGGRRRPSRGSRAKPVVSDDDSEEEQEEDRSGSGSEED

SEQ ID NO: 1469 - DNA, 2866 bp, Homo sapiens
acgctgtccaactgggcgtacgagtttgacaagtgggccccctccgtggtgaaggtgtcttacaagggatccccagcagcaagacgggcctttgtcccccagctccggagtgggaagttcaacgtcttgctgacgacgtacgagtacatcatcaaagacaagcacatcctcgccaagatccgttggaagtacatgattgtggacgaaggtcaccgcatgaagaaccaccactgcaagctgacgcaggtgctcaacacgcactatgtggcaccccgccgcctgctgctgacgggcacaccgctgcagaacaagcttcccgagctctgggcgctgctcaacttcctgctgcccaccatcttcaagagctgcagcaccttcgagcagtggtttaacgcaccctttgccatgaccggggaaaaggtggacctgaatgaggaggaaaccattctcatcatccggcgtctccacaaagtgctgcggcccttcttgctccgacgactcaagaaggaagtcgaggcccagttgcccgaaaaggtggagtacgtcatcaagtgcgacatgtctgcgctgcagcgagtgctctaccgccacatgcaggccaagggcgtgctgctgactgatggctccgagaaggacaagaagggcaaaggcggcaccaagaccctgatgaacaccatcatgcagctgcggaagatctgcaaccacccctacatgttccagcacatcgaggagtccttttccgagcacttggggttcactggcggcattgtccaagggctggacctgtaccgagcctcgggtaaatttgagcttcttgatagaattcttcccaaactccgagcaaccaaccacaaagtgctgctgttctgccaaatgacctccctcatgaccatcatggaagattactttgcgtatcgcggctttaaatacctcaggcttgatggaaccacgaaggcggaggaccggggcatgctgctgaaaaccttcaacgagcccggctctgagtacttcatcttcctgctcagcacccgggctggggggctcggcctgaacctccagtcggcagacactgtgatcatttttgacagcgactggaatcctcaccaggacctgcaagcgcaggaccgagcccaccgcatcgggcagcagaacgaggtgcgtgtgctccgcctctgcaccgtcaacagcgtggaggagaagatcctagctgcagccaagtacaagctcaacgtggaccagaaggtgatccaggccggcatgttcgaccagaagtcctccagccatgagcggcgcgccttcctgcaggccatcctggagcacgaggagcaggatgaggaggaagacgaggtgcccgacgacgagaccgtcaaccagatgatcgcccggcacgaggaggagtttgatctgttcatgcgcatggacctggaccgcaggcgcgaggaggcccgcaaccccaagcggaagccgcgcctcatggaggaggacgagctcccctcgtggatcatcaaggacgacgcggaggtggagcggctgacctgtgaggaggaggaggagaagatgttcggccgtggctcccgccaccgcaaggaggtggactacagcgactcactgacggagaagcagtggctcaaggccatcgaggagggcacgctggaggagatcgaagaggaggtccggcagaagaaatcatcacggaagcgcaagcgagacagcgacgccggctcctccaccccgaccaccagcacccgcagccgcgacaaggacgacgagagcaagaagcagaagaagcgcgggcggccgcctgccgagaaactctcccctaacccacccaacctcaccaagaagatgaagaagattgtggatgccgtgatcaagtacaaggacagcagcagtggacgtcagctcagcgaggtcttcatccagctgccctcgcgaaaggagctgcccgagtactacgagctcatccgcaagcccgtggacttcaagaagataaaggagcgcattcgcaaccacaagtaccgcagcctcaacgacctagagaaggacgtcatgctcctgtgccagaacgcacagaccttcaacctggagggctccctgatctatgaagactccatcgtcttgcagtcggtcttcaccagcgtgcggcagaaaatcgagaaggaggatgacagtgaaggcgaggagagtgaggaggaggaagagggcgaggaggaaggctccgaatccgaatctcggtccgtcaaagtgaagatcaagcttggccggaaggagaaggcacaggaccggctgaagggcggccggcggcggccgagccgagggtcccgagccaagccggtcgtgagtgacgatgacagtgaggaggaacaagaggaggaccgctcaggaagtggcagcgaagaagactgagccccgacattccagtctcgaccccgagcccctcgttccagagctgagatggcataggccttagcagtaacgggtagcagcagatgtagtttcagacttggagtaaaactgtataaacaaaagaatcttccatatttatacagcagagaagctgtaggactgtttgtgactggccctgtcctggcatcagtagcatctgtaacagcattaactgtcttaaagagagagagagagaattccgaattggggaacacacgatacctgtttttcttttccgttgctggcagtactgttgcgccgcagtttggagtcactgtagttaagtgtggatgcatgtgcgtcaccgtccactcctcctactgtattttattggacaggtcagactcgccgggggcccggcgagggtatgtcagtgtcactggatgtcaaacagtaataaattaaaccaacaacaaaacgc

SEQ ID NO: 1470 - protein, 628 aa, Homo sapiens
TLSNWAYEFDKWAPSVVKVSYKGSPAARRAFVPQLRSGKFNVLLTTYEYIIKDKHILAKIRWKYMIVDEGHRMKNHHCKLTQVLNTHYVAPRRLLLTGTPLQNKLPELWALLNFLLPTIFKSCSTFEQWFNAPFAMTGEKVDLNEEETILIIRRLHKVLRPFLLRRLKKEVEAQLPEKVEYVIKCDMSALQRVLYRHMQAKGVLLTDGSEKDKKGKGGTKTLMNTIMQLRKICNHPYMFQHIEESFSEHLGFTGGIVQGLDLYRASGKFELLDRILPKLRATNHKVLLFCQMTSLMTIMEDYFAYRGFKYLRLDGTTKAEDRGMLLKTFNEPGSEYFIFLLSTRAGGLGLNLQSADTVIIFDSDWNPHQDLQAQDRAHRIGQQNEVRVLRLCTVNSVEEKILAAAKYKLNVDQKVIQAGMFDQKSSSHERRAFLQAILEHEEQDEEEDEVPDDETVNQMIARHEEEFDLFMRMDLDRRREEARNPKRKPRLMEEDELPSWIIKDDAEVERLTCEEEEEKMFGRGSRHRKEVDYSDSLTEKQWLKAIEEGTLEEIEEEVRQKKSSRKRKRDSDAGSSTPTTSTRSRDKDDESKKQKKRGRPPAEKLSPNPPNLTKKMKKIVDAVIKYKD

SEQ ID NO: 1471 - DNA, 3839 bp, Homo sapiens
actcgcctggagcgcgcgggcaaggcgggcggagcgcactggaactcaagggggcgcacagcggcgcgctcgcaccgctcggctccgcgcggctctaggaggtggcggcggtggcggtggcggcggtggcggcggcggcggcggcggggcgcagggctgagcgagcgtccgggttccggggctccggggaaggcggttgcagctcctgagtgcagcgcggcttcctgccactgtcccggcccggccacctctctgtcatggctctggcggacagcacacgtggattacccaacgggggcggcggcgggggcggcagtggctcctcgtcgtcctccgcggagccaccgctcttccccgacatcgtggagctgaacgtggggggccaggtgtacgtgacccggcgctgcacggtggtgtcggtgcccgactcgctgctctggcgcatgttcacgcagcagcagccgcaggagctggcccgggacagcaaaggccgcttctttctggaccgggacggcttcctcttccgctacatcctggattacctgcgggacttgcagctcgtgctgcccgactacttccccgagcgcagccggctgcagcgcgaggccgagtacttcgagctgccagagctcgtgcgccgcctcggggcgccccagcagcccggcccggggccgccgccctcgcggcgcggggtgcacaaggagggctcgctgggtgacgagctgctgccgcttggctactcggagcccgaacagcaggagggcgcctctgccggggcgccgtcgcccacgctggagctggctagccgcagtccgtccgggggcgcggcgggcccgctgctcacgccgtcccagtcgctggacggcagccggcgctcgggctacatcaccatcggctaccgcggctcctacaccatcgggcgggacgcgcaggcggacgccaagttccggcgagtggcgcgcatcaccgtttgcggaaagacgtcgctggccaaggaggtgtttggggacaccctgaacgaaagccgggaccccgaccgtcccccggagcgctacacctcgcgctattacctcaagttcaacttcctggagcaggccttcgacaagctgtccgagtcgggcttccacatggtggcgtgcagctccacgggcacctgcgcctttgccagcagcaccgaccagagcgaggacaagatctggaccagctacaccgagtacgtcttctgcagggagtgagctccccagaccccctcgccactccagcgcccttttcagctgctgctcgccagaagcccttgattccactggttgacatggcagcagttactggcaagagggagaaaggacgctgccgcctaagagtgcaaggctgctcaggtctccaagcgccgtaggaggtcacctggcagtgactgtagggagctgggtcatagtgcacgtcgtgggtattaggaaagcctgtattctttcaatgaatgtcagtaggaccttcctttagctgtaagacttggtgggcggggtggggtggggagggaggaaagggtaggaagggtgggaagggagaagcagacatagtcatttatgatttgaaagttggaagtttgtaccatctgtttgagtatatgcacatttaaaaaatatcatatagtaaatgcaaacatgccaagtattttataaagattaataacagacctactcttacctggcagtttacttaacttactgttttgagtcctaaacttagagttgttaatgcttatatataatctaaccaaagagttacccagtagggttttagtttttgaacttttattttcttgttgattataaatcctgattttggaatctattgcgcaaaagaagtttcattttggttacttagacctaagatcacttattaaaaatccttattttctccaagcccagcaaacgttgacttctgggcaaacctgaaaacctgaaaatgccactttcatgcagtttgtttgaagttaagtggaatcctttcaaatgacgagctgcagagaactcagcaccaagggctgcctatctgtagatagctgtaaaatggaatatttttaaatgaaggcaaataagtacttaaaagtgagctgagcaataaaatggtccaataataggtaaatgcaacagaaacagaaggagacctggttgccttatgcctttactcttacatggaataaattcccaatgcatatcctatgtaaaccataagtgaagggaaataaacctcgtcatgctccatgctgtgaggtgtcctttggatattctgtgatgacagagaagcctattttgttttgttttcagcatctttctctgatgtacgtttttaaggattttgtaagagctgttttcagtgtttaaattagtgctatttttccttgtttttaaaaatgaatctcgtactgtatcttactatgtccatacagatgttacaaatcgacagttttattcttagactcatgtgatccaagctgtatataccatatataaacattttacatgaatcatttagttttttaattcatttactaatgctataaaatttcctatattaccccagtaatttgcatcagctggtttatatactaaagcaacatgttttgatgagtttcttacatccttatcgaggaattgggttaggaaaaaatacataattgtaaaactgagtttgctgtattatactttttttcttgagtattagttgtattactaatcatatgttgattaactgtctacttaaagtcaaggtacctgtatttttaatccactaatttttttttagttgggaaatagatttcaggtcttttattagactaacattttttgagaagtaaaattgacttcatatacaaagcctgtaattttaggcgaaatggaagcagaaatctaggaagttgtgcttgcttgtatgttgagtttggtctcagactaagtaatgcatcagaattcatctgtttgaagcctgaaataatttaggactctgattcactgaccaaaagtcagtgttgcagagatttctctaccccgtatggtattttgttagattgttcaacaggaagcacatgattgagaacatcttgggacagaccaaaaccactgacagatggcaaggctcggcgattctgatttcccttctcaaatctgctcaactccaagagtcttgagaaactgctaaaattttgcctctgtcactcaagtcttacaaatgttatcttgtaaacctttgaggtgaactattccactgtcttgtacataggcatcttattcactgcaccctgtcacacccagcaccccccgccccgcacattatttgaaagactgggaatttaatggttagggacagtaaatctacttctttttccagggacgactgtcccctctaaagttaaagtcaatacaagaaaactgtctatttttagcctaaagtaaaggctgtgaagaaaattcattttacattgggtagacagtaaaaaacaagtaaaataacttgacatgagcacctttagatcccttcccctccatgggctttgggccacagaatgaacctttgaggcctgtaaagtggattgtaatttcctataagctgtaatagtggaggtattgtgggttcatttgagtaagccctccaaagataccattcaaataacctgggagaatgtcataaattattcagataattaacactgcatgaatctgattcagaggcatgcatttacatatgttgccctaattaccatttgatgatcataaatacaagtgaatgacattggacttttagtaacaaacttaatttttaaaaaggtgtagacaatggtggtt

SEQ ID NO: 1472 - protein, 325 aa, Homo sapiens
MALADSTRGLPNGGGGGGGSGSSSSSAEPPLFPDIVELNVGGQVYVTRRCTVVSVPDSLLWRMFTQQQPQELARDSKGRFFLDRDGFLFRYILDYLRDLQLVLPDYFPERSRLQREAEYFELPELVRRLGAPQQPGPGPPPSRRGVHKEGSLGDELLPLGYSEPEQQEGASAGAPSPTLELASRSPSGGAAGPLLTPSQSLDGSRRSGYITIGYRGSYTIGRDAQADAKFRRVARITVCGKTSLAKEVFGDTLNESRDPDRPPERYTSRYYLKFNFLEQAFDKLSESGFHMVACSSTGTCAFASSTDQSEDKIWTSYTEYVFCRE

SEQ ID NO: 1473 - DNA, 1401 bp, Homo sapiens
atggagccatggccctgctccccgggcggcggcggcgggacccgcgcccggcacgtcatcatcaacgtgggcggctgccgcgtgcgcctggcatgggccgcgctggcgcgatgccccctcgcgcgcctggagcgcctgcgcgcctgccgcggccacgacgacctgctgcgcgtgtgtgacgactacgacgtgagccgcgacgagttcttcttcgaccgcagcccgtgcgccttccgcgccatcgtggcgcttttgcgcgcagggaagctgcgactgctgcggggcccgtgcgcgctggccttccgcgacgagctggcctactggggcatcgacgaggcgcgcctggagcgctgctgcctgcgccgcctgcgccgccgcgaggaggaggcggccgaggcccgcgcggggccgacggagcgcggggcgcaggggagcccggcgcgcgccctgggacctcgggggcggctgcagcgcggccggcggcgcctgcgcgacgtggtggacaacccgcactcggggctggcgggcaagctcttcgcctgcgtgtccgtgtccttcgtggccgtcacggccgtgggcctctgcctgagcaccatgccggacatccgcgccgaggaggagcggggcgagtgctcccccaagtgccgcagcctgttcgtgctggagaccgtgtgcgtggcctggttctccttcgagttcctgctgcgctccctgcaggccgagagcaagtgcgccttcctgcgcgcgccactcaacatcattgacatcctggcgctcctgccgttctacgtgtcgctgctgctggggctggcggcaggcccgggcgggaccaagctcctggagcgcgcggggctggtgctgcggctgctgcgtgcgctgcgcgtgctctacgtgatgcgcctggcgcgccactcgctggggctgcgttcgctgggcctgaccatgcgccgctgcgcgcgcgagttcgggctgctgctgctgttcctctgcgtggccatggcgctcttcgcgccactggtgcacctggccgagcgcgagctgggcgcgcgccgcgacttctccagcgtgcccgccagctattggtgggccgtcatctccatgaccaccgtgggctacggcgacatggtcccgcgcagcctgcccgggcaggtggtggcgctcagcagcatcctcagcggcatcctgctcatggccttcccggtcacctccatcttccacaccttttcgcgctcctactccgagctcaaggagcagcagcagcgcgcggccagccccgagccggccctgcaggaggacagcacgcactcggccacagccaccgaggacagctcgcagggccccgacagcgcgggcctggccgacgactccgcggatgcgctgtgggtgcgggcagggcgctga

SEQ ID NO: 1474 - protein, 466 aa, Homo sapiens
MEPWPCSPGGGGGTRARHVIINVGGCRVRLAWAALARCPLARLERLRACRGHDDLLRVCDDYDVSRDEFFFDRSPCAFRAIVALLRAGKLRLLRGPCALAFRDELAYWGIDEARLERCCLRRLRRREEEAAEARAGPTERGAQGSPARALGPRGRLQRGRRRLRDVVDNPHSGLAGKLFACVSVSFVAVTAVGLCLSTMPDIRAEEERGECSPKCRSLFVLETVCVAWFSFEFLLRSLQAESKCAFLRAPLNIIDILALLPFYVSLLLGLAAGPGGTKLLERAGLVLRLLRALRVLYVMRLARHSLGLRSLGLTMRRCAREFGLLLLFLCVAMALFAPLVHLAERELGARRDFSSVPASYWWAVISMTTVGYGDMVPRSLPGQVVALSSILSGILLMAFPVTSIFHTFSRSYSELKEQQQRAASPEPALQEDSTHSATATEDSSQGPDSAGLADDSADALWVRAGR

SEQ ID NO: 1475 - DNA, 5403 bp, Homo sapiens
catttcaggccaaccaactcaaacttgaagacatgaaatccccaaggagaaccactttgtgcctcatgtttattgtgatttattcttccaaagctgcactgaactggaattacgagtctactattcatcctttgagtcttcatgaacatgaaccagctggtgaagaggcactgaggcaaaaacgagccgttgccacaaaaagtcctacggctgaagaatacactgttaatattgagatcagttttgaaaatgcatccttcctggatcctatcaaagcctacttgaacagcctcagttttccaattcatgggaataacactgaccaaattaccgacattttgagcataaatgtgacaacagtctgcagacctgctggaaatgaaatctggtgctcctgcgagacaggttatgggtggcctcgggaaaggtgtcttcacaatctcatttgtcaagagcgtgacgtcttcctcccagggcaccattgcagttgccttaaagaactgcctcccaatggacctttttgcctgcttcaggaagatgttaccctgaacatgagagtcagactaaatgtaggctttcaagaagacctcatgaacacttcctccgccctctataggtcctacaagaccgacttggaaacagcgttccggaagggttacggaattttaccaggcttcaagggcgtgactgtgacagggttcaagtctggaagtgtggttgtgacatatgaagtcaagactacaccaccatcacttgagttaatacataaagccaatgaacaagttgtacagagcctcaatcagacctacaaaatggactacaactcctttcaagcagttactatcaatgaaagcaatttctttgtcacaccagaaatcatctttgaaggggacacagtcagtctggtgtgtgaaaaggaagttttgtcctccaatgtgtcttggcgctatgaagaacagcagttggaaatccagaacagcagcagattctcgatttacaccgcacttttcaacaacatgacttcggtgtccaagctcaccatccacaacatcactccaggtgatgcaggtgaatatgtttgcaaactgatattagacatttttgaatatgagtgcaagaagaaaatagatgttatgcccatccaaattttggcaaatgaagaaatgaaggtgatgtgcgacaacaatcctgtatctttgaactgctgcagtcagggtaatgttaattggagcaaagtagaatggaagcaggaaggaaaaataaatattccaggaacccctgagacagacatagattctagctgcagcagatacaccctcaaggctgatggaacccagtgcccaagcgggtcgtctggaacaacagtcatctacacttgtgagttcatcagtgcctatggagccagaggcagtgcaaacataaaagtgacattcatctctgtggccaatctaacaataaccccggacccaatttctgtttctgagggacaaaacttttctataaaatgcatcagtgatgtgagtaactatgatgaggtttattggaacacttctgctggaattaaaatataccaaagattttataccacgaggaggtatcttgatggagcagaatcagtactgacagtcaagacctcgaccagggagtggaatggaacctatcactgcatatttagatataagaattcatacagtattgcaaccaaagacgtcattgttcacccgctgcctctaaagctgaacatcatggttgatcctttggaagctactgtttcatgcagtggttcccatcacatcaagtgctgcatagaggaggatggagactacaaagttactttccatacgggttcctcatcccttcctgctgcaaaagaagttaacaaaaaacaagtgtgctacaaacacaatttcaatgcaagctcagtttcctggtgttcaaaaactgttgatgtgtgttgtcactttaccaatgctgctaataattcagtctggagcccatctatgaagctgaatctggttcctggggaaaacatcacatgccaggatcccgtaataggtgtcggagagccggggaaagtcatccagaagctatgccggttctcaaacgttcccagcagccctgagagtcccattggcgggaccatcacttacaaatgtgtaggctcccagtgggaggagaagagaaatgactgcatctctgccccaataaacagtctgctccagatggctaaggctttgatcaagagcccctctcaggatgagatgctccctacatacctgaaggatctttctattagcatagacaaagcggaacatgaaatcagctcttctcctgggagtctgggagccattattaacatccttgatctgctctcaacagttccaacccaagtaaattcagaaatgatgacgcacgtgctctctacggttaatgtcatccttggcaagcccgtcttgaacacctggaaggttttacaacagcaatggaccaatcagagttcacagctactacattcagtggaaagattttcccaagcattacagtcgggagatagccctcctttgtccttctcccaaactaatgtgcagatgagcagcatggtaatcaagtccagccacccagaaacctatcaacagaggtttgttttcccatactttgacctctggggcaatgtggtcattgacaagagctatctagaaaacttgcagtcggattcgtctattgtcaccatggctttcccaactctccaagccatccttgcccaggatatccaggaaaataactttgcagagagcttagtgatgacaaccactgtcagccacaatacaactatgccattcaggatttcaatgacttttaagaacaatagcccttcaggcggcgaaacgaagtgtgtcttctggaacttcaggcttgccaacaacacaggggggtgggacagcagtgggtgctatgtagaagaaggtgatggggacaatgtcacctgtatctgtgaccacctaacatcattctccatcctcatgtcccctgactccccagatcctagttctctcctgggaatactcctggatattatttcttatgttggggtgggcttttccatcttgagcttggcagcctgtctagttgtggaagctgtggtgtggaaatcggtgaccaagaaccggacttcttatatgcgccacacctgcatagtgaatatcgctgcctcccttctggtcgccaacacctggttcattgtggtcgctgccatccaggacaatcgctacatactctgcaagacagcctgtgtggctgccaccttcttcatccacttcttctacctcagcgtcttcttctggatgctgacactgggcctcatgctgttctatcgcctggttttcattctgcatgaaacaagcaggtccactcagaaagccattgccttctgtcttggctatggctgcccacttgccatctcggtcatcacgctgggagccacccagccccgggaagtctatacgaggaagaatgtctgttggctcaactgggaggacaccaaggccctgctggctttcgccatcccagcactgatcattgtggtggtgaacataaccatcactattgtggtcatcaccaagatcctgaggccttccattggagacaagccatgcaagcaggagaagagcagcctgtttcagatcagcaagagcattggggtcctcacaccactcttgggcctcacttggggttttggtctcaccactgtgttcccagggaccaaccttgtgttccatatcatatttgccatcctcaatgtcttccagggattattcattttactctttggatgcctctgggatctgaagtcaacatccctgggttcatccacacctgtgttttctatgagttctccaatatcaaggagatttaacaatttgtttggtaaaacaggaacgtataatgtttccaccccagaagcaaccagctcatccctggaaaactcatccagtgcttcttcgttgctcaactaagaacaggataatccaacctacgtgacctcccggggacagtggctgtgcttttaaaaagagatgcttgcaaagcaatggggaacgtgttctcggggcaggtttccgggagcagatgccaaaaagactttttcatagagaagaggctttcttttgtaaagacagaataaaaataattgttatgtttctgtttgttccctccccctcccccttgtgtgataccacatgtgtatagtatttaagtgaaactcaagccctcaaggcccaacttctctgtctatattgtaatatagaatttcgaagagacattttcactttttacacattgggcacaaagataagctttgattaaagtagtaagtaaaaggctacctaggaaatacttcagtgaattctaagaaggaaggaaggaagaaaggaaggaaagaagggagggaaacagggagaaagggaaaaagaagaaaaagagaaagatgaaaataggaacaaataaagacaaacaacattaagggccatattgtaagatttccatgttaatgatctaatataatcactcagtgcaacattgagaatttttttttaatggctcaaaaatggaaactgaaagcaagtcatggggaatgaatactttgggcagtatcttcctgatgtcttcttagctaagaggaggaaaaaaaggctgaaaaaatagggaggaaattccttcatcagaacgacttcaagtggataacaatatttataagaaatgaatggaaggaaatatgatcctcctgagactaactttgtatgttaaggtttgaactaagtgaatgtatctgcagaggaagtattacaaagatatgtcattagatccaagtgctgattaaatttttatagtttatcagaaaagccttatattttagtttgttccacattttgaaagcaaaaaatatatatttgatatacccttcaattgccaaatttgatatgttgcactgaagacagaccctgtcatatatttaatggcttcaagcaggtacttctctgtgcattatagaatagattttaataatcttatagcattgtatattattattgctgttgtcactgttattattattgtggatactggcccttggtgtgttgcatagctccctatgtattctctgtttccatctttaagttcccagaccaatatacattaagagttttgcatggtctaaattgtgtttattccaaccacgtggaaagctcctggaaagaaattttacattcggttgttctgtgctcctaatgacacttgaccttgttgaacaaatggcagagcctttcccaaggatttgattgtttgtgaattatctgcatgtgtgcttttttttggtgtgtatttcattaaaaaatataaatatttatg

SEQ ID NO: 1476 - protein, 1326 aa, Homo sapiens
MKSPRRTTLCLMFIVIYSSKAALNWNYESTIHPLSLHEHEPAGEEALRQKRAVATKSPTAEEYTVNIEISFENASFLDPIKAYLNSLSFPIHGNNTDQITDILSINVTTVCRPAGNEIWCSCETGYGWPRERCLHNLICQERDVFLPGHHCSCLKELPPNGPFCLLQEDVTLNMRVRLNVGFQEDLMNTSSALYRSYKTDLETAFRKGYGILPGFKGVTVTGFKSGSVVVTYEVKTTPPSLELIHKANEQVVQSLNQTYKMDYNSFQAVTINESNFFVTPEIIFEGDTVSLVCEKEVLSSNVSWRYEEQQLEIQNSSRFSIYTALFNNMTSVSKLTIHNITPGDAGEYVCKLILDIFEYECKKKIDVMPIQILANEEMKVMCDNNPVSLNCCSQGNVNWSKVEWKQEGKINIPGTPETDIDSSCSRYTLKADGTQCPSGSSGTTVIYTCEFISAYGARGSANIKVTFISVANLTITPDPISVSEGQNFSIKCISDVSNYDEVYWNTSAGIKIYQRFYTTRRYLDGAESVLTVKTSTREWNGTYHCIFRYKNSYSIATKDVIVHPLPLKLNIMVDPLEATVSCSGSHHIKCCIEEDGDYKVTFHTGSSSLPAAKEVNKKQVCYKHNFNASSVSWCSKTVDVCCHFTNAANNSVWSPSMKLNLVPGENITCQDPVIGVGEPGKVIQKLCRFSNVPSSPESPIGGTITYKCVGSQWEEKRNDCISAPINSLLQMAKALIKSPSQDEMLPTYLKDLSISIDKAEHEISSSPGSLGAIINILDLLSTVPTQVNSEMMTHVLSTVNVILGKPVLNTWKVLQQQWTNQSSQLLHSVERFSQALQSGDSPPLSFSQTNVQMSSMVIKSSHPETYQQRFVFPYFDLWGNVVIDKSYLENLQSDSSIVTMAFPTLQAILAQDIQENNFAESLVMTTTVSHNTTMPFRISMTFKNNSPSGGETKCVFWNFRLANNTGGWDSSGCYVEEGDGDNVTCICDHLTSFSILMSPDSPDPSSLLGILLDIISYVGVGFSILSLAACLVVEAVVWKSVTKNRTSYMRHTCIVNIAASLLVANTWFIVVAAIQDNRYILCKTACVAATFFIHFFYLSVFFWMLTLGLMLFYRLVFILHETSRSTQKAIAFCLGYGCPLAISVITLGATQPREVYTRKNVCWLNWEDTKALLAFAIPALIIVVVNITITIVVITKILRPSIGDKPCKQEKSSLFQISKSIGVLTPLLGLTWGFGLTTVFPGTNLVFHIIFAILNVFQGLFILLFGCLWDLKSTSLGSSTPVFSMSSPISRRFNNLFGKTGTYNVSTPEATSSSLENSSSASSLLN

SEQ ID NO: 1477 - DNA, 5463 bp, Homo sapiens
catttcaggccaaccaactcaaacttgaagacatgaaatccccaaggagaaccactttgtgcctcatgtttattgtgatttattcttccaaagctgcactgaactggaattacgagtctactattcatcctttgagtcttcatgaacatgaaccagctggtgaagaggcactgaggcaaaaacgagccgttgccacaaaaagtcctacggctgaagaatacactgttaatattgagatcagttttgaaaatgcatccttcctggatcctatcaaagcctacttgaacagcctcagttttccaattcatgggaataacactgaccaaattaccgacattttgagcataaatgtgacaacagtctgcagacctgctggaaatgaaatctggtgctcctgcgagacaggttatgggtggcctcgggaaaggtgtcttcacaatctcatttgtcaagagcgtgacgtcttcctcccagggcaccattgcagttgccttaaagaactgcctcccaatggacctttttgcctgcttcaggaagatgttaccctgaacatgagagtcagactaaatgtaggctttcaagaagacctcatgaacacttcctccgccctctataggtcctacaagaccgacttggaaacagcgttccggaagggttacggaattttaccaggcttcaagggcgtgactgtgacagggttcaagtctggaagtgtggttgtgacatatgaagtcaagactacaccaccatcacttgagttaatacataaagccaatgaacaagttgtacagagcctcaatcagacctacaaaatggactacaactcctttcaagcagttactatcaatgaaagcaatttctttgtcacaccagaaatcatctttgaaggggacacagtcagtctggtgtgtgaaaaggaagttttgtcctccaatgtgtcttggcgctatgaagaacagcagttggaaatccagaacagcagcagattctcgatttacaccgcacttttcaacaacatgacttcggtgtccaagctcaccatccacaacatcactccaggtgatgcaggtgaatatgtttgcaaactgatattagacatttttgaatatgagtgcaagaagaaaatagatgttatgcccatccaaattttggcaaatgaagaaatgaaggtgatgtgcgacaacaatcctgtatctttgaactgctgcagtcagggtaatgttaattggagcaaagtagaatggaagcaggaaggaaaaataaatattccaggaacccctgagacagacatagattctagctgcagcagatacaccctcaaggctgatggaacccagtgcccaagcgggtcgtctggaacaacagtcatctacacttgtgagttcatcagtgcctatggagccagaggcagtgcaaacataaaagtgacattcatctctgtggccaatctaacaataaccccggacccaatttctgtttctgagggacaaaacttttctataaaatgcatcagtgatgtgagtaactatgatgaggtttattggaacacttctgctggaattaaaatataccaaagattttataccacgaggaggtatcttgatggagcagaatcagtactgacagtcaagacctcgaccagggagtggaatggaacctatcactgcatatttagatataagaattcatacagtattgcaaccaaagacgtcattgttcacccgctgcctctaaagctgaacatcatggttgatcctttggaagctactgtttcatgcagtggttcccatcacatcaagtgctgcatagaggaggatggagactacaaagttactttccatacgggttcctcatcccttcctgctgcaaaagaagttaacaaaaaacaagtgtgctacaaacacaatttcaatgcaagctcagtttcctggtgttcaaaaactgttgatgtgtgttgtcactttaccaatgctgctaataattcagtctggagcccatctatgaagctgaatctggttcctggggaaaacatcacatgccaggatcccgtaataggtgtcggagagccggggaaagtcatccagaagctatgccggttctcaaacgttcccagcagccctgagagtcccattggcgggaccatcacttacaaatgtgtaggctcccagtgggaggagaagagaaatgactgcatctctgccccaataaacagtctgctccagatggctaaggctttgatcaagagcccctctcaggatgagatgctccctacatacctgaaggatctttctattagcatagacaaagcggaacatgaaatcagctcttctcctgggagtctgggagccattattaacatccttgatctgctctcaacagttccaacccaagtaaattcagaaatgatgacgcacgtgctctctacggttaatgtcatccttggcaagcccgtcttgaacacctggaaggttttacaacagcaatggaccaatcagagttcacagctactacattcagtggaaagattttcccaagcattacagtcgggagatagccctcctttgtccttctcccaaactaatgtgcagatgagcagcatggtaatcaagtccagccacccagaaacctatcaacagaggtttgttttcccatactttgacctctggggcaatgtggtcattgacaagagctatctagaaaacttgcagtcggattcgtctattgtcaccatggctttcccaactctccaagccatccttgcccaggatatccaggaaaataactttgcagagagcttagtgatgacaaccactgtcagccacaatacaactatgccattcaggatttcaatgacttttaagaacaatagcccttcaggcggcgaaacgaagtgtgtcttctggaacttcaggcttgccaacaacacaggggggtgggacagcagtgggtgctatgtagaagaaggtgatggggacaatgtcacctgtatctgtgaccacctaacatcattctccatcctcatgtcccctgactccccagatcctagttctctcctgggaatactcctggatattatttcttatgttggggtgggcttttccatcttgagcttggcagcctgtctagttgtggaagctgtggtgtggaaatcggtgaccaagaaccggacttcttatatgcgccacacctgcatagtgaatatcgctgcctcccttctggtcgccaacacctggttcattgtggtcgctgccatccaggacaatcgctacatactctgcaagacagcctgtgtggctgccaccttcttcatccacttcttctacctcagcgtcttcttctggatgctgacactgggcctcatgctgttctatcgcctggttttcattctgcatgaaacaagcaggtccactcagaaagccattgccttctgtcttggctatggctgcccacttgccatctcggtcatcacgctgggagccacccagccccgggaagtctatacgaggaagaatgtctgttggctcaactgggaggacaccaaggccctgctggctttcgccatcccagcactgatcattgtggtggtgaacataaccatcactattgtggtcatcaccaagatcctgaggccttccattggagacaagccatgcaagcaggagaagagcagcctgtttcagatcagcaagagcattggggtcctcacaccactcttgggcctcacttggggttttggtctcaccactgtgttcccagggaccaaccttgtgttccatatcatatttgccatcctcaatgtcttccagggattattcattttactctttggatgcctctgggatctgaaggtacaggaagctttgctgaataagttttcattgtcgagatggtcttcacagcactcaaagtcaacatccctgggttcatccacacctgtgttttctatgagttctccaatatcaaggagatttaacaatttgtttggtaaaacaggaacgtataatgtttccaccccagaagcaaccagctcatccctggaaaactcatccagtgcttcttcgttgctcaactaagaacaggataatccaacctacgtgacctcccggggacagtggctgtgcttttaaaaagagatgcttgcaaagcaatggggaacgtgttctcggggcaggtttccgggagcagatgccaaaaagactttttcatagagaagaggctttcttttgtaaagacagaataaaaataattgttatgtttctgtttgttccctccccctcccccttgtgtgataccacatgtgtatagtatttaagtgaaactcaagccctcaaggcccaacttctctgtctatattgtaatatagaatttcgaagagacattttcactttttacacattgggcacaaagataagctttgattaaagtagtaagtaaaaggctacctaggaaatacttcagtgaattctaagaaggaaggaaggaagaaaggaaggaaagaagggagggaaacagggagaaagggaaaaagaagaaaaagagaaagatgaaaataggaacaaataaagacaaacaacattaagggccatattgtaagatttccatgttaatgatctaatataatcactcagtgcaacattgagaatttttttttaatggctcaaaaatggaaactgaaagcaagtcatggggaatgaatactttgggcagtatcttcctgatgtcttcttagctaagaggaggaaaaaaaggctgaaaaaatagggaggaaattccttcatcagaacgacttcaagtggataacaatatttataagaaatgaatggaaggaaatatgatcctcctgagactaactttgtatgttaaggtttgaactaagtgaatgtatctgcagaggaagtattacaaagatatgtcattagatccaagtgctgattaaatttttatagtttatcagaaaagccttatattttagtttgttccacattttgaaagcaaaaaatatatatttgatatacccttcaattgccaaatttgatatgttgcactgaagacagaccctgtcatatatttaatggcttcaagcaggtacttctctgtgcattatagaatagattttaataatcttatagcattgtatattattattgctgttgtcactgttattattattgtggatactggcccttggtgtgttgcatagctccctatgtattctctgtttccatctttaagttcccagaccaatatacattaagagttttgcatggtctaaattgtgtttattccaaccacgtggaaagctcctggaaagaaattttacattcggttgttctgtgctcctaatgacacttgaccttgttgaacaaatggcagagcctttcccaaggatttgattgtttgtgaattatctgcatgtgtgcttttttttggtgtgtatttcattaaaaaatataaatatttatg

SEQ ID NO: 1478 - protein, 1018 aa, Homo sapiens
MTSVSKLTIHNITPGDAGEYVCKLILDIFEYECKKKIDVMPIQILANEEMKVMCDNNPVSLNCCSQGNVNWSKVEWKQEGKINIPGTPETDIDSSCSRYTLKADGTQCPSGSSGTTVIYTCEFISAYGARGSANIKVTFISVANLTITPDPISVSEGQNFSIKCISDVSNYDEVYWNTSAGIKIYQRFYTTRRYLDGAESVLTVKTSTREWNGTYHCIFRYKNSYSIATKDVIVHPLPLKLNIMVDPLEATVSCSGSHHIKCCIEEDGDYKVTFHTGSSSLPAAKEVNKKQVCYKHNFNASSVSWCSKTVDVCCHFTNAANNSVWSPSMKLNLVPGENITCQDPVIGVGEPGKVIQKLCRFSNVPSSPESPIGGTITYKCVGSQWEEKRNDCISAPINSLLQMAKALIKSPSQDEMLPTYLKDLSISIDKAEHEISSSPGSLGAIINILDLLSTVPTQVNSEMMTHVLSTVNVILGKPVLNTWKVLQQQWTNQSSQLLHSVERFSQALQSGDSPPLSFSQTNVQMSSMVIKSSHPETYQQRFVFPYFDLWGNVVIDKSYLENLQSDSSIVTMAFPTLQAILAQDIQENNFAESLVMTTTVSHNTTMPFRISMTFKNNSPSGGETKCVFWNFRLANNTGGWDSSGCYVEEGDGDNVTCICDHLTSFSILMSPDSPDPSSLLGILLDIISYVGVGFSILSLAACLVVEAVVWKSVTKNRTSYMRHTCIVNIAASLLVANTWFIVVAAIQDNRYILCKTACVAATFFIHFFYLSVFFWMLTLGLMLFYRLVFILHETSRSTQKAIAFCLGYGCPLAISVITLGATQPREVYTRKNVCWLNWEDTKALLAFAIPALIIVVVNITITIVVITKILRPSIGDKPCKQEKSSLFQISKSIGVLTPLLGLTWGFGLTTVFPGTNLVFHIIFAILNVFQGLFILLFGCLWDLKVQEALLNKFSLSRWSSQHSKSTSLGSSTPVFSMSSPISRRFNNLFGKTGTYNVSTPEATSSSLENSSSASSLLN

SEQ ID NO: 1479 - DNA, 4161 bp, Homo sapiens
ggttttgggcagatcagcagtaaggtgttaaattttagaagcctgaaaactccagaagagaaaggccaaccaactcaaacttgaagacatgaaatccccaaggagaaccactttgtgcctcatgtttattgtgatttattcttccaaagctgcactgaactggaattacgagtctactattcatcctttgagtcttcatgaacatgaaccagctggtgaagaggcactgaggcaaaaacgagccgttgccacaaaaagtcctacggctgaagaatacactgttaatattgagatcagttttgaaaatgcatccttcctggatcctatcaaagcctacttgaacagcctcagttttccaattcatgggaataacactgaccaaattaccgacattttgagcataaatgtgacaacagtctgcagacctgctggaaatgaaatctggtgctcctgcgagacaggttatgggtggcctcgggaaaggtgtcttcacaatctcatttgtcaagagcgtgacgtcttcctcccagggcaccattgcagttgccttaaagaactgcctcccaatggacctttttgcctgcttcaggaagatgttaccctgaacatgagagtcagactaaatgtaggctttcaagaagacctcatgaacacttcctccgccctctataggtcctacaagaccgacttggaaacagcgttccggaagggttacggaattttaccaggcttcaagggcgtgactgtgacagggttcaagtctggaagtgtggttgtgacatatgaagtcaagactacaccaccatcacttgagttaatacataaagccaatgaacaagttgtacagagcctcaatcagacctacaaaatggactacaactcctttcaagcagttactatcaatgaaagcaatttctttgtcacaccagaaatcatctttgaaggggacacagtcagtctggtgtgtgaaaaggaagttttgtcctccaatgtgtcttggcgctatgaagaacagcagttggaaatccagaacagcagcagattctcgatttacaccgcacttttcaacaacatgacttcggtgtccaagctcaccatccacaacatcactccaggtgatgcaggtgaatatgtttgcaaactgatattagacatttttgaatatgagtgcaagaagaaaatagatgttatgcccatccaaattttggcaaatgaagaaatgaaggtgatgtgcgacaacaatcctgtatctttgaactgctgcagtcagggtaatgttaattggagcaaagtagaatggaagcaggaaggaaaaataaatattccaggaacccctgagacagacatagattctagctgcagcagatacaccctcaaggctgatggaacccagtgcccaagcgggtcgtctggaacaacagtcatctacacttgtgagttcatcagtgcctatggagccagaggcagtgcaaacataaaagtgacattcatctctgtggccaatctaacaataaccccggacccaatttctgtttctgagggacaaaacttttctataaaatgcatcagtgatgtgagtaactatgatgaggtttattggaacacttctgctggaattaaaatataccaaagattttataccacgaggaggtatcttgatggagcagaatcagtactgacagtcaagacctcgaccagggagtggaatggaacctatcactgcatatttagatataagaattcatacagtattgcaaccaaagacgtcattgttcacccgctgcctctaaagctgaacatcatggttgatcctttggaagctactgtttcatgcagtggttcccatcacatcaagtgctgcatagaggaggatggagactacaaagttactttccatacgggttcctcatcccttcctgctgcaaaagaagttaacaaaaaacaagtgtgctacaaacacaatttcaatgcaagctcagtttcctggtgttcaaaaactgttgatgtgtgttgtcactttaccaatgctgctaataattcagtctggagcccatctatgaagctgaatctggttcctggggaaaacatcacatgccaggatcccgtaataggtgtcggagagccggggaaagtcatccagaagctatgccggttctcaaacgttcccagcagccctgagagtcccattggcgggaccatcacttacaaatgtgtaggctcccagtgggaggagaagagaaatgactgcatctctgccccaataaacagtctgctccagatggctaaggctttgatcaagagcccctctcaggatgagatgctccctacatacctgaaggatctttctattagcatagacaaagcggaacatgaaatcagctcttctcctgggagtctgggagccattattaacatccttgatctgctctcaacagttccaacccaagtaaattcagaaatgatgacgcacgtgctctctacggttaatgtcatccttggcaagcccgtcttgaacacctggaaggttttacaacagcaatggaccaatcagagttcacagctactacattcagtggaaagattttcccaagcattacagtcgggagatagccctcctttgtccttctcccaaactaatgtgcagatgagcagcatggtaatcaagtccagccacccagaaacctatcaacagaggtttgttttcccatactttgacctctggggcaatgtggtcattgacaagagctatctagaaaacttgcagtcggattcgtctattgtcaccatggctttcccaactctccaagccatccttgcccaggatatccaggaaaataactttgcagagagcttagtgatgacaaccactgtcagccacaatacaactatgccattcaggatttcaatgacttttaagaacaatagcccttcaggcggcgaaacgaagtgtgtcttctggaacttcaggcttgccaacaacacaggggggtgggacagcagtgggtgctatgtagaagaaggtgatggggacaatgtcacctgtatctgtgaccacctaacatcattctccatcctcatgtcccctgactccccagatcctagttctctcctgggaatactcctggatattatttcttatgttggggtgggcttttccatcttgagcttggcagcctgtctagttgtggaagctgtggtgtggaaatcggtgaccaagaaccggacttcttatatgcgccacacctgcatagtgaatatcgctgcctcccttctggtcgccaacacctggttcattgtggtcgctgccatccaggacaatcgctacatactctgcaagacagcctgtgtggctgccaccttcttcatccacttcttctacctcagcgtcttcttctggatgctgacactgggcctcatgctgttctatcgcctggttttcattctgcatgaaacaagcaggtccactcagaaagccattgccttctgtcttggctatggctgcccacttgccatctcggtcatcacgctgggagccacccagccccgggaagtctatacgaggaagaatgtctgttggctcaactgggaggacaccaaggccctgctggctttcgccatcccagcactgatcattgtggtggtgaacataaccatcactattgtggtcatcaccaagatcctgaggccttccattggagacaagccatgcaagcaggagaagagcagcctgtttcagatcagcaagagcattggggtcctcacaccactcttgggcctcacttggggttttggtctcaccactgtgttcccagggaccaaccttgtgttccatatcatatttgccatcctcaatgtcttccagggattattcattttactctttggatgcctctgggatctgaaggtacaggaagctttgctgaataagttttcattgtcgagatggtcttcacagcactcaaagtcaacatccctgggttcatccacacctgtgttttctatgagttctccaatatcaaggagatttaacaatttgtttggtaaaacaggaacgtataatgtttccaccccagaagcaaccagctcatccctggaaaactcatccagtgcttcttcgttgctcaactaagaacaggataatccaacctacgtgacctcccg

SEQ ID NO: 1480 - protein, 1346 aa, Homo sapiens
MKSPRRTTLCLMFIVIYSSKAALNWNYESTIHPLSLHEHEPAGEEALRQKRAVATKSPTAEEYTVNIEISFENASFLDPIKAYLNSLSFPIHGNNTDQITDILSINVTTVCRPAGNEIWCSCETGYGWPRERCLHNLICQERDVFLPGHHCSCLKELPPNGPFCLLQEDVTLNMRVRLNVGFQEDLMNTSSALYRSYKTDLETAFRKGYGILPGFKGVTVTGFKSGSVVVTYEVKTTPPSLELIHKANEQVVQSLNQTYKMDYNSFQAVTINESNFFVTPEIIFEGDTVSLVCEKEVLSSNVSWRYEEQQLEIQNSSRFSIYTALFNNMTSVSKLTIHNITPGDAGEYVCKLILDIFEYECKKKIDVMPIQILANEEMKVMCDNNPVSLNCCSQGNVNWSKVEWKQEGKINIPGTPETDIDSSCSRYTLKADGTQCPSGSSGTTVIYTCEFISAYGARGSANIKVTFISVANLTITPDPISVSEGQNFSIKCISDVSNYDEVYWNTSAGIKIYQRFYTTRRYLDGAESVLTVKTSTREWNGTYHCIFRYKNSYSIATKDVIVHPLPLKLNIMVDPLEATVSCSGSHHIKCCIEEDGDYKVTFHTGSSSLPAAKEVNKKQVCYKHNFNASSVSWCSKTVDVCCHFTNAANNSVWSPSMKLNLVPGENITCQDPVIGVGEPGKVIQKLCRFSNVPSSPESPIGGTITYKCVGSQWEEKRNDCISAPINSLLQMAKALIKSPSQDEMLPTYLKDLSISIDKAEHEISSSPGSLGAIINILDLLSTVPTQVNSEMMTHVLSTVNVILGKPVLNTWKVLQQQWTNQSSQLLHSVERFSQALQSGDSPPLSFSQTNVQMSSMVIKSSHPETYQQRFVFPYFDLWGNVVIDKSYLENLQSDSSIVTMAFPTLQAILAQDIQENNFAESLVMTTTVSHNTTMPFRISMTFKNNSPSGGETKCVFWNFRLANNTGGWDSSGCYVEEGDGDNVTCICDHLTSFSILMSPDSPDPSSLLGILLDIISYVGVGFSILSLAACLVVEAVVWKSVTKNRTSYMRHTCIVNIAASLLVANTWFIVVAAIQDNRYILCKTACVAATFFIHFFYLSVFFWMLTLGLMLFYRLVFILHETSRSTQKAIAFCLGYGCPLAISVITLGATQPREVYTRKNVCWLNWEDTKALLAFAIPALIIVVVNITITIVVITKILRPSIGDKPCKQEKSSLFQISKSIGVLTPLLGLTWGFGLTTVFPGTNLVFHIIFAILNVFQGLFILLFGCLWDLKVQEALLNKFSLSRWSSQHSKSTSLGSSTPVFSMSSPISRRFNNLFGKTGTYNVSTPEATSSSLENSSSASSLLN

SEQ ID NO: 1481 - DNA, 3294 bp, Homo sapiens
gtgactaagtatcctgataacttaagtgactctctcttttccggtgatgaagaaaatgctgggactgaggaaataaagaatgaaataaatggaaattggatttcagcatcctccattaacgaagctagaattaatgccaaggcaaaaaggcgactaaggaaaaactcatcccgggactctggcagaggcgattcggtcagcgacagtgggagtgacgcccttagaagtggattaactgtgccaaccagtccaaagggaaggttgctggataggcgatccagatctgggaaaggaaggggactaccaaagaaaggtggtgcaggaggcaaaggtgtctggggtacacctggacaggtgtatgatgtggaggaggtggatgtgaaagatcctaactatgatgatgaccaggagaactgtgtttatgaaactgtagttttgcctttggatgaaagggcatttgagaagactttaacaccaatcatacaggaatattttgagcatggagatactaatgaagttgcggaaatgttaagagatttaaatcttggtgaaatgaaaagtggagtaccagtgttggcagtatccttagcattggaggggaaggctagtcatagagagatgacatctaagcttctttctgacctttgtgggacagtaatgagcacaactgatgtggaaaaatcatttgataaattgttgaaagatctacctgaattagcactggatactcctagagcaccacagttggtgggccagtttattgctagagctgttggagatggaattttatgtaatacctatattgatagttacaaaggaactgtagattgtgtgcaggctagagctgctctggataaggctaccgtgcttctgagtatgtctaaaggtggaaagcgtaaagatagtgtgtggggctctggaggtgggcagcaatctgtcaatcaccttgttaaagagattgatatgctgctgaaagaatatttactctctggagacatatctgaagctgaacattgccttaaggaactggaagtacctcattttcaccatgagcttgtatatgaagctattataatggttttagagtcaactggagaaagtacatttaagatgattttggatttattaaagtccctttggaagtcttctaccattactgtagaccaaatgaaaagaggttatgagagaatttacaatgaaattccggacattaatctggatgtcccacattcatactctgtgctggagcggtttgtagaagaatgttttcaggctggaataatttccaaacaactcagagatctttgtccttcaaggggcagaaagcgttttgtaagcgaaggagatggaggtcgtcttaaaccagagagctactgaatataagaactcttgcagtcttagatgttataaaaatatatatctgaattgtaagagttgttagcacaagttttttttttttttttttttaagcacttgttttgggtacaaggcatttctgacattttataaacctacatttaaggggaatttttaaaggaaatgttttttcttttttttttgtttttcgagggggcaaggagggacagaaaagtaacctcttcttaagtggaatattctaataagctaccttttgtaagtgccatgtttattatctaatcattccaagttttgcattgatgtctgactgccactcctttctttcaaggacagtgttttttgtagtaaaatcactggtttatacaaagctttatttagggggtaaagttaagctgctaaaaccccatgttggctgctgctgttgagatactgtgctttgggagtaaaaaaagaaagttatttctttgtcttaaagaatttttaaaaaattagtcatgagacttattcatctttccagggaacatactgattggtcttaaaagactagacagttaagtaaaaggtggctggaacatctatttttctacaaaactggaaaaatgaacctggttctagaagaatgtacaccaaaataaaacatgtgaagcagtattgattctttattgggagtacatttttttaggtctcttaaactttaatttcacacagtaaattttgaatctcataaggaagcatatttgaacctagtcaatttaatcttagtgttcccttgaaaactttttttccctacaaaattttaagtgaaaaatacaatagtaaattaagattacactggggaaaaaaatgcaggtatcactttactccattgttatctgacctagagcttaattaagttttagaaatatgtaataccttccatcattccatcatccttaaattctgttaccaaataatggctaatgttacaaaaagttatactccagagacccaaagcttgacatttacctaatgtatgagaaaatattaccaattaacaataaagaatgatcatatttttaacctcttttacatagcctaataactcagcaaggcctcaacgtctgtgctaatttaaactgccaaatattgactgcagcaaacaagaattatattcagaatttatgagggtactgttaggagtatactgcttacaggtttagatatagtctgttagaattaaaaccaagtttagtgttcatatttacctcatgggctttatcaagcccatattacctcagcttatatatagttaccatttttaggtttttaattgtttgacacttggatgataaatgcagtcattttattctcaagtgcttaaaattaatgtaattaaaagcttagctgactacagaataggtgagggtttcttaaaaatgagatttaagggctgggcacggtggctcatgcctgtaatcccagcactttgggaggccgaggtgggcggatcacttgaggttgggagttcatgaccagcttgaccaacatgaagaaaccctgtctctattaaaaatacaaaagtagccaggcatggtggcgcatgcgtgtaatcccagctacttgggaggctgaggcaggagaattgcttgaacctgggaggcagaggttgcagtgagtcgagatggtgccattgctctcgtttgggcaacaagagtgaaactcttgtctcaaaaaaaaaaaaaaatgaggtttaagacagttttgtcattactggtgggatctggtcacacaagatagcattaaacgtgacatggcacataaaattggttaaaaaattttgttttttaattacgtaatgtaaaagcccaacaaacactttatgcaagattggaatgtatcttcaaattcagatttaataaacatgtaaagatcctctgt

SEQ ID NO: 1482 - protein, 458 aa, Homo sapiens
VTKYPDNLSDSLFSGDEENAGTEEIKNEINGNWISASSINEARINAKAKRRLRKNSSRDSGRGDSVSDSGSDALRSGLTVPTSPKGRLLDRRSRSGKGRGLPKKGGAGGKGVWGTPGQVYDVEEVDVKDPNYDDDQENCVYETVVLPLDERAFEKTLTPIIQEYFEHGDTNEVAEMLRDLNLGEMKSGVPVLAVSLALEGKASHREMTSKLLSDLCGTVMSTTDVEKSFDKLLKDLPELALDTPRAPQLVGQFIARAVGDGILCNTYIDSYKGTVDCVQARAALDKATVLLSMSKGGKRKDSVWGSGGGQQSVNHLVKEIDMLLKEYLLSGDISEAEHCLKELEVPHFHHELVYEAIIMVLESTGESTFKMILDLLKSLWKSSTITVDQMKRGYERIYNEIPDINLDVPHSYSVLERFVEECFQAGIISKQLRDLCPSRGRKRFVSEGDGGRLKPESY

SEQ ID NO: 1483 - DNA, 3570 bp, Homo sapiens
cgaccacccggcctcggccaataagcgccgccctctcgcccccgtgttactgggtagaagaaaacaaaaacaaacagagcgagaagggccagagactctccgaggcggcggcagagacagaagagcggggtcggggccggctgaccaggaacctgggcgagcagcggcgggggcccgagggattctgaaggaagatttccattaggtaatttgtttaatcagtgcaagcgaaattaagggaaaatggatgtagaaaatgagcagatactgaatgtaaaccctgcagatcctgataacttaagtgactctctcttttccggtgatgaagaaaatgctgggactgaggaaataaagaatgaaataaatggaaattggatttcagcatcctccattaacgaagctagaattaatgccaaggcaaaaaggcgactaaggaaaaactcatcccgggactctggcagaggcgattcggtcagcgacagtgggagtgacgcccttagaagtggattaactgtgccaaccagtccaaagggaaggttgctggataggcgatccagatctgggaaaggaaggggactaccaaagaaaggtggtgcaggaggcaaaggtgtctggggtacacctggacaggtgtatgatgtggaggaggtggatgtgaaagatcctaactatgatgatgaccaggagaactgtgtttatgaaactgtagttttgcctttggatgaaagggcatttgagaagactttaacaccaatcatacaggaatattttgagcatggagatactaatgaagttgcggaaatgttaagagatttaaatcttggtgaaatgaaaagtggagtaccagtgttggcagtatccttagcattggaggggaaggctagtcatagagagatgacatctaagcttctttctgacctttgtgggacagtaatgagcacaactgatgtggaaaaatcatttgataaattgttgaaagatctacctgaattagcactggatactcctagagcaccacagttggtgggccagtttattgctagagctgttggagatggaattttatgtaatacctatattgatagttacaaaggaactgtagattgtgtgcaggctagagctgctctggataaggctaccgtgcttctgagtatgtctaaaggtggaaagcgtaaagatagtgtgtggggctctggaggtgggcagcaatctgtcaatcaccttgttaaagagattgatatgctgctgaaagaatatttactctctggagacatatctgaagctgaacattgccttaaggaactggaagtacctcattttcaccatgagcttgtatatgaagctattataatggttttagagtcaactggagaaagtacatttaagatgattttggatttattaaagtccctttggaagtcttctaccattactgtagaccaaatgaaaagaggttatgagagaatttacaatgaaattccggacattaatctggatgtcccacattcatactctgtgctggagcggtttgtagaagaatgttttcaggctggaataatttccaaacaactcagagatctttgtccttcaaggggcagaaagcgttttgtaagcgaaggagatggaggtcgtcttaaaccagagagctactgaatataagaactcttgcagtcttagatgttataaaaatatatatctgaattgtaagagttgttagcacaagttttttttttttttttttttaagcacttgttttgggtacaaggcatttctgacattttataaacctacatttaaggggaatttttaaaggaaatgttttttcttttttttttgtttttcgagggggcaaggagggacagaaaagtaacctcttcttaagtggaatattctaataagctaccttttgtaagtgccatgtttattatctaatcattccaagttttgcattgatgtctgactgccactcctttctttcaaggacagtgttttttgtagtaaaatcactggtttatacaaagctttatttagggggtaaagttaagctgctaaaaccccatgttggctgctgctgttgagatactgtgctttgggagtaaaaaaagaaagttatttctttgtcttaaagaatttttaaaaaattagtcatgagacttattcatctttccagggaacatactgattggtcttaaaagactagacagttaagtaaaaggtggctggaacatctatttttctacaaaactggaaaaatgaacctggttctagaagaatgtacaccaaaataaaacatgtgaagcagtattgattctttattgggagtacatttttttaggtctcttaaactttaatttcacacagtaaattttgaatctcataaggaagcatatttgaacctagtcaatttaatcttagtgttcccttgaaaactttttttccctacaaaattttaagtgaaaaatacaatagtaaattaagattacactggggaaaaaaatgcaggtatcactttactccattgttatctgacctagagcttaattaagttttagaaatatgtaataccttccatcattccatcatccttaaattctgttaccaaataatggctaatgttacaaaaagttatactccagagacccaaagcttgacatttacctaatgtatgagaaaatattaccaattaacaataaagaatgatcatatttttaacctcttttacatagcctaataactcagcaaggcctcaacgtctgtgctaatttaaactgccaaatattgactgcagcaaacaagaattatattcagaatttatgagggtactgttaggagtatactgcttacaggtttagatatagtctgttagaattaaaaccaagtttagtgttcatatttacctcatgggctttatcaagcccatattacctcagcttatatatagttaccatttttaggtttttaattgtttgacacttggatgataaatgcagtcattttattctcaagtgcttaaaattaatgtaattaaaagcttagctgactacagaataggtgagggtttcttaaaaatgagatttaagggctgggcacggtggctcatgcctgtaatcccagcactttgggaggccgaggtgggcggatcacttgaggttgggagttcatgaccagcttgaccaacatgaagaaaccctgtctctattaaaaatacaaaagtagccaggcatggtggcgcatgcgtgtaatcccagctacttgggaggctgaggcaggagaattgcttgaacctgggaggcagaggttgcagtgagtcgagatggtgccattgctctcgtttgggcaacaagagtgaaactcttgtctcaaaaaaaaaaaaaaatgaggtttaagacagttttgtcattactggtgggatctggtcacacaagatagcattaaacgtgacatggcacataaaattggttaaaaaattttgttttttaattacgtaatgtaaaagcccaacaaacactttatgcaagattggaatgtatcttcaaattcagatttaataaacatgtaaagatcctctgt

SEQ ID NO: 1484 - protein, 469 aa, Homo sapiens
MDVENEQILNVNPADPDNLSDSLFSGDEENAGTEEIKNEINGNWISASSINEARINAKAKRRLRKNSSRDSGRGDSVSDSGSDALRSGLTVPTSPKGRLLDRRSRSGKGRGLPKKGGAGGKGVWGTPGQVYDVEEVDVKDPNYDDDQENCVYETVVLPLDERAFEKTLTPIIQEYFEHGDTNEVAEMLRDLNLGEMKSGVPVLAVSLALEGKASHREMTSKLLSDLCGTVMSTTDVEKSFDKLLKDLPELALDTPRAPQLVGQFIARAVGDGILCNTYIDSYKGTVDCVQARAALDKATVLLSMSKGGKRKDSVWGSGGGQQSVNHLVKEIDMLLKEYLLSGDISEAEHCLKELEVPHFHHELVYEAIIMVLESTGESTFKMILDLLKSLWKSSTITVDQMKRGYERIYNEIPDINLDVPHSYSVLERFVEECFQAGIISKQLRDLCPSRGRKRFVSEGDGGRLKPESY

SEQ ID NO: 1485 - DNA, 4236 bp, Homo sapiens
atgcctccgcgcgcgccgcctgcgcccgggccccggccgccgccccgggccgccgccgccaccgacaccgccgcgggcgcggggggcgcggggggcgcggggggcgccggcgggcccgggttccggccgctcgcgccgcgtccctggcgctggctgctgctgctggcgctgcctgccgcctgctcccccccgccgcgccccgtctacaccaaccactgggcggtgcaagtgctgggcggcccggccgaggcggaccgcgtggcggcggcgcacgggtacctcaacttgggccagattggaaacctggaagattactaccatttttatcacagcaaaacctttaaaagatcaaccttgagtagcagaggccctcacaccttcctcagaatggacccccaggtgaaatggctccagcaacaggaagtgaaacgaagggtgaagagacaggtgcgaagtgacccgcaggccctttacttcaacgaccccatttggtccaacatgtggtacctgcattgtggcgacaagaacagtcgctgccggtcggaaatgaatgtccaggcagcgtggaagaggggctacacaggaaaaaacgtggtggtcaccatccttgatgatggcatagagagaaatcaccctgacctggccccaaattatgattcctacgccagctacgacgtgaacggcaatgattatgacccatctccacgatatgatgccagcaatgaaaataaacacggcactcgttgtgcgggagaagttgctgcttcagcaaacaattcctactgcatcgtgggcatagcgtacaatgccaaaataggaggcatccgcatgctggacggcgatgtcacagatgtggtcgaggcaaagtcgctgggcatcagacccaactacatcgacatttacagtgccagctgggggccggacgacgacggcaagacggtggacgggcccggccgactggctaagcaggctttcgagtatggcattaaaaagggccggcagggcctgggctccattttcgtctgggcatctgggaatggcgggagagagggggactactgctcgtgcgatggctacaccaacagcatctacaccatctccgtcagcagcgccaccgagaatggctacaagccctggtacctggaagagtgtgcctccaccctggccaccacctacagcagtggggccttttatgagcgaaaaatcgtcaccacggatctgcgtcagcgctgtaccgatggccacactgggacctcagtctctgcccccatggtggcgggcatcatcgccttggctctagaagcaaacagccagttaacctggagggacgtccagcacctgctagtgaagacatcccggccggcccacctgaaagcgagcgactggaaagtgaacggcgcgggtcataaagttagccatttctatggatttggtttggtggacgcagaagctctcgttgtggaggcaaagaagtggacagcagtgccatcgcagcacatgtgtgtggccgcctcggacaagagacccaggagcatccccttagtgcaggtgctgcggactacggccctgaccagcgcctgcgcggagcactcggaccagcgggtggtctacttggagcacgtggtggttcgcacctccatctcacacccacgccgaggagacctccagatctacctggtttctccctcgggaaccaagtctcaacttctggcaaagaggttgctggatctttccaatgaagggtttacaaactgggaattcatgactgtccactgctggggagaaaaggctgaagggcagtggaccttggaaatccaagatctgccatcccaggtccgcaacccggagaagcaagggaagttgaaagaatggagcctcatactgtatggcacagcagagcacccgtaccacaccttcagtgcccatcagtcccgctcgcggatgctggagctctcagccccagagctggagccacccaaggctgccctgtcaccctcccaggtggaagttcctgaagatgaggaagattacacagctcaatccaccccaggctctgctaatattttacagaccagtgtgtgccatccggagtgtggtgacaaaggctgtgatggccccaatgcagaccagtgcttgaactgcgtccacttcagcctggggagtgtcaagaccagcaggaagtgcgtgagtgtgtgccccttgggctactttggggacacagcagcaagacgctgtcgccggtgccacaaggggtgtgagacctgctccagcagagctgcgacgcagtgcctgtcttgccgccgcgggttctatcaccaccaggagatgaacacctgtgtgaccctctgtcctgcaggattttatgctgatgaaagtcagaaaaattgccttaaatgccacccaagctgtaaaaagtgcgtggatgaacctgagaaatgtactgtctgtaaagaaggattcagccttgcacggggcagctgcattcctgactgtgagccaggcacctactttgactcagagctgatcagatgtggggaatgccatcacacctgcggaacctgcgtggggccaggcagagaagagtgcattcactgtgcgaaaaacttccacttccacgactggaagtgtgtgccagcctgtggtgagggcttctacccagaagagatgccgggcttgccccacaaagtgtgtcgaaggtgtgacgagaactgcttgagctgtgcaggctccagcaggaactgtagcaggtgtaagacgggcttcacacagctggggacctcctgcatcaccaaccacacgtgcagcaacgctgacgagacattctgcgagatggtgaagtccaaccggctgtgcgaacggaagctcttcattcagttctgctgccgcacgtgcctcctggccgggtaagggtgcctagctgcccacagagggcaggcactcccatccatccatccgtccaccttcctccagactgtcggccagagtctgtttcaggagcggcgccctgcacctgacagctttatctccccaggagcagcatctctgagcacccaagccaggtgggtggtggctcttaaggaggtgttcctaaaatggtgatatcctctcaaatgctgcttgttggctccagtcttccgacaaactaacaggaacaaaatgaattctgggaatccacagctctggctttggagcagcttctgggaccataagtttactgaatcttcaagaccaaagcagaaaagaaaggcgcttggcatcacacatcactcttctccccgtgcttttctgcggctgtgtagtaaatctccccggcccagctggcgaaccctgggccatcctcacatgtgacaaagggccagcagtctacctgctcgttgcctgccactgagcagtctggggacggtttggtcagactataaataagataggtttgagggcataaaatgtatgaccactggggccggagtatctatttctacatagtcagctacttctgaaactgcagcagtggcttagaaagtccaattccaaagccagaccagaagattctatcccccgcagcgctctcctttgagcaagccgagctctccttgttaccgtgttctgtctgtgtcttcaggagtctcatggcctgaacgaccacctcgacctgatgcagagccttctgaggagaggcaacaggaggcattctgtggccagccaaaaggtaccccgatggccaagcaattcctctgaacaaaatgtaaagccagccatgcattgttaatcatccatcacttcccattttatggaattgcttttaaaatacatttggcctctgcccttcagaagactcgtttttaaggtggaaactcctgtgtctgtgtatattacaagcctacatgacacagttggatttattctgccaaacctgtgtaggcattttataagctacatgttctaatttttaccgatgttaattattttgacaaatatttcatatattttcattgaaatgcacagatctgcttgatcaattcccttgaatagggaagtaacatttgccttaaattttttcgacctcgtctttctccatattgtcctgctcccctgtttgacgacagtgcatttgccttgtcacctgtgagctggagagaacccagatgttgtttattgaatctacaactctgaaagagaaatcaatgaagcaagtacaatgttaaccctaaattaataaaagagttaacatcccatggc

SEQ ID NO: 1486 - protein, 968 aa, Homo sapiens
MPPRAPPAPGPRPPPRAAAATDTAAGAGGAGGAGGAGGPGFRPLAPRPWRWLLLLALPAACSPPPRPVYTNHWAVQVLGGPAEADRVAAAHGYLNLGQIGNLEDYYHFYHSKTFKRSTLSSRGPHTFLRMDPQVKWLQQQEVKRRVKRQVRSDPQALYFNDPIWSNMWYLHCGDKNSRCRSEMNVQAAWKRGYTGKNVVVTILDDGIERNHPDLAPNYDSYASYDVNGNDYDPSPRYDASNENKHGTRCAGEVAASANNSYCIVGIAYNAKIGGIRMLDGDVTDVVEAKSLGIRPNYIDIYSASWGPDDDGKTVDGPGRLAKQAFEYGIKKGRQGLGSIFVWASGNGGREGDYCSCDGYTNSIYTISVSSATENGYKPWYLEECASTLATTYSSGAFYERKIVTTDLRQRCTDGHTGTSVSAPMVAGIIALALEANSQLTWRDVQHLLVKTSRPAHLKASDWKVNGAGHKVSHFYGFGLVDAEALVVEAKKWTAVPSQHMCVAASDKRPRSIPLVQVLRTTALTSACAEHSDQRVVYLEHVVVRTSISHPRRGDLQIYLVSPSGTKSQLLAKRLLDLSNEGFTNWEFMTVHCWGEKAEGQWTLEIQDLPSQVRNPEKQGKLKEWSLILYGTAEHPYHTFSAHQSRSRMLELSAPELEPPKAALSPSQVEVPEDEEDYTAQSTPGSANILQTSVCHPECGDKGCDGPNADQCLNCVHFSLGSVKTSRKCVSVCPLGYFGDTAARRCRRCHKGCETCSSRAATQCLSCRRGFYHHQEMNTCVTLCPAGFYADESQKNCLKCHPSCKKCVDEPEKCTVCKEGFSLARGSCIPDCEPGTYFDSELIRCGECHHTCGTCVGPGREECIHCAKNFHFHDWKCVPACGEGFYPEEMPGLPHKVCRRCDENCLSCAGSSRNCSRCKTGFTQLGTSCITNHTCSNADETFCEMVKSNRLCERKLFIQFCCRTCLLAG

SEQ ID NO: 1487 - DNA, 4195 bp, Homo sapiens
atgcctccgcgcgcgccgcctgcgcccgggccccggccgccgccccgggccgccgccgccaccgacaccgccgcgggcgcggggggcgcggggggcgcggggggcgccggcgggcccgggttccggccgctcgcgccgcgtccctggcgctggctgctgctgctggcgctgcctgccgcctgctcccccccgccgcgccccgtctacaccaaccactgggcggtgcaagtgctgggcggcccggccgaggcggaccgcgtggcggcggcgcacgggtacctcaacttgggccagattggaaacctggaagattactaccatttttatcacagcaaaacctttaaaagatcaaccttgagtagcagaggccctcacaccttcctcagaatggacccccaggtgaaatggctccagcaacaggaagtgaaacgaagggtgaagagacaggtgcgaagtgacccgcaggccctttacttcaacgaccccatttggtccaacatgtggtacctgcattgtggcgacaagaacagtcgctgccggtcggaaatgaatgtccaggcagcgtggaagaggggctacacaggaaaaaacgtggtggtcaccatccttgatgatggcatagagagaaatcaccctgacctggccccaaattatgattcctacgccagctacgacgtgaacggcaatgattatgacccatctccacgatatgatgccagcaatgaaaataaacacggcactcgttgtgcgggagaagttgctgcttcagcaaacaattcctactgcatcgtgggcatagcgtacaatgccaaaataggaggcatccgcatgctggacggcgatgtcacagatgtggtcgaggcaaagtcgctgggcatcagacccaactacatcgacatttacagtgccagctgggggccggacgacgacggcaagacggtggacgggcccggccgactggctaagcaggctttcgagtatggcattaaaaagggccggcagggcctgggctccattttcgtctgggcatctgggaatggcgggagagagggggactactgctcgtgcgatggctacaccaacagcatctacaccatctccgtcagcagcgccaccgagaatggctacaagccctggtacctggaagagtgtgcctccaccctggccaccacctacagcagtggggccttttatgagcgaaaaatcgtcaccacggatctgcgtcagcgctgtaccgatggccacactgggacctcagtctctgcccccatggtggcgggcatcatcgccttggctctagaagcaaacagccagttaacctggagggacgtccagcacctgctagtgaagacatcccggccggcccacctgaaagcgagcgactggaaagtgaacggcgcgggtcataaagttagccatttctatggatttggtttggtggacgcagaagctctcgttgtggaggcaaagaagtggacagcagtgccatcgcagcacatgtgtgtggccgcctcggacaagagacccaggagcatccccttagtgcaggtgctgcggactacggccctgaccagcgcctgcgcggagcactcggaccagcgggtggtctacttggagcacgtggtggttcgcacctccatctcacacccacgccgaggagacctccagatctacctggtttctccctcgggaaccaagtctcaacttctggcaaagaggttgctggatctttccaatgaagggtttacaaactgggaattcatgactgtccactgctggggagaaaaggctgaagggcagtggaccttggaaatccaagatctgccatcccaggtccgcaacccggagaagcaagggaagttgaaagaatggagcctcatactgtatggcacagcagagcacccgtaccacaccttcagtgcccatcagtcccgctcgcggatgctggagctctcagccccagagctggagccacccaaggctgccctgtcaccctcccaggtggaagttcctgaagatgaggaagattacacaggtgtgtgccatccggagtgtggtgacaaaggctgtgatggccccaatgcagaccagtgcttgaactgcgtccacttcagcctggggagtgtcaagaccagcaggaagtgcgtgagtgtgtgccccttgggctactttggggacacagcagcaagacgctgtcgccggtgccacaaggggtgtgagacctgctccagcagagctgcgacgcagtgcctgtcttgccgccgcgggttctatcaccaccaggagatgaacacctgtgtgaccctctgtcctgcaggattttatgctgatgaaagtcagaaaaattgccttaaatgccacccaagctgtaaaaagtgcgtggatgaacctgagaaatgtactgtctgtaaagaaggattcagccttgcacggggcagctgcattcctgactgtgagccaggcacctactttgactcagagctgatcagatgtggggaatgccatcacacctgcggaacctgcgtggggccaggcagagaagagtgcattcactgtgcgaaaaacttccacttccacgactggaagtgtgtgccagcctgtggtgagggcttctacccagaagagatgccgggcttgccccacaaagtgtgtcgaaggtgtgacgagaactgcttgagctgtgcaggctccagcaggaactgtagcaggtgtaagacgggcttcacacagctggggacctcctgcatcaccaaccacacgtgcagcaacgctgacgagacattctgcgagatggtgaagtccaaccggctgtgcgaacggaagctcttcattcagttctgctgccgcacgtgcctcctggccgggtaagggtgcctagctgcccacagagggcaggcactcccatccatccatccgtccaccttcctccagactgtcggccagagtctgtttcaggagcggcgccctgcacctgacagctttatctccccaggagcagcatctctgagcacccaagccaggtgggtggtggctcttaaggaggtgttcctaaaatggtgatatcctctcaaatgctgcttgttggctccagtcttccgacaaactaacaggaacaaaatgaattctgggaatccacagctctggctttggagcagcttctgggaccataagtttactgaatcttcaagaccaaagcagaaaagaaaggcgcttggcatcacacatcactcttctccccgtgcttttctgcggctgtgtagtaaatctccccggcccagctggcgaaccctgggccatcctcacatgtgacaaagggccagcagtctacctgctcgttgcctgccactgagcagtctggggacggtttggtcagactataaataagataggtttgagggcataaaatgtatgaccactggggccggagtatctatttctacatagtcagctacttctgaaactgcagcagtggcttagaaagtccaattccaaagccagaccagaagattctatcccccgcagcgctctcctttgagcaagccgagctctccttgttaccgtgttctgtctgtgtcttcaggagtctcatggcctgaacgaccacctcgacctgatgcagagccttctgaggagaggcaacaggaggcattctgtggccagccaaaaggtaccccgatggccaagcaattcctctgaacaaaatgtaaagccagccatgcattgttaatcatccatcacttcccattttatggaattgcttttaaaatacatttggcctctgcccttcagaagactcgtttttaaggtggaaactcctgtgtctgtgtatattacaagcctacatgacacagttggatttattctgccaaacctgtgtaggcattttataagctacatgttctaatttttaccgatgttaattattttgacaaatatttcatatattttcattgaaatgcacagatctgcttgatcaattcccttgaatagggaagtaacatttgccttaaattttttcgacctcgtctttctccatattgtcctgctcccctgtttgacgacagtgcatttgccttgtcacctgtgagctggagagaacccagatgttgtttattgaatctacaactctgaaagagaaatcaatgaagcaagtacaatgttaaccctaaattaataaaagagttaacatcccatg

SEQ ID NO: 1488 - protein, 955 aa, Homo sapiens
MPPRAPPAPGPRPPPRAAAATDTAAGAGGAGGAGGAGGPGFRPLAPRPWRWLLLLALPAACSPPPRPVYTNHWAVQVLGGPAEADRVAAAHGYLNLGQIGNLEDYYHFYHSKTFKRSTLSSRGPHTFLRMDPQVKWLQQQEVKRRVKRQVRSDPQALYFNDPIWSNMWYLHCGDKNSRCRSEMNVQAAWKRGYTGKNVVVTILDDGIERNHPDLAPNYDSYASYDVNGNDYDPSPRYDASNENKHGTRCAGEVAASANNSYCIVGIAYNAKIGGIRMLDGDVTDVVEAKSLGIRPNYIDIYSASWGPDDDGKTVDGPGRLAKQAFEYGIKKGRQGLGSIFVWASGNGGREGDYCSCDGYTNSIYTISVSSATENGYKPWYLEECASTLATTYSSGAFYERKIVTTDLRQRCTDGHTGTSVSAPMVAGIIALALEANSQLTWRDVQHLLVKTSRPAHLKASDWKVNGAGHKVSHFYGFGLVDAEALVVEAKKWTAVPSQHMCVAASDKRPRSIPLVQVLRTTALTSACAEHSDQRVVYLEHVVVRTSISHPRRGDLQIYLVSPSGTKSQLLAKRLLDLSNEGFTNWEFMTVHCWGEKAEGQWTLEIQDLPSQVRNPEKQGKLKEWSLILYGTAEHPYHTFSAHQSRSRMLELSAPELEPPKAALSPSQVEVPEDEEDYTGVCHPECGDKGCDGPNADQCLNCVHFSLGSVKTSRKCVSVCPLGYFGDTAARRCRRCHKGCETCSSRAATQCLSCRRGFYHHQEMNTCVTLCPAGFYADESQKNCLKCHPSCKKCVDEPEKCTVCKEGFSLARGSCIPDCEPGTYFDSELIRCGECHHTCGTCVGPGREECIHCAKNFHFHDWKCVPACGEGFYPEEMPGLPHKVCRRCDENCLSCAGSSRNCSRCKTGFTQLGTSCITNHTCSNADETFCEMVKSNRLCERKLFIQFCCRTCLLAG

SEQ ID NO: 1489 - DNA, 2937 bp, Homo sapiens
atgcctccgcgcgcgccgcctgcgcccgggccccggccgccgccccgggccgccgccgccaccgacaccgccgcgggcgcggggggcgcggggggcgcggggggcgccggcgggcccgggttccggccgctcgcgccgcgtccctggcgctggctgctgctgctggcgctgcctgccgcctgctcccccccgccgcgccccgtctacaccaaccactgggcggtgcaagtgctgggcggcccggccgaggcggaccgcgtggcggcggcgcacgggtacctcaacttgggccagattggaaacctggaagattactaccatttttatcacagcaaaacctttaaaagatcaaccttgagtagcagaggccctcacaccttcctcagaatggacccccaggtgaaatggctccagcaacaggaagtgaaacgaagggtgaagagacaggtgcgaagtgacccgcaggccctttacttcaacgaccccatttggtccaacatgtggtacctgcattgtggcgacaagaacagtcgctgccggtcggaaatgaatgtccaggcagcgtggaagaggggctacacaggaaaaaacgtggtggtcaccatccttgatgatggcatagagagaaatcaccctgacctggccccaaattatgattcctacgccagctacgacgtgaacggcaatgattatgacccatctccacgatatgatgccagcaatgaaaataaacacggcactcgttgtgcgggagaagttgctgcttcagcaaacaattcctactgcatcgtgggcatagcgtacaatgccaaaataggaggcatccgcatgctggacggcgatgtcacagatgtggtcgaggcaaagtcgctgggcatcagacccaactacatcgacatttacagtgccagctgggggccggacgacgacggcaagacggtggacgggcccggccgactggctaagcaggctttcgagtatggcattaaaaagggccggcagggcctgggctccattttcgtctgggcatctgggaatggcgggagagagggggactactgctcgtgcgatggctacaccaacagcatctacaccatctccgtcagcagcgccaccgagaatggctacaagccctggtacctggaagagtgtgcctccaccctggccaccacctacagcagtggggccttttatgagcgaaaaatcgtcaccacggatctgcgtcagcgctgtaccgatggccacactgggacctcagtctctgcccccatggtggcgggcatcatcgccttggctctagaagcaaacagccagttaacctggagggacgtccagcacctgctagtgaagacatcccggccggcccacctgaaagcgagcgactggaaagtgaacggcgcgggtcataaagttagccatttctatggatttggtttggtggacgcagaagctctcgttgtggaggcaaagaagtggacagcagtgccatcgcagcacatgtgtgtggccgcctcggacaagagacccaggagcatccccttagtgcaggtgctgcggactacggccctgaccagcgcctgcgcggagcactcggaccagcgggtggtctacttggagcacgtggtggttcgcacctccatctcacacccacgccgaggagacctccagatctacctggtttctccctcgggaaccaagtctcaacttctggcaaagaggttgctggatctttccaatgaagggtttacaaactgggaattcatgactgtccactgctggggagaaaaggctgaagggcagtggaccttggaaatccaagatctgccatcccaggtccgcaacccggagaagcaaggtgatcttgagactcctgttgcaaatcaactgaccacagaagagagggaacctggactaaaacacgtgttccggtggcagattgaacaagagctttggtaatctctgtgaaatactgcagagggacagatgaccaaagccaccacatttagaactttggctgcctttggaagtccagagctggatctctcagctcccgcccccagaggctcagcactttggacatggctcacaaacagttgttgattgactgcatgaatgcgtgtgcgtgcaagcatgaaccttgtttaaatcaagagcttacataattttaaccagttctgtcttcagctgtacatactcagtaaaatgtttaatgaaggggaagagattagtctcttctgtgtgaccatgttttccctttattcatcctaaaaagttccatgaattcttgatttcctttcagtggccctttcaacaatgtcttttttcccaagagcataactgttctcattttattgctagccatcttgatctgtgttttattgacatctcttttgagctaatcttcatttctaagataagagttgagattttgcaatctgtgttcgatggctcaatctatcctgtgcttgatgctagaaaggaagacagatttaaagcacatgccttctgtgccggctttcaagtttgtcactaaactctcatttctggaaagtgcaattatagagtatcactcccacttccttggaaacagagctgaagaacttggcacactctccaaacagtcaccatacacactgttgtcaaaaagttccatttttaaccccatttgcattaatattgcagtcaatctctttacctccttttctctttcacggggccgtgacagtgacgcctttccccaaaactctcctcgtttgagaaaaaaagaagtatgtatccccacttatctcggggagaaatgcaaccaactgctgctgtgcacatttatgaatcacagtattgtttagtcggttctgtatctccagtagaaagcataacaaaaagatgacctttgtctcacctcatagctaatttttgcaaataaaatactaaacattg

SEQ ID NO: 1490 - protein, 651 aa, Homo sapiens
MPPRAPPAPGPRPPPRAAAATDTAAGAGGAGGAGGAGGPGFRPLAPRPWRWLLLLALPAACSPPPRPVYTNHWAVQVLGGPAEADRVAAAHGYLNLGQIGNLEDYYHFYHSKTFKRSTLSSRGPHTFLRMDPQVKWLQQQEVKRRVKRQVRSDPQALYFNDPIWSNMWYLHCGDKNSRCRSEMNVQAAWKRGYTGKNVVVTILDDGIERNHPDLAPNYDSYASYDVNGNDYDPSPRYDASNENKHGTRCAGEVAASANNSYCIVGIAYNAKIGGIRMLDGDVTDVVEAKSLGIRPNYIDIYSASWGPDDDGKTVDGPGRLAKQAFEYGIKKGRQGLGSIFVWASGNGGREGDYCSCDGYTNSIYTISVSSATENGYKPWYLEECASTLATTYSSGAFYERKIVTTDLRQRCTDGHTGTSVSAPMVAGIIALALEANSQLTWRDVQHLLVKTSRPAHLKASDWKVNGAGHKVSHFYGFGLVDAEALVVEAKKWTAVPSQHMCVAASDKRPRSIPLVQVLRTTALTSACAEHSDQRVVYLEHVVVRTSISHPRRGDLQIYLVSPSGTKSQLLAKRLLDLSNEGFTNWEFMTVHCWGEKAEGQWTLEIQDLPSQVRNPEKQGDLETPVANQLTTEEREPGLKHVFRWQIEQELW

SEQ ID NO: 1491 - DNA, 1494 bp, Homo sapiens
ctgtgggtccttcattgtggcgacaagaacagtcgctgccggtcggaaatgaatgtccaggcagcgtggaagaggggctacacaggaaaaaacgtggtggtcaccatccttgatgatggcatagagagaaatcaccctgacctggccccaaattatgattcctacgccagctacgacgtgaacggcaatgattatgacccatctccacgatatgatgccagcaatgaaaataaacacggcactcgttgtgcgggagaagttgctgcttcagcaaacaattcctactgcatcgtgggcatagcgtacaatgccaaaataggaggcatccgcatgctggacggcgatgtcacagatgtggtcgaggcaaagtcgctgggcatcagacccaactacatcgacatttacagtgccagctgggggccggacgacgacggcaagacggtggacgggcccggccgactggctaagcaggctttcgagtatggcattaaaaagggccggcagggcctgggctccattttcgtctgggcatctgggaatggcgggagagagggggactactgctcgtgcgatggctacaccaacagcatctacaccatctccgtcagcagcgccaccgagaatggctacaagccctggtacctggaagagtgtgcctccaccctggccaccacctacagcagtggggccttttatgagcgaaaaatcgtcaccacggatctgcgtcagcgctgtaccgatggccacactgggacctcagtctctgcccccatggtggcgggcatcatcgccttggctctagaagcaaacagccagttaacctggagggacgtccagcacctgctagtgaagacatcccggccggcccacctgaaagcgagcgactggaaagtgaacggcgcgggtcataaagttagccatttctatggatttggtttggtggacgcagaagctctcgttgtggaggcaaagaagtggacagcagtgccatcgcagcacatgtgtgtggccgcctcggacaagagacccaggagcatccccttagtgcaggtgctgcggactacggccctgaccagcgcctgcgcggagcactcggaccagcgggtggtctacttggagcacgtggtggttcgcacctccatctcacacccacgccgaggagacctccagatctacctggtttctccctcgggaaccaagtctcaacttctggcaaagaggttgctggatctttccaatgaagggtttacaaactgggaattcatgactgtccactgctggggagaaaaggctgaagggcagtggaccttggaaatccaagatctgccatcccaggtccgcaacccggagaagcaaggtgatcttgagactcctgttgcaaatcaactgaccacagaagagaggttcgtttccacactctcgattctgttccattggtctgtatatctatcttggagtcagtaccatattgttttgatcactgtagctttgtag

SEQ ID NO: 1492 - protein, 497 aa, Homo sapiens
LWVLHCGDKNSRCRSEMNVQAAWKRGYTGKNVVVTILDDGIERNHPDLAPNYDSYASYDVNGNDYDPSPRYDASNENKHGTRCAGEVAASANNSYCIVGIAYNAKIGGIRMLDGDVTDVVEAKSLGIRPNYIDIYSASWGPDDDGKTVDGPGRLAKQAFEYGIKKGRQGLGSIFVWASGNGGREGDYCSCDGYTNSIYTISVSSATENGYKPWYLEECASTLATTYSSGAFYERKIVTTDLRQRCTDGHTGTSVSAPMVAGIIALALEANSQLTWRDVQHLLVKTSRPAHLKASDWKVNGAGHKVSHFYGFGLVDAEALVVEAKKWTAVPSQHMCVAASDKRPRSIPLVQVLRTTALTSACAEHSDQRVVYLEHVVVRTSISHPRRGDLQIYLVSPSGTKSQLLAKRLLDLSNEGFTNWEFMTVHCWGEKAEGQWTLEIQDLPSQVRNPEKQGDLETPVANQLTTEERFVSTLSILFHWSVYLSWSQYHIVLITVAL

SEQ ID NO: 1493 - DNA, 5463 bp, Homo sapiens
ccgcctctgtcgccactctctccccctgttccgcgtctgcgtcgccaccaccgccgggggtatccggggggtcgcttaccgggctggccccgcgccacagccgtagctttaacctcccgtcagcggccgccccaggaagaggcttctcggccgcggagccacttggggcctcagttctcgccctcttgccgtcgccgcgggtcctggagaagcggccgcggccagggaacggggcatcgcggttccaacgattaactgctgaagtactgatcgagttctgcatttcttcaatgaggaactacaggctgatcttctgccataatctcaaacagccataaatgacaaaagaatgcttgctcagtgagggtagctggtgcagaagccattttttaaacttaggtatttaagtactgaaagaaaagacagctttgatttctggctgcaaaaaagatatgaggaagagctcctccccttccttgagtaactgcaactccgttcttgctaacaaaatatttggaattccacttgatgagctgcagcagggaggacatccagacaatgaggttccattcatagtccgccacgttgtggactatattgaggaacatggaggtctggagcaacaaggactttttcaagtcaatggaaatgctgagacagtggagtggcttcggcagagatacgacagcggagaagaggtggatttggttaaggaagcagatgttccctcagctattagccttcttagattttttcttcaagaacttcctgaacctgttatccctggcagtttacatattcacttgatgcagctttctcaagattataataatgaagatgaatttggaagaaagttgaggttcctcttgcaacagcttccacctgttaattatagtttgttaaagtttctgtgtagatttttagccaatgtagcatcacatcatgaagaaatttggtccgcaaattctttggctgctgtctttggtccagatgtcttccacatttacacagatgtggaagacatgaaagagcaagaaatagtgagcaggataatggctggacttctggaaaactactatgagttttttgagaatgaagaggaagatttttcatctaatgatttgagttcaattactgaacaggttaatgaactttctgaggaagaagaggaagatgaaaagctggaacatattgaagaacttccagaagagggtgcagaaaaatcaaatgacatgccagaggtggtacaattaaggatgactgaaaacatcctggaatcaaatagtgttacggcaacaagcacccatatatctcccatcagcatcctaccagcctctacagatattttagaaagaacaattagagcagctgtggaacagcacctttttgatcttcagagcagcatagatcatgatcttaagaatttacaacagcaaagtgtggtgtgtaataatgaagcagaaagtattcattgtgatggggaaggatctaataaccagattgatattgctgatgatattattaatgccagtgaaagtaacagagactgttcaaaacctgtggctagcactaatttagacaatgaagctatgcagcaagattgtgtatttgagaatgaagaaaatacccagtctgtaggtatattgttagagccatgcagtgaccgtggtgatagtgaagatggctgtcttgagagggaagaatatttgttatttgacagtgataaattgtcacacttgattctggattctagtagcaagatatgtgatttgaatgccaacactgaatcagaagtaccaggaggtcagagtgttggtgttcaaggggaagcagcgtgtgtcagtattccacatttagatctgaagaatgtttctgatggtgataaatgggaagagccatttcctgcttttaagtcttggcaggaggactctgagtctggagaagctcagctgtctccacaagctggaagaatgaatcatcaccccttggaagaggactgtcctccagtattatcacaccgcagtttagattttggtcaaagccagcgtttcctacatgatccagaaaagttggattcctcatctaaagcactgtcttttactagaattcgaagatcatcctttagttcaaaagatgaaaagagagaggacagaacaccttatcagctggtcaagaaacttcagaagaaaatcagacaatttgaggaacagtttgaaagggaaagaaatagcaagccctcctacagtgatattgctgccaatccaaaggtattaaaatggatgacagagcttacaaaactgcggaagcaaattaaagatgcaaaacacaaaaattctgatggagaatttgtacctcagacacgtccacgtagtaacacacttccaaaaagctttggctcttctctagaccatgaagatgaagagaatgaagatgaacccaaggtcattcagaaggagaaaaaaccatctaaagaagcaacccttgaacttattcttaaaagactgaaagaaaaacgtattgagaggtgtcttccagaagatatcaagaaaatgaccaaagatcatttggtagaagagaaagcttctcttcagaaaagtcttctttactatgaaagtcaacatggaaggccggtgaccaaggaagaaaggcacattgttaaacctctctatgatagatacaggcttgtaaaacaaatgctgacaagagctagcatcactcctgtccttggatctccatccaccaagcgaaggggtcagatgttacagccaatcatagaaggagaaactgcacatttttttgaagaaatcaaggaggaagaagaagatggtgttaatctgtcctctgagttaggtgatatgttgaaaactgcagtacaggtacagtcttcattagaaaactctgaatctgatgttgaagaaaatcaagaaaaactggctctggatctccgattgtcaagttctcgagcagcttctatgcctgaattattggaacaactttggaaagccagagctgaaaaaaagaaactacgcaaaacgttgcgggaatttgaagaagcattttatcaacaaaatggaaggaatgcccagaaagaggatcgtgttccagtgcttgaggagtacagagagtacaagaaaattaaagccaagcttaggcttcttgaagttcttataagcaaacaagattcttcaaaatccatataagatacgttccttgaaaattcatatcataaagtcagttgtattccttgaagctatcatcgtgtgtacttggctggtacttaaattcgttttgtcaggcactcagagaatctcattttgtacttggttgtggtgccactaaacaaaacaaatgatgggagagtaagtaggccctctcaagggagcgtaagtgatgttccatattaaccacagactgtcctctccacctttagcaaacatatggtttacttcattgttttgtactacagatacatccttttagcaaaagactggaattttatcctttcaacttcaagaactttggaaatgcaagctttttgttattaccaactttttgtttctcattactgaagaaaattggaggaaaatcttcatactgaattcttctgttgcctttttcttacagaatgactgaaaatttgaaagaaaagcctataaaagtgcacatacgcaactgtgttctctgttttcctagaaaaccaaaatcaaactgagatttcaagtcgtactatggaacacctttctgtttaattcccaaagtgacatcttctcacaggtagtatgttagtaaaattttgcaattcgctggtcacacagctcccggatgaagataacagttggtagaccaaaaggtgacctcgcttagtatattgaaaacacacaccacacatcacacacagaactgaatcataccacatgctgcctatgggacttcagttactgtttcctgagttactgtttatccgctggcaatggtgtgatttgtctggatcagatccgcgctattccccaacccacctccagataatgtgagaaaatagccatgtcagtatgtaggaactctgatggtgctcagatttgtgtgttcaatcaatgggcttaaatcagcaaaatattatgcctaaagtaaatctgttcttaacaagggctctaccactgcattttcacatgtaccttcagggggttatctttttttttttcccctcctattttaatcagcaaaatccataccaaaacaacgacaacaacgccctcttaagggaccaccctttggtcaatcataacatgctgtttaaagcagctgtttacaggatgtgtagtggtatgccccttgtcatatactcttagcatatctttttttcctttggctttgcatggcttttcttcaggtactgtctcggtatcattctgctaatcattgttacagaatggtgacttcatttgtgctaacagtacaacagcagatttgggtcaggcttaatctaagtgttaacttttttttctggtgcttttttggattgatgactgtctcactttgactatacccatgttttgcatgcaatgactcatgcatggttttcttaactagctaatattaacaatttattccatataaaaatggaattttgcaacatcctttaataaggtgagggaagcatgaacctcagacttctggcactattacatagtaagcacatgaagtagtttgataataaatagcagttctagtacttcacatttcacccgtgtgtgcaatgcctttttctggggggtggggggtgagggaaaacctggtagtgaatgtgtagttggggaataaagaaaagcactaaatcctgccctttttgtgtggtttccttttgatacaactaggttattcataatgtatacctagaaaagtgaaattgaaaataccaaaagatgtatcatttttatttgaatccatcatgcagtgtacatttcagataatttccttcagtctccagataggagtgtatccaaacatctaattttatgtgcactgtgtatcttatatgaatgttttattttatataccacatgcaaaaatgtccatatgcactatttaaatgttttaaataatatattccttctttataatgctaaatctatatgagtaccatatttttataagtcagtggtctgactggtttcattttagaattaacagctgcttcaatatgttattcaatgttaatgtttggctgtgagtagaatatgtaaaagtggcatggcagcacttatgctctgtgacagtattgtgtgtcatagttgagcagtagctggtagaattaggcagttggtgatagttttactttggtacaaataaaaactgtatatctatatacaaataatatatagatatatatgtccaccagtataatggcattgctgtgtctggcacttcattgtacagacttttataataaaagaacttgaaagttct

SEQ ID NO: 1494 - protein, 915 aa, Homo sapiens
MRKSSSPSLSNCNSVLANKIFGIPLDELQQGGHPDNEVPFIVRHVVDYIEEHGGLEQQGLFQVNGNAETVEWLRQRYDSGEEVDLVKEADVPSAISLLRFFLQELPEPVIPGSLHIHLMQLSQDYNNEDEFGRKLRFLLQQLPPVNYSLLKFLCRFLANVASHHEEIWSANSLAAVFGPDVFHIYTDVEDMKEQEIVSRIMAGLLENYYEFFENEEEDFSSNDLSSITEQVNELSEEEEEDEKLEHIEELPEEGAEKSNDMPEVVQLRMTENILESNSVTATSTHISPISILPASTDILERTIRAAVEQHLFDLQSSIDHDLKNLQQQSVVCNNEAESIHCDGEGSNNQIDIADDIINASESNRDCSKPVASTNLDNEAMQQDCVFENEENTQSVGILLEPCSDRGDSEDGCLEREEYLLFDSDKLSHLILDSSSKICDLNANTESEVPGGQSVGVQGEAACVSIPHLDLKNVSDGDKWEEPFPAFKSWQEDSESGEAQLSPQAGRMNHHPLEEDCPPVLSHRSLDFGQSQRFLHDPEKLDSSSKALSFTRIRRSSFSSKDEKREDRTPYQLVKKLQKKIRQFEEQFERERNSKPSYSDIAANPKVLKWMTELTKLRKQIKDAKHKNSDGEFVPQTRPRSNTLPKSFGSSLDHEDEENEDEPKVIQKEKKPSKEATLELILKRLKEKRIERCLPEDIKKMTKDHLVEEKASLQKSLLYYESQHGRPVTKEERHIVKPLYDRYRLVKQMLTRASITPVLGSPSTKRRGQMLQPIIEGETAHFFEEIKEEEEDGVNLSSELGDMLKTAVQVQSSLENSESDVEENQEKLALDLRLSSSRAASMPELLEQLWKARAEKKKLRKTLREFEEAFYQQNGRNAQKEDRVPVLEEYREYKKIKAKLRLLEVLISKQDSSKSI

SEQ ID NO: 1495 - DNA, 1037 bp, Homo sapiens
gttgcaggcagacggagcagagcggtcagggatcatgagggagagtgcgttggagcgggggcctgtgcccgaggcgccggcggggggtcccgtgcacgccgtgacggtggtgaccctgctggagaagctggcctccatgctggagactctgcgggagcggcagggaggcctggctcgaaggcagggaggcctggcagggtccgtgcgccgcatccagagcggcctgggcgctctgagtcgcagccacgacaccaccagcaacaccttggcgcagctgctggccaaggcggagcgcgtgagctcgcacgccaacgccgcccaagagcgcgcggtgcgccgcgcagcccaggtgcagcggctggaggccaaccacgggctgctggtggcgcgcgggaagctccacgttctgctcttcaaggaggagggtgaagtcccagccagcgctttccagaaggcaccagagcccttgggcccggcggaccagtccgagctgggcccagagcagctggaggccgaagttggagagagctcggacgaggagccggtggagtccagggcccagcggctgcggcgcaccggattgcagaaggtacagagcctccgaagggccctttcgggccggaaaggccctgcagcgccaccgcccaccccggtcaagccgcctcgccttgggcctggccggagcgctgaagcccagccggaagcccagcctgcgctggagcccacgctggagccagagcctccgcaggacaccgaggaagatcccgggagacctggggctgccgaagaagctctgctccaaatggagagtgtagcctgagggctggtgttgcctgcctcccctgtgcttgtgccttgtcccaaaataaatcctttcagaatgtagcactcacgccctaataaggagcgaatcctacatccaccaaggcgggcgctctggccctcccttccttaagcccagtcctgtgtcctctgaaagaggtgcagtcactcacacctgcttgcgctcaccatcaataaaagtaatttcacccgaa

SEQ ID NO: 1496 - protein, 261 aa, Homo sapiens
MRESALERGPVPEAPAGGPVHAVTVVTLLEKLASMLETLRERQGGLARRQGGLAGSVRRIQSGLGALSRSHDTTSNTLAQLLAKAERVSSHANAAQERAVRRAAQVQRLEANHGLLVARGKLHVLLFKEEGEVPASAFQKAPEPLGPADQSELGPEQLEAEVGESSDEEPVESRAQRLRRTGLQKVQSLRRALSGRKGPAAPPPTPVKPPRLGPGRSAEAQPEAQPALEPTLEPEPPQDTEEDPGRPGAAEEALLQMESVA

SEQ ID NO: 1497 - DNA, 3196 bp, Homo sapiens
ggaggagcagtctctccgcgcgtctcccggagctttctccattgtctctgcctttacaacagagggagacgatggactgagctgatccgcaccatggagtctcgggtcttactgagaacattctgtttgatcttcggtctcggagcagtttgggggcttggtgtggacccttccctacagattgacgtcttaacagagttagaacttggggagtccacgaccggagtgcgtcaggtcccggggctgcataatgggacgaaagcctttctctttcaagatactcccagaagcataaaagcatccactgctacagctgaacagttttttcagaagctgagaaataaacatgaatttactattttggtgaccctaaaacagacccacttaaattcaggagttattctctcaattcaccacttggatcacaggtacctggaactggaaagtagtggccatcggaatgaagtcagactgcattaccgctcaggcagtcaccgccctcacacagaagtgtttccttacattttggctgatgacaagtggcacaagctctccttagccatcagtgcttcccatttgattttacacattgactgcaataaaatttatgaaagggtagtagaaaagccctccacagacttgcctctaggcacaacattttggctaggacagagaaataatgcgcatggatattttaagggtataatgcaagatgtccaattacttgtcatgccccagggatttattgctcagtgcccagatcttaatcgcacctgtccaacttgcaatgacttccatggacttgtgcagaaaatcatggagctacaggatattttagccaaaacatcagccaagctgtctcgagctgaacagcgaatgaatagattggatcagtgctattgtgaaaggacttgcaccatgaagggaaccacctaccgagaatttgagtcctggatagacggctgtaagaactgcacatgcctgaatggaaccatccagtgtgaaactctaatctgcccaaatcctgactgcccacttaagtcggctcttgcgtatgtggatggcaaatgctgtaaggaatgcaaatcgatatgccaatttcaaggacgaacctactttgaaggagaaagaaatacagtctattcctcttctggagtatgtgttctctatgagtgcaaggaccagaccatgaaacttgttgagagttcaggctgtccagctttggattgtccagagtctcatcagataaccttgtctcacagctgttgcaaagtttgtaaaggttatgacttttgttctgaaaggcataactgcatggagaattccatctgcagaaatctgaatgacagggctgtttgtagctgtcgagatggttttagggctcttcgagaggataatgcctactgtgaagacatcgatgagtgtgctgaagggcgccattactgtcgtgaaaatacaatgtgtgtcaacaccccgggttcttttatgtgcatctgcaaaactggatacatcagaattgatgattattcatgtacagaacatgatgagtgtatcacaaatcagcacaactgtgatgaaaatgctttatgcttcaacactgttggaggacacaactgtgtttgcaagccgggctatacagggaatggaacgacatgcaaagcattttgcaaagatggctgtaggaatggaggagcctgtattgccgctaatgtgtgtgcctgcccacaaggcttcactggacccagctgtgaaacggacattgatgaatgctctgatggttttgttcaatgtgacagtcgtgctaattgcattaacctgcctggatggtaccactgtgagtgcagagatggctaccatgacaatgggatgttttcaccaagtggagaatcgtgtgaagatattgatgagtgtgggaccgggaggcacagctgtgccaatgataccatttgcttcaatttggatggcggatatgattgtcgatgtcctcatggaaagaattgcacaggggactgcatccatgatggaaaagttaagcacaatggtcagatttgggtgttggaaaatgacaggtgctctgtgtgctcatgtcagaatggattcgttatgtgtcgacggatggtctgtgactgtgagaatcccacagttgatcttttttgctgccctgaatgtgacccaaggcttagtagtcagtgcctccatcaaaatggggaaactttgtataacagtggtgacacctgggtccagaattgtcaacagtgccgctgcttgcaaggggaagttgattgttggcccctgccttgcccagatgtggagtgtgaattcagcattctcccagagaatgagtgctgcccgcgctgtgtcacagacccttgccaggctgacaccatccgcaatgacatcaccaagacttgcctggacgaaatgaatgtggttcgcttcaccgggtcctcttggatcaaacatggcactgagtgtactctctgccagtgcaagaatggccacatctgttgctcagtggatccacagtgccttcaggaactgtgaagttaactgtctcatgggagatttctgttaaaagaatgttctttcattaaaagaccaaaaagaagttaaaacttaaattgggtgatttgtgggcagctaaatgcagctttgttaatagctgagtgaactttcaattatgaaatttgtggagcttgacaaaatcacaaaaggaaaattactggggcaaaattagacctcaagtctgcctctactgtgtctcacatcaccatgtagaagaatgggcgtacagtatataccgtgacatcctgaaccctggatagaaagcctgagcccattggatctgtgaaagcctctagcttcactggtgcagaaaattttcctctagatcagaatcttcaagaatcagttaggttcctcactgcaagaaataaaatgtcaggcagtgaatgaattatattttcagaagtaaagcaaagaagctataacatgttatgtacagtacactctgaaaagaaatctgaaacaagttattgtaatgataaaaataatgcacaggcatggttacttaatattttctaacaggaaaagtcatccctatttccttgttttactgcacttaatattatttggttgaatttgttcagtataagctcgttcttgtgcaaaattaaataaatatttctcttacctt

SEQ ID NO: 1498 - protein, 816 aa, Homo sapiens
MESRVLLRTFCLIFGLGAVWGLGVDPSLQIDVLTELELGESTTGVRQVPGLHNGTKAFLFQDTPRSIKASTATAEQFFQKLRNKHEFTILVTLKQTHLNSGVILSIHHLDHRYLELESSGHRNEVRLHYRSGSHRPHTEVFPYILADDKWHKLSLAISASHLILHIDCNKIYERVVEKPSTDLPLGTTFWLGQRNNAHGYFKGIMQDVQLLVMPQGFIAQCPDLNRTCPTCNDFHGLVQKIMELQDILAKTSAKLSRAEQRMNRLDQCYCERTCTMKGTTYREFESWIDGCKNCTCLNGTIQCETLICPNPDCPLKSALAYVDGKCCKECKSICQFQGRTYFEGERNTVYSSSGVCVLYECKDQTMKLVESSGCPALDCPESHQITLSHSCCKVCKGYDFCSERHNCMENSICRNLNDRAVCSCRDGFRALREDNAYCEDIDECAEGRHYCRENTMCVNTPGSFMCICKTGYIRIDDYSCTEHDECITNQHNCDENALCFNTVGGHNCVCKPGYTGNGTTCKAFCKDGCRNGGACIAANVCACPQGFTGPSCETDIDECSDGFVQCDSRANCINLPGWYHCECRDGYHDNGMFSPSGESCEDIDECGTGRHSCANDTICFNLDGGYDCRCPHGKNCTGDCIHDGKVKHNGQIWVLENDRCSVCSCQNGFVMCRRMVCDCENPTVDLFCCPECDPRLSSQCLHQNGETLYNSGDTWVQNCQQCRCLQGEVDCWPLPCPDVECEFSILPENECCPRCVTDPCQADTIRNDITKTCLDEMNVVRFTGSSWIKHGTECTLCQCKNGHICCSVDPQCLQEL

SEQ ID NO: 1499 - DNA, 3595 bp, Homo sapiens
ggggcggggcgcacagagccagaggggcttgcgagcggcggctgagggaccgcggggagggggcgccgagcggctccagcgcagagactctcactgcacgccggagggcgcccttcctcgctcgcgcccgcgcgaccgcgcgccccagtcccgccccgccccgctaaccgccccagacacagcgctcgccgagggtcgcttggaccctgatcttacccgtgggcaccctgcgctctgcctgccgcgaagaccggctccccgacccgcagaagtcaggagagagggtgaagcggagcagcccgaggcggggcagcctcccggagcagcgccgcgcagagcccgggacaatggggccgcggcggctgctgctggtggccgcctgcttcagtctgtgcggcccgctgttgtctgcccgcacccgggcccgcaggccagaatcaaaagcaacaaatgccaccttagatccccggtcatttcttctcaggaaccccaatgataaatatgaaccattttgggaggatgaggagaaaaatgaaagtgggttaactgaatacagattagtctccatcaataaaagcagtcctcttcaaaaacaacttcctgcattcatctcagaagatgcctccggatatttgaccagctcctggctgacactctttgtcccatctgtgtacaccggagtgtttgtagtcagcctcccactaaacatcatggccatcgttgtgttcatcctgaaaatgaaggtcaagaagccggcggtggtgtacatgctgcacctggccacggcagatgtgctgtttgtgtctgtgctcccctttaagatcagctattacttttccggcagtgattggcagtttgggtctgaattgtgtcgcttcgtcactgcagcattttactgtaacatgtacgcctctatcttgctcatgacagtcataagcattgaccggtttctggctgtggtgtatcccatgcagtccctctcctggcgtactctgggaagggcttccttcacttgtctggccatctgggctttggccatcgcaggggtagtgcctctgctcctcaaggagcaaaccatccaggtgcccgggctcaacatcactacctgtcatgatgtgctcaatgaaaccctgctcgaaggctactatgcctactacttctcagccttctctgctgtcttcttttttgtgccgctgatcatttccacggtctgttatgtgtctatcattcgatgtcttagctcttccgcagttgccaaccgcagcaagaagtcccgggctttgttcctgtcagctgctgttttctgcatcttcatcatttgcttcggacccacaaacgtcctcctgattgcgcattactcattcctttctcacacttccaccacagaggctgcctactttgcctacctcctctgtgtctgtgtcagcagcataagctgctgcatcgaccccctaatttactattacgcttcctctgagtgccagaggtacgtctacagtatcttatgctgcaaagaaagttccgatcccagcagttataacagcagtgggcagttgatggcaagtaaaatggatacctgctctagtaacctgaataacagcatatacaaaaagctgttaacttaggaaaagggactgctgggaggttaaaaagaaaagtttataaaagtgaataacctgaggattctattagtccccacccaaactttattgattcacctcctaaaacaacagatgtacgacttgcatacctgctttttatgggagctgtcaagcatgtatttttgtcaattaccagaaagataacaggacgagatgacggtgttattccaagggaatattgccaatgctacagtaataaatgaatgtcacttctggatatagctaggtgacatatacatacttacatgtgtgtatatgtagatgtatgcacacacatatattatttgcagtgcagtatagaataggcactttaaaacactctttccccgcaccccagcaattatgaaaataatctctgattccctgatttaatatgcaaagtctaggttggtagagtttagccctgaacatttcatggtgttcatcaacagtgagagactccatagtttgggcttgtaccacttttgcaaataagtgtattttgaaattgtttgacggcaaggtttaagttattaagaggtaagacttagtactatctgtgcgtagaagttctagtgttttcaattttaaacatatccaagtttgaattcctaaaattatggaaacagatgaaaagcctctgttttgatatgggtagtattttttacattttacacactgtacacataagccaaaactgagcataagtcctctagtgaatgtaggctggctttcagagtaggctattcctgagagctgcatgtgtccgcccccgatggaggactccaggcagcagacacatgccagggccatgtcagacacagattggccagaaaccttcctgctgagcctcacagcagtgagactggggccactacatttgctccatcctcctgggattggctgtgaactgatcatgtttatgagaaactggcaaagcagaatgtgatatcctaggaggtaatgaccatgaaagacttctctacccatcttaaaaacaacgaaagaaggcatggacttctggatgcccatccactgggtgtaaacacatctagtagttgttctgaaatgtcagttctgatatggaagcacccattatgcgctgtggccactccaataggtgctgagtgtacagagtggaataagacagagacctgccctcaagagcaaagtagatcatgcatagagtgtgatgtatgtgtaataaatatgtttcacacaaacaaggcctgtcagctaaagaagtttgaacatttgggttactatttcttgtggttataacttaatgaaaacaatgcagtacaggacatatattttttaaaataagtctgatttaattgggcactatttatttacaaatgttttgctcaatagattgctcaaatcaggttttcttttaagaatcaatcatgtcagtctgcttagaaataacagaagaaaatagaattgacattgaaatctaggaaaattattctataatttccatttacttaagacttaatgagactttaaaagcattttttaacctcctaagtatcaagtatagaaaatcttcatggaattcacaaagtaatttggaaattaggttgaaacatatctcttatcttacgaaaaaatggtagcattttaaacaaaatagaaagttgcaaggcaaatgtttatttaaaagagcaggccaggcgcggtggctcacgcctgtaatcccagcactttgggaggctgaggcgggtggatcacgaggtcaggagatcgagaccatcctggctaacacggtgaaacccgtctctactaaaaatgcaaaaaaaattagccgggcgtggtggcaggcacctgtagtcccagctactcgggaggctgaggcaggagactggcgtgaacccaggaggcggaccttgtagtgagccgagatcgcgccactgtgctccagcctgggcaacagagcaagactccatctc

SEQ ID NO: 1500 - protein, 425 aa, Homo sapiens
MGPRRLLLVAACFSLCGPLLSARTRARRPESKATNATLDPRSFLLRNPNDKYEPFWEDEEKNESGLTEYRLVSINKSSPLQKQLPAFISEDASGYLTSSWLTLFVPSVYTGVFVVSLPLNIMAIVVFILKMKVKKPAVVYMLHLATADVLFVSVLPFKISYYFSGSDWQFGSELCRFVTAAFYCNMYASILLMTVISIDRFLAVVYPMQSLSWRTLGRASFTCLAIWALAIAGVVPLLLKEQTIQVPGLNITTCHDVLNETLLEGYYAYYFSAFSAVFFFVPLIISTVCYVSIIRCLSSSAVANRSKKSRALFLSAAVFCIFIICFGPTNVLLIAHYSFLSHTSTTEAAYFAYLLCVCVSSISCCIDPLIYYYASSECQRYVYSILCCKESSDPSSYNSSGQLMASKMDTCSSNLNNSIYKKLLT

SEQ ID NO: 1501 - DNA, 3413 bp, Homo sapiens
gtagatgcagtccgccgccgccgctgcctcagccagcaatgcaagattagatctctaaatgcagcaaaacactgcctgaaaacagaccggcccgcgcagcaagcagacatttcacggtgcgctggggaagcttcaaaatatatctgtgactctgtcttcgttgctcttcatccccatcaatttcatcacgggaggcgagcagcaagtaagaatttcactttcggatctgcctagagacacacctccctgctccctcccccactcgatgtgaagagtattccggagtctccgggcgggagtagatttgcagcaccctagcgggagcgaggaaaacctactgattctttagctcattatcatctctcccagacgagatttccttcttatcgcctgcctcatcgctcaagtttgagcctcccgaagtccgggcgggagagacgaaacccctggctcacccccagccgcaggaagccaccgccttgctccaagcccctgcagctctgctgcaccgcagcttctcacccagtgcggatgctgtagatcaacaggttcagggaacttgagcagaataaggagagaccaccgggtgccgcagctcgggtgcagagggaaaaaaggacccatagacttgtggctcgcgtcgcgcgcgcacgctgcgccagggccccaggctggcgcgcactccctctctggctcctccagtccgattgctcctgcccccaccttacaggtctgggatgtacctttccatctgttgctgctttcttctatgggcccctgccctcactctcaagaacctcaactactccgtgccggaggagcaaggggccggcacggtgatcgggaacatcggcagggatgctcgactgcagcctgggcttccgcctgcagagcgcggcggcggagggcgcagcaagtcgggtagctaccgggtgctggagaactccgcaccgcacctgctggacgtggacgcagacagcgggctcctctacaccaagcagcgcatcgaccgcgagtccctgtgccgccacaatgccaagtgccagctgtccctcgaggtgttcgccaacgacaaggagatctgcatgatcaaggtagagatccaggacatcaacgacaacgcgccctccttctcctcggaccagatcgaaatggacatctcggagaacgctgctccgggcacccgcttccccctcaccagcgcacatgaccccgacgccggcgagaatgggctccgcacctacctgctcacgcgcgacgatcacggcctctttggactggacgttaagtcccgcggcgacggcaccaagttcccagaactggtcatccagaaggctctggaccgcgagcaacagaatcaccatacgctcgtgctgactgccctggacggtggcgagcctccacgttccgccaccgtacagatcaacgtgaaggtgattgactccaacgacaacagcccggtcttcgaggcgccatcctacttggtggaactgcccgagaacgctccgctgggtacagtggtcatcgatctgaacgccaccgacgccgatgaaggtcccaatggtgaagtgctctactctttcagcagctacgtgcctgaccgcgtgcgggagctcttctccatcgaccccaagaccggcctaatccgtgtgaagggcaatctggactatgaggaaaacgggatgctggagattgacgtgcaggcccgagacctggggcctaaccctatcccagcccactgcaaagtcacggtcaagctcatcgaccgcaacgacaatgcgccgtccatcggtttcgtctccgtgcgccagggggcgctgagcgaggccgcccctcccggcaccgtcatcgccctggtgcgggtcactgaccgggactctggcaagaacggacagctgcagtgtcgggtcctaggcggaggagggacgggcggcggcgggggcctgggcgggcccgggggttccgtccccttcaagcttgaggagaactacgacaacttctacacggtggtgactgaccgcccgctggaccgcgagacacaagacgagtacaacgtgaccatcgtggcgcgggacgggggctctcctcccctcaactccaccaagtcgttcgcgatcaagattctagacgagaacgacaacccgcctcggttcaccaaagggctctacgtgcttcaggtgcacgagaacaacatcccgggagagtacctgggctctgtgctcgcccaggatcccgacctgggccagaacggcaccgtatcctactctatcctgccctcgcacatcggcgacgtgtctatctacacctatgtgtctgtgaatcccacgaacggggccatctacgccctgcgctcctttaacttcgagcagaccaaggcttttgagttcaaggtgcttgctaaggactcgggggcgcccgcgcacttggagagcaacgccacggtgagggtgacagtgctagacgtgaatgacaacgcgccagtgatcgtgctccccacgctgcagaacgacaccgcggagctgcaggtgccgcgcaacgctggcctgggctatctggtgagcactgtgcgcgccctagacagcgacttcggcgagagcgggcgtctcacctacgagatcgtggacggcaacgacgaccacctgtttgagatcgacccgtccagcggcgagatccgcacgctgcaccctttctgggaggacgtgacgcccgtggtggagctggtggtgaaggtgaccgaccacggcaagcctaccctgtccgcagtggccaagctcatcatccgctcggtgagcggatcccttcccgagggggtaccacgggtgaatggcgagcagcaccactgggacatgtcgctgccgctcatcgtgactctgagcactatctccatcatcctcctagcggccatgatcaccatcgccgtcaagtgcaagcgcgagaacaaggagatccgcacttacaactgccgcatcgccgagtacagccacccgcagctgggtgggggcaagggcaagaagaagaagatcaacaaaaatgatatcatgctggtgcagagcgaagtggaggagaggaacgccatgaacgtcatgaacgtggtgagcagcccctccctggccacctcccccatgtacttcgactaccagacccgcctgcccctcagctcgccccggtcggaggtgatgtatctcaaaccggcctccaacaacctgactgtccctcaggggcacgcgggctgccacaccagcttcaccggacaagggactaatgcaagcgagacccctgccactcggatgtccataattcagacagacaattttcccgcagagcccaattacatgggcagcaggcagcagtttgttcaaagcttccccatttgcattcctccacgtttaaggacccagaaagagccagcctga

SEQ ID NO: 1502 - protein, 891 aa, Homo sapiens
MYLSICCCFLLWAPALTLKNLNYSVPEEQGAGTVIGNIGRDARLQPGLPPAERGGGGRSKSGSYRVLENSAPHLLDVDADSGLLYTKQRIDRESLCRHNAKCQLSLEVFANDKEICMIKVEIQDINDNAPSFSSDQIEMDISENAAPGTRFPLTSAHDPDAGENGLRTYLLTRDDHGLFGLDVKSRGDGTKFPELVIQKALDREQQNHHTLVLTALDGGEPPRSATVQINVKVIDSNDNSPVFEAPSYLVELPENAPLGTVVIDLNATDADEGPNGEVLYSFSSYVPDRVRELFSIDPKTGLIRVKGNLDYEENGMLEIDVQARDLGPNPIPAHCKVTVKLIDRNDNAPSIGFVSVRQGALSEAAPPGTVIALVRVTDRDSGKNGQLQCRVLGGGGTGGGGGLGGPGGSVPFKLEENYDNFYTVVTDRPLDRETQDEYNVTIVARDGGSPPLNSTKSFAIKILDENDNPPRFTKGLYVLQVHENNIPGEYLGSVLAQDPDLGQNGTVSYSILPSHIGDVSIYTYVSVNPTNGAIYALRSFNFEQTKAFEFKVLAKDSGAPAHLESNATVRVTVLDVNDNAPVIVLPTLQNDTAELQVPRNAGLGYLVSTVRALDSDFGESGRLTYEIVDGNDDHLFEIDPSSGEIRTLHPFWEDVTPVVELVVKVTDHGKPTLSAVAKLIIRSVSGSLPEGVPRVNGEQHHWDMSLPLIVTLSTISIILLAAMITIAVKCKRENKEIRTYNCRIAEYSHPQLGGGKGKKKKINKNDIMLVQSEVEERNAMNVMNVVSSPSLATSPMYFDYQTRLPLSSPRSEVMYLKPASNNLTVPQGHAGCHTSFTGQGTNASETPATRMSIIQTDNFPAEPNYMGSRQQFVQSFPICIPPRLRTQKEPA

SEQ ID NO: 1503 - DNA, 2073 bp, Homo sapiens
gaatttagataatgggctgtgtgcaatgtaaggataaagaagcaacaaaactgacggaggagagggacggcagcctgaaccagagctctgggtaccgctatggcacagaccccacccctcagcactaccccagcttcggtgtgacctccatccccaactacaacaacttccacgcagccgggggccaaggactcaccgtctttggaggtgtgaactcttcgtctcatacggggaccttgcgtacgagaggaggaacaggagtgacactctttgtggccctttatgactatgaagcacggacagaagatgacctgagttttcacaaaggagaaaaatttcaaatattgaacagctcggaaggagattggtgggaagcccgctccttgacaactggagagacaggttacattcccagcaattatgtggctccagttgactctatccaggcagaagagtggtactttggaaaacttggccgaaaagatgctgagcgacagctattgtcctttggaaacccaagaggtacctttcttatccgcgagagtgaaaccaccaaaggtgcctattcactttctatccgtgattgggatgatatgaaaggagaccatgtcaaacattataaaattcgcaaacttgacaatggtggatactacattaccacccgggcccagtttgaaacacttcagcagcttgtacaacattactcagagaaagctgatggtttgtgttttaacttaactgtgattgcatcgagttgtaccccacaaacttctggattggctaaagatgcttgggaagttgcacgtcgttcgttgtgtctggagaagaagctgggtcaggggtgtttcgctgaagtgtggcttggtacctggaatggaaacacaaaagtagccataaagactcttaaaccaggcacaatgtcccccgaatcattccttgaggaagcgcagatcatgaagaagctgaagcacgacaagctggtccagctctatgcagtggtgtctgaggagcccatctacatcgtcaccgagtatatgaacaaaggaagtttactggatttcttaaaagatggagaaggaagagctctgaaattaccaaatcttgtggacatggcagcacaggtggctgcaggaatggcttacatcgagcgcatgaattatatccatagagatctgcgatcagcaaacattctagtggggaatggactcatatgcaagattgctgacttcggattggcccgattgatagaagacaatgagtacacagcaagacaaggtgcaaagttccccatcaagtggacggcccccgaggcagccctgtacgggaggttcacaatcaagtctgacgtgtggtcttttggaatcttactcacagagctggtcaccaaaggaagagtgccatacccaggcatgaacaaccgggaggtgctggagcaggtggagcgaggctacaggatgccctgcccgcaggactgccccatctctctgcatgagctcatgatccactgctggaaaaaggaccctgaagaacgccccacttttgagtacttgcagagcttcctggaagactactttaccgcgacagagccccagtaccaacctggtgaaaacctgtaaggcccgggtctgcggagagaggccttgtcccagaggctgccccacccctccccattagctttcaattccgtagccagctgctccccagcagcggaaccgcccaggatcagattgcatgtgactctgaagctgacgaacttccatggccctcattaatgacacttgtccccaaatccgaacctcctctgtgaagcattcgagacagaaccttgttatttctcagactttggaaaatgcattgtatcgatgttatgtaaaaggccaaacctctgttcagtgtaaatagttactccagtgccaacaatcctagtgctttccttttttaaaaatgcaaatcctatgtgattttaactctgtcttcacctgattcaactaaaaaaaaaaaagtattattttccaaaagtggcctctttgtctaaaacaataaaattttttttcatgttttaacaaaaaccaa

SEQ ID NO: 1504 - protein, 534 aa, Homo sapiens
MGCVQCKDKEATKLTEERDGSLNQSSGYRYGTDPTPQHYPSFGVTSIPNYNNFHAAGGQGLTVFGGVNSSSHTGTLRTRGGTGVTLFVALYDYEARTEDDLSFHKGEKFQILNSSEGDWWEARSLTTGETGYIPSNYVAPVDSIQAEEWYFGKLGRKDAERQLLSFGNPRGTFLIRESETTKGAYSLSIRDWDDMKGDHVKHYKIRKLDNGGYYITTRAQFETLQQLVQHYSEKADGLCFNLTVIASSCTPQTSGLAKDAWEVARRSLCLEKKLGQGCFAEVWLGTWNGNTKVAIKTLKPGTMSPESFLEEAQIMKKLKHDKLVQLYAVVSEEPIYIVTEYMNKGSLLDFLKDGEGRALKLPNLVDMAAQVAAGMAYIERMNYIHRDLRSANILVGNGLICKIADFGLARLIEDNEYTARQGAKFPIKWTAPEAALYGRFTIKSDVWSFGILLTELVTKGRVPYPGMNNREVLEQVERGYRMPCPQDCPISLHELMIHCWKKDPEERPTFEYLQSFLEDYFTATEPQYQPGENL

SEQ ID NO: 1505 - DNA, 2650 bp, Homo sapiens
gccgcgctggtggcggcggcgcgtcgttgcagttgcgccatctgtcaggagcggagccggcgaggagggggctgccgcgggcgaggaggaggggtcgccgcgagccgaaggccttcgagacccgcccgccgcccggcggcgagagtagaggcgaggttgttgtgcgagcggcgcgtcctctcccgcccgggcgcgccgcgcttctcccagcgcaccgaggaccgcccgggcgcacacaaagccgccgcccgcgccgcaccgcccggcggccgccgcccgcgccagggagggattcggccgccgggccggggacaccccggcgccgccccctcggtgctctcggaaggcccaccggctcccgggcccgccggggaccccccggagccgcctcggccgcgccggaggagggcggggagaggaccatgtgagtgggctccggagcctcagcgccgcgcagtttttttgaagaagcaggatgctgatctaaacgtggaaaaagaccagtcctgcctctgttgtagaagacatgtggtgtatataaagtttgtgatcgttggcggacattttggaatttagataatgggctgtgtgcaatgtaaggataaagaagcaacaaaactgacggaggagagggacggcagcctgaaccagagctctgggtaccgctatggcacagaccccacccctcagcactaccccagcttcggtgtgacctccatccccaactacaacaacttccacgcagccgggggccaaggactcaccgtctttggaggtgtgaactcttcgtctcatacggggaccttgcgtacgagaggaggaacaggagtgacactctttgtggccctttatgactatgaagcacggacagaagatgacctgagttttcacaaaggagaaaaatttcaaatattgaacagctcggaaggagattggtgggaagcccgctccttgacaactggagagacaggttacattcccagcaattatgtggctccagttgactctatccaggcagaagagtggtactttggaaaacttggccgaaaagatgctgagcgacagctattgtcctttggaaacccaagaggtacctttcttatccgcgagagtgaaaccaccaaaggtgcctattcactttctatccgtgattgggatgatatgaaaggagaccatgtcaaacattataaaattcgcaaacttgacaatggtggatactacattaccacccgggcccagtttgaaacacttcagcagcttgtacaacattactcagagagagctgcaggtctctgctgccgcctagtagttccctgtcacaaagggatgccaaggcttaccgatctgtctgtcaaaaccaaagatgtctgggaaatccctcgagaatccctgcagttgatcaagagactgggaaatgggcagtttggggaagtatggatgggtacctggaatggaaacacaaaagtagccataaagactcttaaaccaggcacaatgtcccccgaatcattccttgaggaagcgcagatcatgaagaagctgaagcacgacaagctggtccagctctatgcagtggtgtctgaggagcccatctacatcgtcaccgagtatatgaacaaaggaagtttactggatttcttaaaagatggagaaggaagagctctgaaattaccaaatcttgtggacatggcagcacaggtggctgcaggaatggcttacatcgagcgcatgaattatatccatagagatctgcgatcagcaaacattctagtggggaatggactcatatgcaagattgctgacttcggattggcccgattgatagaagacaatgagtacacagcaagacaaggtgcaaagttccccatcaagtggacggcccccgaggcagccctgtacgggaggttcacaatcaagtctgacgtgtggtcttttggaatcttactcacagagctggtcaccaaaggaagagtgccatacccaggcatgaacaaccgggaggtgctggagcaggtggagcgaggctacaggatgccctgcccgcaggactgccccatctctctgcatgagctcatgatccactgctggaaaaaggaccctgaagaacgccccacttttgagtacttgcagagcttcctggaagactactttaccgcgacagagccccagtaccaacctggtgaaaacctgtaaggcccgggtctgcggagagaggccttgtcccagaggctgccccacccctccccattagctttcaattccgtagccagctgctccccagcagcggaaccgcccaggatcagattgcatgtgactctgaagctgacgaacttccatggccctcattaatgacacttgtccccaaatccgaacctcctctgtgaagcattcgagacagaaccttgttatttctcagactttggaaaatgcattgtatcgatgttatgtaaaaggccaaacctctgttcagtgtaaatagttactccagtgccaacaatcctagtgctttccttttttaaaaatgcaaatcctatgtgattttaactctgtcttcacctgattcaactaaaaaaaaaaaagtattattttccaaaagtggcctctttgtctaaaacaataaaattttttttcatgttttaacaaaaaccaa

SEQ ID NO: 1506 - protein, 537 aa, Homo sapiens
MGCVQCKDKEATKLTEERDGSLNQSSGYRYGTDPTPQHYPSFGVTSIPNYNNFHAAGGQGLTVFGGVNSSSHTGTLRTRGGTGVTLFVALYDYEARTEDDLSFHKGEKFQILNSSEGDWWEARSLTTGETGYIPSNYVAPVDSIQAEEWYFGKLGRKDAERQLLSFGNPRGTFLIRESETTKGAYSLSIRDWDDMKGDHVKHYKIRKLDNGGYYITTRAQFETLQQLVQHYSERAAGLCCRLVVPCHKGMPRLTDLSVKTKDVWEIPRESLQLIKRLGNGQFGEVWMGTWNGNTKVAIKTLKPGTMSPESFLEEAQIMKKLKHDKLVQLYAVVSEEPIYIVTEYMNKGSLLDFLKDGEGRALKLPNLVDMAAQVAAGMAYIERMNYIHRDLRSANILVGNGLICKIADFGLARLIEDNEYTARQGAKFPIKWTAPEAALYGRFTIKSDVWSFGILLTELVTKGRVPYPGMNNREVLEQVERGYRMPCPQDCPISLHELMIHCWKKDPEERPTFEYLQSFLEDYFTATEPQYQPGENL

SEQ ID NO: 1507 - DNA, 1958 bp, Homo sapiens
cagcgcaggtctgaggagctgagaagggaggcttacgtgaagggaatttagataatgggctgtgtgcaatgtaaggataaagaagcaacaaaactgacggaggagagggacggcagcctgaaccagagctctgggtaccgctatggcacagaccccacccctcagcactaccccagcttcggtgtgacctccatccccaactacaacaacttccacgcagccgggggccaaggactcaccgtctttggaggtgtgaactcttcgtctcatacggggaccttgcgtacgagaggaggaacaggagtgacactctttgtggccctttatgactatgaagcacggacagaagatgacctgagttttcacaaaggagaaaaatttcaaatattgaacagctcggaaggagattggtgggaagcccgctccttgacaactggagagacaggttacattcccagcaattatgtggctccagttgactctatccaggcagaagagtggtactttggaaaacttggccgaaaagatgctgagcgacagctattgtcctttggaaacccaagaggtacctttcttatccgcgagagtgaaaccaccaaaggtgcctattcactttctatccgtgattgggatgatatgaaaggagaccatgtcaaacattataaaattcgcaaacttgacaatggtggatactacattaccacccgggcccagtttgaaacacttcagcagcttgtacaacattactcaggtacctggaatggaaacacaaaagtagccataaagactcttaaaccaggcacaatgtcccccgaatcattccttgaggaagcgcagatcatgaagaagctgaagcacgacaagctggtccagctctatgcagtggtgtctgaggagcccatctacatcgtcaccgagtatatgaacaaaggaagtttactggatttcttaaaagatggagaaggaagagctctgaaattaccaaatcttgtggacatggcagcacaggtggctgcaggaatggcttacatcgagcgcatgaattatatccatagagatctgcgatcagcaaacattctagtggggaatggactcatatgcaagattgctgacttcggattggcccgattgatagaagacaatgagtacacagcaagacaaggtgcaaagttccccatcaagtggacggcccccgaggcagccctgtacgggaggttcacaatcaagtctgacgtgtggtcttttggaatcttactcacagagctggtcaccaaaggaagagtgccatacccaggcatgaacaaccgggaggtgctggagcaggtggagcgaggctacaggatgccctgcccgcaggactgccccatctctctgcatgagctcatgatccactgctggaaaaaggaccctgaagaacgccccacttttgagtacttgcagagcttcctggaagactactttaccgcgacagagccccagtaccaacctggtgaaaacctgtaaggcccgggtctgcggagagaggccttgtcccagaggctgccccacccctccccattagctttcaattccgtagccagctgctccccagcagcggaaccgcccaggatcagattgcatgtgactctgaagctgacgaacttccatggccctcattaatgacacttgtccccaaatccgaacctcctctgtgaagcattcgagacagaaccttgttatttctcagactttggaaaatgcattgtatcgatgttatgtaaaaggccaaacctctgttcagtgtaaatagttactccagtgccaacaatcctagtgctttccttttttaaaaatgcaaatcctatgtgattttaactctgtcttcacctgattcaactaaaaaaaaaaaagtattattttccaaaagtggcctctttgtctaaaacaataaaattttttttcatgttttaacaaaaacc

SEQ ID NO: 1508 - protein, 482 aa, Homo sapiens
MGCVQCKDKEATKLTEERDGSLNQSSGYRYGTDPTPQHYPSFGVTSIPNYNNFHAAGGQGLTVFGGVNSSSHTGTLRTRGGTGVTLFVALYDYEARTEDDLSFHKGEKFQILNSSEGDWWEARSLTTGETGYIPSNYVAPVDSIQAEEWYFGKLGRKDAERQLLSFGNPRGTFLIRESETTKGAYSLSIRDWDDMKGDHVKHYKIRKLDNGGYYITTRAQFETLQQLVQHYSGTWNGNTKVAIKTLKPGTMSPESFLEEAQIMKKLKHDKLVQLYAVVSEEPIYIVTEYMNKGSLLDFLKDGEGRALKLPNLVDMAAQVAAGMAYIERMNYIHRDLRSANILVGNGLICKIADFGLARLIEDNEYTARQGAKFPIKWTAPEAALYGRFTIKSDVWSFGILLTELVTKGRVPYPGMNNREVLEQVERGYRMPCPQDCPISLHELMIHCWKKDPEERPTFEYLQSFLEDYFTATEPQYQPGENL

SEQ ID NO: 1509 - DNA, 2483 bp, Homo sapiens
gccgcgctggtggcggcggcgcgtcgttgcagttgcgccatctgtcaggagcggagccggcgaggagggggctgccgcgggcgaggaggaggggtcgccgcgagccgaaggccttcgagacccgcccgccgcccggcggcgagagtagaggcgaggttgttgtgcgagcggcgcgtcctctcccgcccgggcgcgccgcgcttctcccagcgcaccgaggaccgcccgggcgcacacaaagccgccgcccgcgccgcaccgcccggcggccgccgcccgcgccagggagggattcggccgccgggccggggacaccccggcgccgccccctcggtgctctcggaaggcccaccggctcccgggcccgccggggaccccccggagccgcctcggccgcgccggaggagggcggggagaggaccatgtgagtgggctccggagcctcagcgccgcgcagtttttttgaagaagcaggatgctgatctaaacgtggaaaaagaccagtcctgcctctgttgtagaagacatgtggtgtatataaagtttgtgatcgttggcggacattttggaatttagataatgggctgtgtgcaatgtaaggataaagaagcaacaaaactgacggaggagagggacggcagcctgaaccagagctctgggtaccgctatggcacagaccccacccctcagcactaccccagcttcggtgtgacctccatccccaactacaacaacttccacgcagccgggggccaaggactcaccgtctttggaggtgtgaactcttcgtctcatacggggaccttgcgtacgagaggaggaacaggagtgacactctttgtggccctttatgactatgaagcacggacagaagatgacctgagttttcacaaaggagaaaaatttcaaatattgaacagctcggaaggagattggtgggaagcccgctccttgacaactggagagacaggttacattcccagcaattatgtggctccagttgactctatccaggcagaagagtggtactttggaaaacttggccgaaaagatgctgagcgacagctattgtcctttggaaacccaagaggtacctttcttatccgcgagagtgaaaccaccaaaggtgcctattcactttctatccgtgattgggatgatatgaaaggagaccatgtcaaacattataaaattcgcaaacttgacaatggtggatactacattaccacccgggcccagtttgaaacacttcagcagcttgtacaacattactcaggtacctggaatggaaacacaaaagtagccataaagactcttaaaccaggcacaatgtcccccgaatcattccttgaggaagcgcagatcatgaagaagctgaagcacgacaagctggtccagctctatgcagtggtgtctgaggagcccatctacatcgtcaccgagtatatgaacaaaggaagtttactggatttcttaaaagatggagaaggaagagctctgaaattaccaaatcttgtggacatggcagcacaggtggctgcaggaatggcttacatcgagcgcatgaattatatccatagagatctgcgatcagcaaacattctagtggggaatggactcatatgcaagattgctgacttcggattggcccgattgatagaagacaatgagtacacagcaagacaaggtgcaaagttccccatcaagtggacggcccccgaggcagccctgtacgggaggttcacaatcaagtctgacgtgtggtcttttggaatcttactcacagagctggtcaccaaaggaagagtgccatacccaggcatgaacaaccgggaggtgctggagcaggtggagcgaggctacaggatgccctgcccgcaggactgccccatctctctgcatgagctcatgatccactgctggaaaaaggaccctgaagaacgccccacttttgagtacttgcagagcttcctggaagactactttaccgcgacagagccccagtaccaacctggtgaaaacctgtaaggcccgggtctgcggagagaggccttgtcccagaggctgccccacccctccccattagctttcaattccgtagccagctgctccccagcagcggaaccgcccaggatcagattgcatgtgactctgaagctgacgaacttccatggccctcattaatgacacttgtccccaaatccgaacctcctctgtgaagcattcgagacagaaccttgttatttctcagactttggaaaatgcattgtatcgatgttatgtaaaaggccaaacctctgttcagtgtaaatagttactccagtgccaacaatcctagtgctttccttttttaaaaatgcaaatcctatgtgattttaactctgtcttcacctgattcaactaaaaaaaaaaaagtattattttccaaaagtggcctctttgtctaaaacaataaaattttttttcatgttttaacaaaaacc

SEQ ID NO: 1510 - protein, 482 aa, Homo sapiens; identical to SEQ ID NO: 1508

SEQ ID NO: 1511 - DNA, 2319 bp, Homo sapiens
aacaaaagtgtctgagaaagccagagtgtgaccacgcggtttctatgctccaagggatttatttcagtggtaggtggagcagctctgtggagcacatggctaatgataatggattgactgaccagaagcaggagaggacctagcagaagccggaggtcaagctgccccaagactgggggacagcctgggtgaagactctggacctcatgaccatgtatattccagagggggatctaaagagccccagaaattcacaaaggaccagtcctgcctctgttgtagaagacatgtggtgtatataaagtttgtgatcgttggcggacattttggaatttagataatgggctgtgtgcaatgtaaggataaagaagcaacaaaactgacggaggagagggacggcagcctgaaccagagctctgggtaccgctatggcacagaccccacccctcagcactaccccagcttcggtgtgacctccatccccaactacaacaacttccacgcagccgggggccaaggactcaccgtctttggaggtgtgaactcttcgtctcatacggggaccttgcgtacgagaggaggaacaggagtgacactctttgtggccctttatgactatgaagcacggacagaagatgacctgagttttcacaaaggagaaaaatttcaaatattgaacagctcggaaggagattggtgggaagcccgctccttgacaactggagagacaggttacattcccagcaattatgtggctccagttgactctatccaggcagaagagtggtactttggaaaacttggccgaaaagatgctgagcgacagctattgtcctttggaaacccaagaggtacctttcttatccgcgagagtgaaaccaccaaaggtgcctattcactttctatccgtgattgggatgatatgaaaggagaccatgtcaaacattataaaattcgcaaacttgacaatggtggatactacattaccacccgggcccagtttgaaacacttcagcagcttgtacaacattactcagagaaagctgatggtttgtgttttaacttaactgtgattgcatcgagttgtaccccacaaacttctggattggctaaagatgcttgggaagttgcacgtcgttcgttgtgtctggagaagaagctgggtcaggggtgtttcgctgaagtgtggcttggtacctggaatggaaacacaaaagtagccataaagactcttaaaccaggcacaatgtcccccgaatcattccttgaggaagcgcagatcatgaagaagctgaagcacgacaagctggtccagctctatgcagtggtgtctgaggagcccatctacatcgtcaccgagtatatgaacaaaggaagtttactggatttcttaaaagatggagaaggaagagctctgaaattaccaaatcttgtggacatggcagcacaggtggctgcaggaatggcttacatcgagcgcatgaattatatccatagagatctgcgatcagcaaacattctagtggggaatggactcatatgcaagattgctgacttcggattggcccgattgatagaagacaatgagtacacagcaagacaaggtgcaaagttccccatcaagtggacggcccccgaggcagccctgtacgggaggttcacaatcaagtctgacgtgtggtcttttggaatcttactcacagagctggtcaccaaaggaagagtgccatacccaggcatgaacaaccgggaggtgctggagcaggtggagcgaggctacaggatgccctgcccgcaggactgccccatctctctgcatgagctcatgatccactgctggaaaaaggaccctgaagaacgccccacttttgagtacttgcagagcttcctggaagactactttaccgcgacagagccccagtaccaacctggtgaaaacctgtaaggcccgggtctgcggagagaggccttgtcccagaggctgccccacccctccccattagctttcaattccgtagccagctgctccccagcagcggaaccgcccaggatcagattgcatgtgactctgaagctgacgaacttccatggccctcattaatgacacttgtccccaaatccgaacctcctctgtgaagcattcgagacagaaccttgttatttctcagactttggaaaatgcattgtatcgatgttatgtaaaaggccaaacctctgttcagtgtaaatagttactccagtgccaacaatcctagtgctttccttttttaaaaatgcaaatcctatgtgattttaactctgtcttcacctgattcaact

SEQ ID NO: 1512 - protein, 534 aa, Homo sapiens; identical to SEQ ID NO: 1504

SEQ ID NO: 1513 - DNA, 2559 bp, Homo sapiens
gaggagcgtgcgcgctcccgtcgtggcgacggtggcggcgagcggcgtcagagcttgagggggggttgacggcttctggcgggtggcggtgttgaaggcgagagcttgcttggcccgtgtcgcttctgtcccaagaaccggacggagagtgagggcacgagggtcgctgtcgggggctgtcgtcttccacgtacacgtcgtcgtgaggagcgcagtccggactcttcccgcaacccctccggctcccttcccgtccgcccgctacgccgccgccatgtcggcgcaggcccagatgcgcgcgatgctggaccagttgatgggcacctcccgggacggagatacaactcgtcaacgaatcaaattcagtgatgacagagtatgcaagagtcaccttctcaactgttgtcctcatgatgtcctttctggaactagaatggatcttggagaatgtctgaaagtccatgacctggctttaagagcggattatgaaattgcatccaaagaacaagattttttctttgaacttgatgccatggatcatctgcagtcattcattgcagattgtgatcgtagaacagaagtggccaagaaaagattagcagaaactcaagaagagattagtgctgaagtagcagcaaaggcagaacgtgttcatgagttaaatgaagaaattggtaaattgttagccaaggtggaacaactaggagctgaagggaatgtggaggaatcccagaaagtaatggatgaagtagagaaagcacgggcaaagaaaagagaagcagaggaagtttatcggaattctatgccagcttccagttttcagcagcagaaacttcgagtctgtgaagtctgctctgcctatttaggacttcatgataatgacagacgactggctgatcattttgggggtaaactgcacctgggatttattgaaataagagagaagcttgaagaattaaagagagtcgtagctgagaagcaggagaaaagaaaccaggaacggctgaaacgaagagaagagagagagagagaagaaagggagaagctgaggaggtcccgatcacacagcaagaatccaaaaagatccaggtccagagagcatcgcagacatcgatctcgctccatgtcacgtgaacgcaagaggagaactcgatccaaatctcgggagaaacgccatcgccacaggtcccgctccagcagccgtagccgcagccgtagccaccagagaagtcggcacagttctagagataggagcagagaacgatccaagaggagatcctcaaaagaaagattcagagaccaagacttagcatcatgtgacagagacaggagttcaagagacagatcacctcgtgacagagatcggaaagataagaagcggtcctatgagagtgctaatggcagatcagaagacaggaggagctctgaagagcgcgaagcaggggatctaactagctgtgtacatttcttcagtccttaagcttcctacggagttacgtactattgtttagttcacagctgttcagggtgacagtgagcagatccagacaccagatccagctaggctagatgtacagtatctaacttgatctgaactgaacctgttttccttgatgatgcctaaaactacatccatagtttctggtgaacctgtaatacagttctgaaagtacagttttatataataagatgctgatctctttattctttcaagtaagagtgctagtgaacaaattgtgttacttgccttgggattttttgaacgtttgtaaaatgctgtcttcctagtccaaacagctgcagctttgggcatttttctttttaattattcttcctctgactttgtatcccttaatacctacactctccaattgtaagagaaagggggcagggaagcaatatagcttccattctaaggctgtattcccgttatgaattactagctgattacagttcagagcattgatcctggaatgtgtgctggagaaatttaaaatactggggttttttgtttaatggtgcctatttagagttggaagttgaacagctgttgcattacatacttttgcttttttattgaaattttgaaatcaaacgtcttgatttttctgttctgttgaattgctatgttcaggatgttctagggggtgggggcagggactcttttcgtaataagcacttgttttattttgtgtgtgtggagtataaaggctacacccttattgtaaaaaaataataataataaaatgaaagaaacaatcaccaccaccattattaaactgtaacttgtctagtaaattgtcactagaactatttgctgtgggcatttcctctattctgttacgtcattaacagtgccttactgtgcaaggcaccaaaggacataaatacgtacttgcaaagattccagatgagctgttcatgtgggccccttgctgactatattccagccacttcagggttgtttgtaatgaccgttatagagaagggctcgacctgcagaagaaactggggtgtttttattctcattcaacaaacccaaataaaaacagtatatgt

SEQ ID NO: 1514 - protein, 401 aa, Homo sapiens
MSAQAQMRAMLDQLMGTSRDGDTTRQRIKFSDDRVCKSHLLNCCPHDVLSGTRMDLGECLKVHDLALRADYEIASKEQDFFFELDAMDHLQSFIADCDRRTEVAKKRLAETQEEISAEVAAKAERVHELNEEIGKLLAKVEQLGAEGNVEESQKVMDEVEKARAKKREAEEVYRNSMPASSFQQQKLRVCEVCSAYLGLHDNDRRLADHFGGKLHLGFIEIREKLEELKRVVAEKQEKRNQERLKRREEREREEREKLRRSRSHSKNPKRSRSREHRRHRSRSMSRERKRRTRSKSREKRHRHRSRSSSRSRSRSHQRSRHSSRDRSRERSKRRSSKERFRDQDLASCDRDRSSRDRSPRDRDRKDKKRSYESANGRSEDRRSSEEREAGDLTSCVHFFSP

SEQ ID NO: 1515 - DNA, 2645 bp, Homo sapiens
gacggtggcggcgagcggcgtcagagcttgagggggggttgacggcttctggcgggtggcggtgttgaaggcgagagcttgcttggcccgtgtcgcttctgtcccaagaaccggacggagagtgagggcacgagggtcgctgtcgggggctgtcgtcttccacgtacacgtcgtcgtgaggagcgcagtccggactcttcccgcaacccctccggctccctttccgcacgcctcgaggcggcggcggccaccgagacagcagcgcaccttcccccatcccttccccttatcccccagcccaaaagggcccggtctgcgccccacccccgcccgtccgcccgctacgccgccgccatgtcggcgcaggcccagatgcgcgcgatgctggaccagttgatgggcacctcccgggacggagatacaactcgtcaacgaatcaaattcagtgatgacagagtatgcaagagtcaccttctcaactgttgtcctcatgatgtcctttctggaactagaatggatcttggagaatgtctgaaagtccatgacctggctttaagagcggattatgaaattgcatccaaagaacaagattttttctttgaacttgatgccatggatcatctgcagtcattcattgcagattgtgatcgtagaacagaagtggccaagaaaagattagcagaaactcaagaagagattagtgctgaagtagcagcaaaggcagaacgtgttcatgagttaaatgaagaaattggtaaattgttagccaaggtggaacaactaggagctgaagggaatgtggaggaatcccagaaagtaatggatgaagtagagaaagcacgggcaaagaaaagagaagcagaggaagtttatcggaattctatgccagcttccagttttcagcagcagaaacttcgagtctgtgaagtctgctctgcctatttaggacttcatgataatgacagacgactggctgatcattttgggggtaaactgcacctgggatttattgaaataagagagaagcttgaagaattaaagagagtcgtagctgagaagcaggagaaaagaaaccaggaacggctgaaacgaagagaagagagagagagagaagaaagggagaagctgaggaggtcccgatcacacagcaagaatccaaaaagatccaggtccagagagcatcgcagacatcgatctcgctccatgtcacgtgaacgcaagaggagaactcgatccaaatctcgggagaaacgccatcgccacaggtcccgctccagcagccgtagccgcagccgtagccaccagagaagtcggcacagttctagagataggagcagagaacgatccaagaggagatcctcaaaagaaagattcagagaccaagacttagcatcatgtgacagagacaggagttcaagagacagatcacctcgtgacagagatcggaaagataagaagcggtcctatgagagtgctaatggcagatcagaagacaggaggagctctgaagagcgcgaagcaggggagatctaactagctgtgtacatttcttcagtccttaagcttcctacggagttacgtactattgtttagttcacagctgttcagggtgacagtgagcagatccagacaccagatccagctaggctagatgtacagtatctaacttgatctgaactgaacctgttttccttgatgatgcctaaaactacatccatagtttctggtgaacctgtaatacagttctgaaagtacagttttatataataagatgctgatctctttattctttcaagtaagagtgctagtgaacaaattgtgttacttgccttgggattttttgaacgtttgtaaaatgctgtcttcctagtccaaacagctgcagctttgggcatttttctttttaattattcttcctctgactttgtatcccttaatacctacactctccaattgtaagagaaagggggcagggaagcaatatagcttccattctaaggctgtattcccgttatgaattactagctgattacagttcagagcattgatcctggaatgtgtgctggagaaatttaaaatactggggttttttgtttaatggtgcctatttagagttggaagttgaacagctgttgcattacatacttttgcttttttattgaaattttgaaatcaaacgtcttgatttttctgttctgttgaattgctatgttcaggatgttctagggggtgggggcagggactcttttcgtaataagcacttgttttattttgtgtgtgtggagtataaaggctacacccttattgtaaaaaaataataataataaaatgaaagaaacaatcaccaccaccattattaaactgtaacttgtctagtaaattgtcactagaactatttgctgtgggcatttcctctattctgttacgtcattaacagtgccttactgtgcaaggcaccaaaggacataaatacgtacttgcaaagattccagatgagctgttcatgtgggccccttgctgactatattccagccacttcagggttgtttgtaatgaccgttatagagaagggctcgacctgcagaagaaactggggtgtttttattctcattcaacaaacccaaataaaaacagtatatgtaacc

SEQ ID NO: 1516 - protein, 392 aa, Homo sapiens
MSAQAQMRAMLDQLMGTSRDGDTTRQRIKFSDDRVCKSHLLNCCPHDVLSGTRMDLGECLKVHDLALRADYEIASKEQDFFFELDAMDHLQSFIADCDRRTEVAKKRLAETQEEISAEVAAKAERVHELNEEIGKLLAKVEQLGAEGNVEESQKVMDEVEKARAKKREAEEVYRNSMPASSFQQQKLRVCEVCSAYLGLHDNDRRLADHFGGKLHLGFIEIREKLEELKRVVAEKQEKRNQERLKRREEREREEREKLRRSRSHSKNPKRSRSREHRRHRSRSMSRERKRRTRSKSREKRHRHRSRSSSRSRSRSHQRSRHSSRDRSRERSKRRSSKERFRDQDLASCDRDRSSRDRSPRDRDRKDKKRSYESANGRSEDRRSSEEREAGEI

(The sequence listing continues in the following parts.)

We claim:

1. A composition comprising a plurality of isolated probes that in total selectively bind to at least 2 the glomerular markers listed in Table 6 or Table 7, complements thereof, or their expression products, wherein at least 10% of the probes in total are selective for glomerular markers.

2. The composition of claim 1 wherein the plurality of isolated probes in total selectively binds to at least 5 the glomerular markers in Table 6 or Table 7, complements thereof, or their expression products.

3. The composition of claim 1 wherein at least 20% of the probes in total are selective for glomerular markers.

4. The composition of claim 1 wherein the plurality of isolated probes in total selectively binds to at least 2 of the glomerular markers disclosed herein in Table 11, complements thereof, human homologues thereof, or their expression products.

5. The composition of claim 1 wherein the plurality of isolated probes in total selectively binds to at least 10 of the glomerular markers disclosed herein in Table 11, complements thereof, human homologues thereof, or their expression products.

6. The composition of claim 1 wherein the plurality of isolated probes in total selectively binds to at least 2 of the glomerular markers disclosed herein in Table 3, complements thereof, human homologues thereof, or their expression products.

7. The composition of claim 1 wherein the plurality of isolated probes in total selectively binds to at least 10 of the glomerular markers disclosed herein in Table 3, complements thereof, human homologues thereof, or their expression products.

8. The composition of claim 1 wherein the plurality of isolated probes in total selectively binds to at least 2 of the glomerular markers disclosed herein in Table 4, complements thereof, human homologues thereof, or their expression products.

9. The composition of claim 1 wherein the plurality of isolated probes in total selectively binds to at least 10 of the glomerular markers disclosed herein in Table 4, complements thereof, human homologues thereof, or their expression products.

10. The composition of claim 1 wherein the plurality of isolated probes in total selectively binds to at least 2 of the glomerular markers disclosed herein in Table 5, complements thereof, human homologues thereof, or their expression products.

11. The composition of claim 1 wherein the plurality of isolated probes in total selectively binds to at least 10 of the glomerular markers disclosed herein in Table 5, complements thereof, human homologues thereof, or their expression products.

12. The composition of claim 1 wherein the plurality of isolated probes in total selectively binds to at least 2 of the glomerular markers disclosed herein in Table 13, complements thereof, human homologues thereof, or their expression products.

13. The composition of claim 1 wherein the plurality of isolated probes in total selectively binds to at least 10 of the glomerular markers disclosed herein in Table 13, complements thereof, human homologues thereof, or their expression products.

14. The composition of claim 1 wherein the plurality of isolated probes in total selectively binds to at least 2 of the glomerular markers disclosed herein in Table 9, complements thereof, human homologues thereof, or their expression products.

15. The composition of claim 1 wherein the plurality of isolated probes in total selectively binds to at least 10 of the glomerular markers disclosed herein in Table 9, complements thereof, human homologues thereof, or their expression products.

16. A composition comprising a plurality of isolated probes that in total selectively bind to at least 51 of the glomerular markers disclosed herein in Table 9, complements thereof, human homologues thereof, or their expression products, wherein at least 3.75% of the probes in total are selective for glomerular markers.

17. The composition of claim 16, wherein the plurality of isolated probes in total selectively binds to at least 100 of the glomerular markers disclosed herein in Table 9, complements thereof, human homologues thereof, or their expression products.

18. The composition of claim 1 wherein the plurality of isolated probes comprises polynucleotide probes.

19. The composition of claim 1 wherein the plurality of isolated probes comprises antibody probes.

20. The composition of claim 1 wherein the plurality of isolated probes are arrayed on a solid support.

21. A method to profile a glomerular expression pattern from a subject, comprising
a) providing one of more compositions according to claims 1;
b) contacting the one or more compositions with glomerular polynucleotides and/or polypeptides under conditions to promote selective binding of the probes to their glomerular marker target; and
c) detecting presence of the glomerular marker targets by binding of the probes to their glomerular marker target, wherein the glomerular marker targets detected comprise a glomerular expression pattern.

22. A method for identifying glomerular marker polynucleotides, comprising
a) perfusing a target kidney in an organism with a solution containing magnetic beads, wherein the magnetic bead diameter is approximately equivalent to the capillary diameter of glomerular capillaries;
b) removing glomerular-containing kidney tissue from the organism;
c) digesting the glomerular-containing kidney tissue to separate glomeruli from associated kidney tissue;
d) magnetically isolating glomeruli from the digested glomerular-containing kidney tissue;
e) isolating mRNA from the isolated glomeruli
f) normalizing the mRNA to at least partially suppress high copy number mRNA transcripts;
g) identifying mRNA that are expressed in the glomerulus, wherein such mRNA are glomerular marker polynucleotides.

22. The method of claim 21, further comprising identifying podocyte-specific glomerular polynucleotides, wherein such identifying comprises identifying those glomerular marker polynucleotides that are expressed in glomerular podocytes.

23. The method of claim 21, further comprising identifying non-podocyte-specific glomerular polynucleotides, wherein such identifying comprises identifying those glomerular marker polynucleotides that are expressed in glomerular endothelial and/or mesangial cells.
